United States Patent Application Publication US 2011/0296543 A1 - sequence listing, part 17

SEQ ID NO: 70799 - DNA, 4812 bp, Unknown
  Obtained from environmental sample
  misc_feature (1)..(4812): n is a, c, g, or t
ttgggttatggcgagagttataaggggcttagcgacacgctgacgttcaagaccaacggcaatttgctaagcggcgacataggattcgacggctacatcaagggcggcgacagctgggtggagcttaccgattgggcgcagaacgctcaaaacctcctttccgtagggataagcaagcgggtggagaccgtagggcccacggcgcagcacatcgactacgccgcgccggcctacttccgggagttcgccgactacctgcaggcggagaacgcttccgcctacggttggaacatcaaccaattccgtcgggcggaggcctcaagcgactggttgatcggcaagctcatagggcagaaccagaggaatatcccgattgccggatgggtggagatgaaggacaccgtgccgacgttcagaacgttcagcgacggcgaggacttccgcgccgcctggcggacggtgctcaactatatgtggcacggtaaccccggctacacttgggatccggccagccgccaggtcgtcatgcgcaaatccaacaccttccaacaagacgccgggaaacgcctcgccaaattcctgtgggacaggcggcctacgtggagcaactcttgcgagaagataataggggaggggctatggtgggggccttccatgctcaaataccactactccccccagggagagcagttgtcggagttcaccctgaattggttgcacgggacgggctcgccctccgccgtaaccgcccgcgacaccaatttgatggccgaaatgtaccgccaagccgagctggagtgggatgtcgatacgccgggcgacaggtatctgacgagcgtcccgttctactttcacggaattttcagagtgttgggactaaacgtactcaccggcaaccaccacgccccgatgaacatcaagcggtcggcgaacatgaaggtctatctggatgttaataagacctacgcctttgaggaagacaccatcacctacacgatagactacaggaactacggggcggaggaggccaagggcgtacagatagttaaccgtctgcacagcgacttcgtgtttttgtcggggacaaattcgccgtcttacaacgcgtccgcgaataccgtgacttggaatataggcgccgtgcccggcttcaagacgtcgaccggcatcaatccgacaaaaggatccgtaacgctcaaggttacgatccctaaggccaagctcaagcgctacgagaacaaagtcacaatatcctgtacaaacgggaccggctggacgtccaacgagtacccgaacaaaatatcgtccgtgatgaaacggaccggggtggacatcgccaaacgcgcattgcgtgtcgatcactccgtttatagagacaccgtaaatcccgggatgaccgccgtatatacgatagatttcgagaacagcgccgaggcggggtggctgaacggcggcaggccgggggtcaacttctcctacgcgcacgaggggacggcgtcgagcgacggcagccacacttttatgatcagggcgttcaacgacgcccacgaggcctatatcgattacgggaattaccgcatatcgtatttcttatttgacaataactacaagggtttgggcgcaagcgggtggaatgtccgcaccgacatactctacgtccctgaggcggagaggtcgaaattcaaattgctgcacgagaacatcacgcccggcgaggataaaaacggcaagtggaatcagcgcctgatattgcagatcgccgacgtactggatccgtctcggagcgatacgaattgggggacgatggcggcgcccacgcaattcctcatcaattacagcggccttgacaatcgcgtccaccgcggcatcagcacgcctttcaagggggtgtgggcggtgtacgccggcaactacgccaaccgaaattgggggagcgattggtcgtacaattcaaaagccaaaggcactatcagcaacgacgcgatgagcagctggggctatcccataacgccggatttcaccgacgatccatccccggacaatcccggcaaacccgttgcgttgctgcataggaaactatgcgcgtcgccggcctccgttgccatagataatgttttgatagaggagtgggacggctacacctggcgcagggtattcggcaacgggccgctcccgggacgcgaggttgtaaacgtcgtaatccgagataccgtaccgcagggcgtgacgttcatcaatttcatcgaaccttacccgatgggaaaagcgcccaagataaacggacgcgttatcacgtgggaaattgacaaactgctggtaggcgagaaagggagtataaaatacactgtacgcgccgacgcgctctccggcgcgaaagatctcgtcattccctcaaacgcttgggctgtggccgacagggagtcgccgatgcggagcacggctacgcttgtggtaacgaaagactctttgccgccgccgccgccggaacctaccaccatgtacaagagggcggataaaaccgcgtactctcccggcgataccgtaatctacaccgtcgcctacaagcagacgcacggatacccctccgtcagcagctcgtcgaaccagtgggacggtacgagcaagtctataagcaacgatgggaaaaccatctcctttgggactagttcgtttgacatgcgtttcacgccggcgtccggcacgaacgtcacgcttaccggcacgatgtccccgcagtcgtacggcccggccttctacgtattcgcgagacgcaccgcccaaggctccgttgaacttaagtttgagcgtaaatatatacaatcggaaaatttcccgggtattcaggtcacccttacctcaaacggccgtacaatcgatagcgtcggcgtgccgatggccgacaccgagacgtctatcaactacaaattcgtctttaagaatgacagtctgcttatgtggatgggcgacacgtccgccgtcattccctttagggtgacgaaaggtgtcgccgttcagcgcggcgacgccggcgtgcgctatgagtccaacggcggcggcagttcgtcgcggattacaaattgggcgagccgcaccgatttggcctacgacgtaacaatccgcgacacagttcctttcggcgtgaggtacatagcaggttcggccgccggcagtattaatacgggaacgctttcgccgaaacaattgacgggcggtatcagcggcaacgtaatcacttggcccgtggtaagcggttccaacgctccgcttggcgcgaatgattctcttaccgtaacgtggcgcggtattgtcgatacgtcaaagaccggcgccgtcgtcaacaccgcctacgccgatctcgacggttatcccaaagacgccgtaggcgctcaggtacggtcaagattctcaattgtcaaggagccggatgaaccgccgcccgacacatctgaaatcgacacgcttaaaagcggtctgacggtgaaggtcgaaccggccgggtatccgtcgacgtgcatgtttgcggggtctgtcaaggttacgctgtcgtcgctgcccgaggcggttatttggtataccacaaacgggcaggagccggacccgacttcgtttgcctccaggcgctatacgccggggcagccgcttgagctcttcatgctcacgacgctcagggccgcggcatacgccgacggctttgagccgttctttacggagaagcatgtttacgaacctataaacaccgttccggtcaggttcgccgtattctacgacgatgtcggcgacggtctggcgcacggggtgaagctggtcgtggcccgcgaatggatggcggatctgaatcccgccgtcataaaggctcatccggagttgctgtcgctctccggattgccggttgcggactcgctgcgttttgcgggcgacacgatagtgattccgttcaagaagggcgccggggtggatccgctgaaatccgacgcgaagctcgttgtgaaggacccgccgctgcctaacccgctctacgcgaacgagcacggctacttggcggcgtgcgaactgagcatcatggacggcgtagtccctgtcattgcgtcggcggtatacaatccggcgtttaaaggcggaacgctgcaaagcgacggcgtggccggcgatacgctggcggtcacattcaacaaactgccggacgtgcacactaccggagaattggtgccgttcatcctatcgtactccggcgggacctacgaactgaaacttgagtacgcgtggcgcgagggcaacactttctatttcatggtcacgggtatggcaggtaaaaatccggtcgcggcgccctccgacggcgactcgatccgcataaaagtaggcggcaggggaatatggttaagagacagcacggtcgtccagcagaatgaacacaacaccgccgtagcgttgaaaataaggtacccggacctaaagtacacggtaaaaacggggcctagcccgtccgcggacacagtgcgaataatcataagcttatcgccgttcctgtcgtcggcctttgagagactctcccctcaggccgtaatcttcgacaggctgggcaacgcggtgattgccaccgataaggacatgaagttcgaacccgccggcgatcactacgctttgatatggaacggctgcaatcaaaaaggcagaaaggtaggcacaggcacctaccgagtattagtgacaataaccgaccaagacggcggcaagaagactatggaaacatggtctatattgtcaggagaaaataaatggaagccatacacggcgtattggagtggttcataa

SEQ ID NO: 70800 - protein, 1603 aa, Unknown
  Obtained from environmental sample
  DOMAIN (288)...(362): Domain of unknown function DUF11
  misc_feature (1)..(1603): Xaa is any amino acid
MGYGESYKGLSDTLTFKTNGNLLSGDIGFDGYIKGGDSWVELTDWAQNAQNLLSVGISKRVETVGPTAQHIDYAAPAYFREFADYLQAENASAYGWNINQFRRAEASSDWLIGKLIGQNQRNIPIAGWVEMKDTVPTFRTFSDGEDFRAAWRTVLNYMWHGNPGYTWDPASRQVVMRKSNTFQQDAGKRLAKFLWDRRPTWSNSCEKIIGEGLWWGPSMLKYHYSPQGEQLSEFTLNWLHGTGSPSAVTARDTNLMAEMYRQAELEWDVDTPGDRYLTSVPFYFHGIFRVLGLNVLTGNHHAPMNIKRSANMKVYLDVNKTYAFEEDTITYTIDYRNYGAEEAKGVQIVNRLHSDFVFLSGTNSPSYNASANTVTWNIGAVPGFKTSTGINPTKGSVTLKVTIPKAKLKRYENKVTISCTNGTGWTSNEYPNKISSVMKRTGVDIAKRALRVDHSVYRDTVNPGMTAVYTIDFENSAEAGWLNGGRPGVNFSYAHEGTASSDGSHTFMIRAFNDAHEAYIDYGNYRISYFLFDNNYKGLGASGWNVRTDILYVPEAERSKFKLLHENITPGEDKNGKWNQRLILQIADVLDPSRSDTNWGTMAAPTQFLINYSGLDNRVHRGISTPFKGVWAVYAGNYANRNWGSDWSYNSKAKGTISNDAMSSWGYPITPDFTDDPSPDNPGKPVALLHRKLCASPASVAIDNVLIEEWDGYTWRRVFGNGPLPGREVVNVVIRDTVPQGVTFINFIEPYPMGKAPKINGRVITWEIDKLLVGEKGSIKYTVRADALSGAKDLVIPSNAWAVADRESPMRSTATLVVTKDSLPPPPPEPTTMYKRADKTAYSPGDTVIYTVAYKQTHGYPSVSSSSNQWDGTSKSISNDGKTISFGTSSFDMRFTPASGTNVTLTGTMSPQSYGPAFYVFARRTAQGSVELKFERKYIQSENFPGIQVTLTSNGRTIDSVGVPMADTETSINYKFVFKNDSLLMWMGDTSAVIPFRVTKGVAVQRGDAGVRYESNGGGSSSRITNWASRTDLAYDVTIRDTVPFGVRYIAGSAAGSINTGTLSPKQLTGGISGNVITWPVVSGSNAPLGANDSLTVTWRGIVDTSKTGAVVNTAYADLDGYPKDAVGAQVRSRFSIVKEPDEPPPDTSEIDTLKSGLTVKVEPAGYPSTCMFAGSVKVTLSSLPEAVIWYTTNGQEPDPTSFASRRYTPGQPLELFMLTTLRAAAYADGFEPFFTEKHVYEPINTVPVRFAVFYDDVGDGLAHGVKLVVAREWMADLNPAVIKAHPELLSLSGLPVADSLRFAGDTIVIPFKKGAGVDPLKSDAKLVVKDPPLPNPLYANEHGYLAACELSIMDGVVPVIASAVYNPAFKGGTLQSDGVAGDTLAVTFNKLPDVHTTGELVPFILSYSGGTYELKLEYAWREGNTFYFMVTGMAGKNPVAAPSDGDSIRIKVGGRGIWLRDSTVVQQNEHNTAVALKIRYPDLKYTVKTGPSPSADTVRIIISLSPFLSSAFERLSPQAVIFDRLGNAVIATDKDMKFEPAGDHYALIWNGCNQKGRKVGTGTYRVLVTITDQDGGKKTMETWSILSGENKWKPYTAYWSGS

SEQ ID NO: 70801 - DNA, 1035 bp, Unknown
  Obtained from environmental sample
  misc_feature (1)..(1035): n is a, c, g, or t
atgtcaacaaaattaacatactcttccgccggtgtaaacatcgacacctggaacagtgtaaaaggccgtataggcgaccttgtttcttccacatacaatgccaacgttcacggtaaattcggccaattcggcggaatgttcgacgcctcgtttctaaagggtatggacgcccctattctggtctcttcaacagacagcgtggggacgaaggtcaaagtcgctttcgactcgaaggtctacgatactgtcggcatagatatcgtaaaccactgcgtcgacgacatcttagtcatgggcgcccgtccgctcttcttcttagactacatcggcatcggcaaacttgtcccgtccgtcgccgagcagatcgtctccgggcttgcccgcgcctgccgatccaacggttgcgtactcatcggcggcgagacggccgagatgcccgatatctaccgcgagggtgagttcgacctcgccggaaccatagtcggcgtcgtcgagaaggggagggttatcgacggggcgggtattgtgccaggtgacgtcgtggtggggctgcggtctgcggggctgcacacaaatgggttcagtttggcgcgaaaaatcgttatcgaggcgggcaaaaagagttactcggatatttttgagggcggcaagaccttcggtcaagccttgcttgagccgcaccgctcttacataacgctgttgccgctcatggataggggggtggtaaagggttgcgcccacataactggcggcgggtttgtcgacaatgtcgacaggatcctcccgcaaaattgcgacgcggctatagacgccaagtcgtgggagccgttgccgatattccgttacctgcaggtcacgggcggcgtggagaacgcggagatgtaccgtacgttcaatatgggaatagggatggcggtggtggtctccgagggcgacgcggacgccgttttgcgtgacggcgctctcgcggaatttgagccggcgctcataggcaggatcgtttccggatcgggcatagtgaggatggagttttga

SEQ ID NO: 70802 - protein, 344 aa, Unknown
  Obtained from environmental sample
  DOMAIN (176)...(343): AIR synthase related protein, C-terminal domain
  misc_feature (1)..(344): Xaa is any amino acid
MSTKLTYSSAGVNIDTWNSVKGRIGDLVSSTYNANVHGKFGQFGGMFDASFLKGMDAPILVSSTDSVGTKVKVAFDSKVYDTVGIDIVNHCVDDILVMGARPLFFLDYIGIGKLVPSVAEQIVSGLARACRSNGCVLIGGETAEMPDIYREGEFDLAGTIVGVVEKGRVIDGAGIVPGDVVVGLRSAGLHTNGFSLARKIVIEAGKKSYSDIFEGGKTFGQALLEPHRSYITLLPLMDRGVVKGCAHITGGGFVDNVDRILPQNCDAAIDAKSWEPLPIFRYLQVTGGVENAEMYRTFNMGIGMAVVVSEGDADAVLRDGALAEFEPALIGRIVSGSGIVRMEF

SEQ ID NO: 70803 - DNA, 1515 bp, Unknown
  Obtained from environmental sample
  misc_feature (1)..(1515): n is a, c, g, or t
ttgacgatgataaaggagctttatctatacaacaccgctaccgccgagaaggagttgtttgtccctaagaacaaccccgtcgccatctactgttgcggtccgacggtctataactacgcgcacataggcaatttgcgcacgtatgtgtttgaggatgttcttaagcgtgtgttgatatggttcggttacggggtgcgccacgtggttaacatcaccgatgtgggccacttgacctccgacgccgacgagggcgaggacaagatggagagcggggcggcgcgcgagggcaagagcgtgtgggacatcccggcgttctacacaaaaaaatttatggacgatatcgatagcctcaacatcatacagccggatttgtggccgaaggcgaccgaccacattccgcaaatgatcgctctggttaagacccttgaggagaagggttttacataccgaaccgaagacgggatatactttgacacctccaagttccctgcgtactgcgatttcgcccgtatcgacccgtcgagcctgcgcgccggagagcgcgtcggcatgggcggcaagcgcaacgtaaccgatttcgcactgtggaagttttccccggcggacgtcaagcgccagatggagtgggagagtccttggggtatcggttttccgggctggcatatagagtgcagcgcaatgtcgatggcgcatctcgcccaaccgctcgacattcactgcggcggcgccgaccatatccgtgtgcaccatacgaacgagatagcgcaaagcgaggcggcgaccgggaaaaagttcgccaatttatggatgcacggggaattcttagtgcttgacaaggggaaaatggcgaagtcgggcgggaatttcgtcacgctcgatacgctcaaagtgcgcggcgtctccccgctgggttataggatgttctgctacacggcgcactaccgtatgccgctgaccttctcgtttgagggcgcggcatcggcggagcaggccttggcgaatctcagaaagtatatatcgtcgatagataaatcgcagggtatcggcatcgttgttgatagtgagcgtgtggaaaaagcgctcaagccctttacggacgcgttatgcgacgacctgaacatgccacgagccgtggcggcgctttgggagggattgcgtgacgagactctcaccggagcggagaagctgtctttcgtcagcgaaatcgacaaggttctcggtctggatttaatgagttcggcagtctgcgacaatactgaaataacggaggagcgtagcggctatagaataacgctcgtaacaagcggcgccctatccccgctccttaaggacgcgatagtggagaaggccgtgcgtaggaaaaactcccgggccgaaaaggatttcaagacagccgatgagatccgagcccgattcgcggaggccggggtggcggttaaggatatgccggacggttcgacgcagtgcgcggtaagtgatattgcggtggcggaacgggtgttaatcggtgtctaa

SEQ ID NO: 70804 - protein, 504 aa, Unknown
  Obtained from environmental sample
  DOMAIN (19)...(330): tRNA synthetases class I (C) catalytic domain
  misc_feature (1)..(504): Xaa is any amino acid
MTMIKELYLYNTATAEKELFVPKNNPVAIYCCGPTVYNYAHIGNLRTYVFEDVLKRVLIWFGYGVRHVVNITDVGHLTSDADEGEDKMESGAAREGKSVWDIPAFYTKKFMDDIDSLNIIQPDLWPKATDHIPQMIALVKTLEEKGFTYRTEDGIYFDTSKFPAYCDFARIDPSSLRAGERVGMGGKRNVTDFALWKFSPADVKRQMEWESPWGIGFPGWHIECSAMSMAHLAQPLDIHCGGADHIRVHHTNEIAQSEAATGKKFANLWMHGEFLVLDKGKMAKSGGNFVTLDTLKVRGVSPLGYRMFCYTAHYRMPLTFSFEGAASAEQALANLRKYISSIDKSQGIGIVVDSERVEKALKPFTDALCDDLNMPRAVAALWEGLRDETLTGAEKLSFVSEIDKVLGLDLMSSAVCDNTEITEERSGYRITLVTSGALSPLLKDAIVEKAVRRKNSRAEKDFKTADEIRARFAEAGVAVKDMPDGSTQCAVSDIAVAERVLIGV

SEQ ID NO: 70805 - DNA, 1323 bp, Unknown
  Obtained from environmental sample
  misc_feature (1)..(1323): n is a, c, g, or t
atggcaatgagcggattacaaattcaaaaactccttcccggtacaaactgcaaggaatgcggctcaagcacatgtatggcgtttgccatgaaacttgcggcgaaaaaagcgatgctctccgaatgtccttacgcttccgacgaggcgaaacaggtgcttggagcggcaagcgaaccgccggtaaaaggcgtaaaaatagggaatgaagttataagcccccttggcgaagaaatcgtaatgtatcggcacgaaaaaacgtttgtaaacaaaccggttatagcggttaatcttgatgaaggcgcagaccttgcgttagctgaaaaaattaaaaattacaagcctgttagagtaggcgagcaattttttatcggcgcgattgccgttacccagcagggcggctcttttggcgattactgcgcaaaagtttacgagaaaacaaaattgccgcttctgctttgcgcgaaagatatcgcctcgcttgataaagcttccgcggcggtggcaggttccaaaagcgttctttgcggcataactgcggatacggcggaagaagcggttaaaatcgcaaaaagggataatcaagtaattgcggttacagcggcggacatagacggcatttttgaactgacaacaaaaataaaagagagcggttttaacgatttaattatcgagtttcaaacccattctctcgctgaaagttttcagacaaattcaatcgccagaaaagccgcgcttaaaaagaacattaaggctttaggttacgcggcattaaaatttatcaacaccggaaacccggcggacgatattgtagccgccgttacggagattgataaattcggcggaataatagtgatgccgagttttgatcccgcgcagcttatgccgttgtttacattacgccaaaacatttacacagacccgcagaaaccgattcaggtagagccgaaactttacgcgataggcgagcctgataaaaaatcgccgatttttgtaacgacaaatttctcattaacctactttttggtttcaggagaaattgagaacagcggtatttccgcgtggcttgttatccctgagtgcgagggctttagcgtactgactgcgtgggcggctggaaaattttcaggctcttcaatcgccaagtttattaaggaaatagatatcgagaaacagacagaaacaaaacaaatagttattcccggttatgttgcgcaaatatctggcgagcttgaagaaaatatgccgggctataaagttcttgtaggtccgggcgaagccggggatttggaaggctttattaaaaatgtcctgataaaaaaataa

SEQ ID NO: 70806 - protein, 440 aa, Unknown
  Obtained from environmental sample
  DOMAIN (11)...(45): Putative Fe-S cluster
  misc_feature (1)..(440): Xaa is any amino acid
MAMSGLQIQKLLPGTNCKECGSSTCMAFAMKLAAKKAMLSECPYASDEAKQVLGAASEPPVKGVKIGNEVISPLGEEIVMYRHEKTFVNKPVIAVNLDEGADLALAEKIKNYKPVRVGEQFFIGAIAVTQQGGSFGDYCAKVYEKTKLPLLLCAKDIASLDKASAAVAGSKSVLCGITADTAEEAVKIAKRDNQVIAVTAADIDGIFELTTKIKESGFNDLIIEFQTHSLAESFQTNSIARKAALKKNIKALGYAALKFINTGNPADDIVAAVTEIDKFGGIIVMPSFDPAQLMPLFTLRQNIYTDPQKPIQVEPKLYAIGEPDKKSPIFVTTNFSLTYFLVSGEIENSGISAWLVIPECEGFSVLTAWAAGKFSGSSIAKFIKEIDIEKQTETKQIVIPGYVAQISGELEENMPGYKVLVGPGEAGDLEGFIKNVLIKK

SEQ ID NO: 70807 - DNA, 585 bp, Unknown
  Obtained from environmental sample
  misc_feature (1)..(585): n is a, c, g, or t
gtgccgctgattatcacaggaaccagccactacgataaaaacaacgaggtaatgaaggcaatcgctcaaaactgcgaaggtgagaatcttatctttaactgggtagagcaggataattacagaactatcgcgggggcggcaatggcttatggtcacactcttgtagcgcaagccccaatcgacgttaatatcagcaaacagttaaatattttgttaaccaacatgggcttggctgccgacaaaataatcatcgacccaatgacaagtacaatcggttacggtattgaatatacttattccgtaatggagcgtattcgcctaacgggtcttggcggagacaatatgctcttaagtcccatgattgtctctatcgggcaggagtgcgccaagattaaagaatttaaagcgcctgaatcaagcttccccgactggggcgatctggcaaagcgcgcggcttattgggaaatcgccgcggcgacgacgctgttatacgcgggagccgacatattgattctttatacgccggaagcggtaacaacaataaagaagaccatcaacagtttgatggatagggagggtaaataa

SEQ ID NO: 70808 - protein, 194 aa, Unknown
  Obtained from environmental sample
  DOMAIN (1)...(192): CO dehydrogenase/acetyl-CoA synthase delta subunit
  misc_feature (1)..(194): Xaa is any amino acid
MPLIITGTSHYDKNNEVMKAIAQNCEGENLIFNWVEQDNYRTIAGAAMAYGHTLVAQAPIDVNISKQLNILLTNMGLAADKIIIDPMTSTIGYGIEYTYSVMERIRLTGLGGDNMLLSPMIVSIGQECAKIKEFKAPESSFPDWGDLAKRAAYWEIAAATTLLYAGADILILYTPEAVTTIKKTINSLMDREGK

SEQ ID NO: 70809 - DNA, 1281 bp, Unknown
  Obtained from environmental sample
  misc_feature (1)..(1281): n is a, c, g, or t
atgaccaacgccgattgcctcaatgtactcttgttcaccgtgttttccgcctttatcgtgtgggcggtcatacaccttatgttgaagacccgtctgcccgttctgttcgccgatacgcccgatcaccgcaaagcgcactcctcgcccatcccccgggttggcgggatagcgatagtggccgccacgcttgccgcgacctttgcctggcacgtgttctcgtcgcggaccggcgccgcccccattccgcgcgggatgctcgtctccattgcggtcgcggctatatgtataggagtgctagggtttctcgacgacacgcggttcgtcaatatccgggtacggcacaagcttttcgtgacctcggcgctcgccgtgctcacggtcttcgccttcggcgcccgcccgggcgcaatctctatgttcggcctattcatcatccccgaatacgtaagcgacttgatagccgtgctatggataatagggctgataaacggctacaacctgatagacggcttggacggcttcgccggaacagtctccgcgctttcgctcttaggcgccgcggcggttctgtacattgtgggtgacttccagacggcggcgctgagcttttttgtcgccggcgccgccgtagggttcatggcgcacaacgccccgccggccaaggtcttcatgggcgacaccggttcgtgctttcttggctacatgatcgccctgctgaccatccgcgccgccttcgacctgaacggcagcggcaaggtcatggtactgacgccgcttctggccggcgtcccgattatcgaggtgctgacgaccatcctgcggcgctacgtccgagccggccatcgcggtgcggcgcaaacgctcaagttcatagtaacggcggacagctcacatttgcaccaccgcttcctctaccgaggcttctcgcatcgggacgcctgcgtcttgaccggcgtgctcactacgacgatggtttgcggcgccgtctgcatcgctcttgccccccacccccacctactctggatagcggcgtacatgaccctgccgataaccgtctgcctatacaaactcggccttggcgagtcgttccggatgctgatgaacctccccccgaaggtaatgaagttctcgccggaagaggcgtctatacggataaagcaagccggaaagacgcaacggaagtcggagcgcgggcaattttactccgacttgttgatactgatagcgctgggactgccggtgttcgtgtttttggggtacctgatagttacggtgggttag

SEQ ID NO: 70810 - protein, 426 aa, Unknown
  Obtained from environmental sample
  DOMAIN (86)...(249): Glycosyl transferase family 4
  misc_feature (1)..(426): Xaa is any amino acid
MTNADCLNVLLFTVFSAFIVWAVIHLMLKTRLPVLFADTPDHRKAHSSPIPRVGGIAIVAATLAATFAWHVFSSRTGAAPIPRGMLVSIAVAAICIGVLGFLDDTRFVNIRVRHKLFVTSALAVLTVFAFGARPGAISMFGLFIIPEYVSDLIAVLWIIGLINGYNLIDGLDGFAGTVSALSLLGAAAVLYIVGDFQTAALSFFVAGAAVGFMAHNAPPAKVFMGDTGSCFLGYMIALLTIRAAFDLNGSGKVMVLTPLLAGVPIIEVLTTILRRYVRAGHRGAAQTLKFIVTADSSHLHHRFLYRGFSHRDACVLTGVLTTTMVCGAVCIALAPHPHLLWIAAYMTLPITVCLYKLGLGESFRMLMNLPPKVMKFSPEEASIRIKQAGKTQRKSERGQFYSDLLILIALGLPVFVFLGYLIVTVG

SEQ ID NO: 70811 - DNA, 732 bp, Unknown
  Obtained from environmental sample
  misc_feature (1)..(732): n is a, c, g, or t
atgttcgacgcacctaaggttaaaaatgacattgtcgattggatacgcgctttcttcaacgactacgggccgggctgcaacgccgttgtgggtatcagcggcggcaaggacagttccgtcacggcggctctttgtacggaggctctgggggctgatagggtcgtcggcgttttgatgcctcggggggagcagtatgatattgacttctctcgcgaagtcgtcaatcatctaaagattaaaaactacgtcgtaaacataaaagacgccgtggacgcgctcttcgcctccgtcgacgccggcgggttgacgcccagccggcaggcgcttgtcaatactccggctcgtatcaggatgtccgttctctacgccgtcgcggctacggtgaacgggcgggtggccaatacctgcaacctcagcgaggactgggtgggctactccacgaagttcggcgacagcgccggcgacttttcaccgctcgcccaaatcacggtggcggaagtcagggaactggggcgtgtgctgtcgctaccgtcaaagatcgtcgacaaagtgccggaggacgggctttccgggaagtctgacgaggaaaatttagggtttacctacgctgtgctggatagatacatccgcgaaggagtctgcgaagacgcggcggtcagggagcggatcgacaagctccgcgaggctaatctgcacaagctacgttttatgccgtgttttgagttgcgttga

SEQ ID NO: 70812 - protein, 243 aa, Unknown
  Obtained from environmental sample
  DOMAIN (7)...(238): NAD synthase
  misc_feature (1)..(243): Xaa is any amino acid
MFDAPKVKNDIVDWIRAFFNDYGPGCNAVVGISGGKDSSVTAALCTEALGADRVVGVLMPRGEQYDIDFSREVVNHLKIKNYVVNIKDAVDALFASVDAGGLTPSRQALVNTPARIRMSVLYAVAATVNGRVANTCNLSEDWVGYSTKFGDSAGDFSPLAQITVAEVRELGRVLSLPSKIVDKVPEDGLSGKSDEENLGFTYAVLDRYIREGVCEDAAVRERIDKLREANLHKLRFMPCFELR

SEQ ID NO: 70813 - DNA, 528 bp, Unknown
  Obtained from environmental sample
  misc_feature (1)..(528): n is a, c, g, or t
atgaaaacattcggcggccccgtcctctttttagaccgttccgacataaacacggacgaaatcattccggccaaatacctgaccgagtcaaaaaaagaagccctcaagccctatctcttagaggacttaaagttagacggcttcaaccccacaggctcatggcgcggcaacgtcaaagtcgtcgtgacacgcgccaacttcggctgcggctcatcccgcgaacacgctccgtgggcgcttgaggtgaacgacatcacctgcgtgatcgccgagagctacgctcgaatcttccgccagaacatgttcaacggcgggatgctggcgatagagttatccgccgggcagattgacgagattttcgccataagcggtaagggcgccgtgaactgcgacattgacgcggcgggaaagaagctgacgtttacgagcgcgggcgggactaagagcgttgatttcagtctgtcgcaatttgataacgcgcttgtcgaggcggggggatgggtggagtttgcggataagaggtactaa

SEQ ID NO: 70814 - protein, 175 aa, Unknown
  Obtained from environmental sample
  DOMAIN (1)...(114): Aconitase C-terminal domain
  misc_feature (1)..(175): Xaa is any amino acid
MKTFGGPVLFLDRSDINTDEIIPAKYLTESKKEALKPYLLEDLKLDGFNPTGSWRGNVKVVVTRANFGCGSSREHAPWALEVNDITCVIAESYARIFRQNMFNGGMLAIELSAGQIDEIFAISGKGAVNCDIDAAGKKLTFTSAGGTKSVDFSLSQFDNALVEAGGWVEFADKRY

SEQ ID NO: 70815 - DNA, 1284 bp, Unknown
  Obtained from environmental sample
  misc_feature (1)..(1284): n is a, c, g, or t
atgggaaagacgataacggaaaagattttcgacaagcacaaaatcgacgaaccgttccccggcaccgccgtcttatcgctagacgtggtgatgtgccatgagataaccacgcccatcgcaatctccgacctagagtggcgcggcaaggatcgcgtgtttgacgcctccaagataaaggcggtgattgaccacgtgactccatccaaggactccaagagcgccgctcaagccaagatactgcgcgattgggcacggcggcacggcataaaggacttcttcgacgtggggcataacggcgtctgccacgcaattttccccgaaaagggcttcatccgacccggctatacggtgattatgggcgacagccatacctgtacccacggggcgttcggggcgttcgcggccggcgtggggactaccgacctcgaggtggggatactcaaaggcgtctgcgccttccgtccgccggagagcattcgggttgacattaccggtaagctgccaaaaggcgtctacgccaaggacgtcattttagaagtgatccgccgcctcaccgtgaacggggcgaccgaccgcgtgatagagttccgaggcgaggtcgtggacgccatgtcaatggaggagcggatgacgctctgcaacatggcgatagaggccggcgggacaagcgggctgtgcatgcccgacaagacgacggtcgactacctgtggccgttcatctcgtccgactataaaaacgacaaagacgccgccgtcaaagagttcgccaagtggcactccgacgccgacgcctcatacgccaagacgatgactgtagacatctccaacctcgccccggtagtcacagtcggttacaaaccggatcaggttgagttcgttaaagatttaaacgacattaagatcgaccaagtatacataggctcttgcacaaacggccgcatatccgatttaaggatcgccgctaacataacaaaaggcaaaaaattagccgccggagtacgcggcatagttagcccggcgactccggcgatataccgtcaagccatggaagagggcctattgtcaatctttatggatgcaggctactgcatagccaacccgacctgcggagcgtgtttgggtatgtcgacaggagtgctggctgaaggagaggtatgcgtatcaacgaccaacagaaatttcaacggccgtatgggcaagggaggcatggtgcacttagcttctccggctaccgccgccgcgagtggaatagcgggaagattggttgatccgagggaatattaa

SEQ ID NO: 70816 - protein, 427 aa, Unknown
  Obtained from environmental sample
  DOMAIN (4)...(419): Aconitase family (aconitate hydratase)
  misc_feature (1)..(427): Xaa is any amino acid
MGKTITEKIFDKHKIDEPFPGTAVLSLDVVMCHEITTPIAISDLEWRGKDRVFDASKIKAVIDHVTPSKDSKSAAQAKILRDWARRHGIKDFFDVGHNGVCHAIFPEKGFIRPGYTVIMGDSHTCTHGAFGAFAAGVGTTDLEVGILKGVCAFRPPESIRVDITGKLPKGVYAKDVILEVIRRLTVNGATDRVIEFRGEVVDAMSMEERMTLCNMAIEAGGTSGLCMPDKTTVDYLWPFISSDYKNDKDAAVKEFAKWHSDADASYAKTMTVDISNLAPVVTVGYKPDQVEFVKDLNDIKIDQVYIGSCTNGRISDLRIAANITKGKKLAAGVRGIVSPATPAIYRQAMEEGLLSIFMDAGYCIANPTCGACLGMSTGVLAEGEVCVSTTNRNFNGRMGKGGMVHLASPATAAASGIAGRLVDPREY

SEQ ID NO: 70817 - DNA, 684 bp, Unknown
  Obtained from environmental sample
  misc_feature (1)..(684): n is a, c, g, or t
ttgatggccgagatctcggcgaactcaatatcatcactagtacgatngggtttgaatcagtccgtcattaataacctgaaatcaatccccaagctgacaagcgttaaggtctcgttggaatcgcacgaaccgctgattaacgacggcatccgcaatcggggccacttcgatatggctacgcgcaatatcaaagcattggtcaattccgggctaccgacggtcgttatggcgacattgagccgacgcaactatgaatctgtcgacggattatgcaggctgtgcgccgatatgggcgcggcggggattatccttgaacgctacgtaccgctgggacgcggggcggatttggcggatagcgtactgacgtcgcgggaatggcgcgacacggccgccgccgttatccgcttagccgccgttgacgcgccgattgacgacctgcttccgtacagagccttccgtatagatattccccacggaactctgggtgacgactgcgaggtgagcggcgccttctgcaacctaggcgcctcgtctatggcgctgatgccggacggaacagtatacccctgccgccgcgtgccgatagccgcaggcaaactgccggacgacgggatggagcggatattggcccggctggacggatattcatcaaccccgcagaaatgttttgattttgacttttga

SEQ ID NO: 70818 - protein, 227 aa, Unknown
  Obtained from environmental sample
  misc_feature (1)..(227): Xaa is any amino acid
MMAEISANSISSLVRXGLNQSVINNLKSIPKLTSVKVSLESHEPLINDGIRNRGHFDMATRNIKALVNSGLPTVVMATLSRRNYESVDGLCRLCADMGAAGIILERYVPLGRGADLADSVLTSREWRDTAAAVIRLAAVDAPIDDLLPYRAFRIDIPHGTLGDDCEVSGAFCNLGASSMALMPDGTVYPCRRVPIAAGKLPDDGMERILARLDGYSSTPQKCFDFDF

SEQ ID NO: 70819 - DNA, 516 bp, Unknown
  Obtained from environmental sample
  misc_feature (1)..(516): n is a, c, g, or t
atgacagggaatgtaagctacctgtcgccgtgctttatgcgtatcgacttttccagacctgcggaacaggttattgtgtttaacggcgatgtgctgattatctatctgccggaatacagagcggttttaaatcaggatattaaaagaaaaccgggagcttcgggagccggagtggcaacatctcaagggctttcgcttttaaaacgcaattatgtatcgtcatttgttacaggtcctaaccccgaaccgttggacggcacgtcgggagaaagagttataaaactgcgccttacaagacgcacaacttctgaaggttttagagaaatcattttaagcattaatcccaatacgaaattaatccgccgcgtcgaaggacgaacaatcggcgaaggcgaactgcgtttagattttgtaaatatcagaacaaacgtaggtattcccgaagcgcgttttgcttacgacactccgccttcggcaaatatgtacaacaatttcttgtttagagatacaaattag

SEQ ID NO: 70820 - protein, 171 aa, Unknown
  Obtained from environmental sample
  misc_feature (1)..(171): Xaa is any amino acid
MTGNVSYLSPCFMRIDFSRPAEQVIVFNGDVLIIYLPEYRAVLNQDIKRKPGASGAGVATSQGLSLLKRNYVSSFVTGPNPEPLDGTSGERVIKLRLTRRTTSEGFREIILSINPNTKLIRRVEGRTIGEGELRLDFVNIRTNVGIPEARFAYDTPPSANMYNNFLFRDTN

SEQ ID NO: 70821 - DNA, 366 bp, Unknown
  Obtained from environmental sample
  misc_feature (1)..(366): n is a, c, g, or t
atggaatctctgggggaaaaattaaaaaccgctcgtaacgaaaagggtctcagcatcgatcaaatcagccgtgatacaaatatttccattcgttaccttgaagccctggagtcggaaaatttttccatcttccccggcgagccttatctaatcggttttataaaaaattacggcgcgtacctcgacctcgacattcaaaaattaatttcgctctacagggcgttaaaaattcaggaacagcctattcccgtagaacagcttttaaaaagtccgccgcaagcgcccgaggtttttacttcccaccataataattttagcggttgtaggtttaagcggctggctcgtctattcattaattatcaataa

SEQ ID NO: 70822 - protein, 121 aa, Unknown
  Obtained from environmental sample
  misc_feature (1)..(121): Xaa is any amino acid
MESLGEKLKTARNEKGLSIDQISRDTNISIRYLEALESENFSIFPGEPYLIGFIKNYGAYLDLDIQKLISLYRALKIQEQPIPVEQLLKSPPQAPEVFTSHHNNFSGCRFKRLARLFINYQ

SEQ ID NO: 70823 - DNA, 600 bp, Unknown
  Obtained from environmental sample
  misc_feature (1)..(600): n is a, c, g, or t
ttggaattgtacaacatgggcgaagccgtaacaattcgcactccggcgggtatggaaatactggatttaagccaggaagttaacatagaccttaacaacgacggtattcctgaattgcgcataacggtcgcggatttcgcaaagaacaacgccgacatgggagcgttactccatttttacctgatggacgccgccgtttacacaggcgcggaaatagaacaaaacattacccacactgtgaataccgtaaatgccgcaagcaccacaatttttcccgcttccgcaaccgcgtatcctttcacattgcaggcaggctttcaggggtattgcatgttccgctgggaaattcttaatgagagagatcgcaaaggctctactcagcgttatttccaaagatcagaggttcttgatattcaggctcaaaacggcattcgcatttgggtatctaacgctcagaccgcaaaacttcaggtaatcggcggagggcgtacagtccccttggaaatcggctccgcgggcgaggttgtcgtggcggatatccgctgggttagagacgaagaaaaccgataccgccttgtgctgataaagctggaaacctaa

SEQ ID NO: 70824 - protein, 199 aa, Unknown
  Obtained from environmental sample
  misc_feature (1)..(199): Xaa is any amino acid
MELYNMGEAVTIRTPAGMEILDLSQEVNIDLNNDGIPELRITVADFAKNNADMGALLHFYLMDAAVYTGAEIEQNITHTVNTVNAASTTIFPASATAYPFTLQAGFQGYCMFRWEILNERDRKGSTQRYFQRSEVLDIQAQNGIRIWVSNAQTAKLQVIGGGRTVPLEIGSAGEVVVADIRWVRDEENRYRLVLIKLET

SEQ ID NO: 70825 - DNA, 1341 bp, Unknown
  Obtained from environmental sample
  misc_feature (1)..(1341): n is a, c, g, or t
atgcgctattttcttgatcctttcggctgtgtaaaaaatcaagttgacgcggaaaatatgatgtctcaccttaacaaagcggggtgggaaaatgttcccgaagcggaagacgcggaactgattatcgtcaattcctgcggatttattgaaagcgcaaaacaagagtcgattaacgctgttcttgagtggcgaaaactttatccgagtaaaaaaatactccttgcgggttgtcttgctcaacgttacacgaaagaacttgccgaaagcatgccggaagccgacggatttttcggagtagacaatcttgcgcaaattacccaaacaggggcaaatcttgtaaacggcgtaaaaacgcctgatatatcacataacgcggctctgcatgaaggagagcgtccacttttatcgctgccgggttcagcttatgtaaaaatcagcgaagggtgcagcaaccgctgttctttttgcgcgattccgctcattcgcggaaatcttgtaagccgcacaattcccgatattttggaagaatgcaacgcgttgctgaatcgcggcattagggaactttgtatcattgggcaggacataggttctttcggagcggatgccgaaaacgccgcaaaattgcccgaacttcttgaagcgatttcttcgctgaaagggcatttttgggtgcgcctgttgtacattcaccccgatcatttccctattaaaatcctcgaccttatggaaaaagattctcgctttcttccctactttgacattccatttcagcacgcatcttctaaaatattgagcgccatgaaccgtcacggcgatgcggaaaaatatcttgcgttactcaaaacaattcgcgcaagactgccgaatgctgttatacgctctacttttctgctgggctttcccaatgaaacagatgaagattttgcgcagttactggacttccagcaaaaagccgatttagactggcttggctgttttgtgtattcaagagaggaaggaacagcggcatactcaatgaggggacgcgtttccgccaaaaccgcaaaagaacgaaaacaaataattgaagagcgtcaaattcctattacagaaaaaaatatggatcgctttgtcaataaaaacttggacgtgttaattgaagaagaaattgccgcaagtgaaaccgacacaaaaggaaatgaaactctttggctgggacggctatactgccaagccccggacattgacggcgcggcggttatagtaaaaagcgaggcgagcgaaaaaaatccgcaagtgggaaattttgcgaaatgcaaagttatcgcacggcacgggtttgatttggaagtttcttgctga

SEQ ID NO: 70826 - protein, 446 aa, Unknown
  Obtained from environmental sample
  DOMAIN (143)...(315): Radical SAM superfamily
  misc_feature (1)..(446): Xaa is any amino acid
MRYFLDPFGCVKNQVDAENMMSHLNKAGWENVPEAEDAELIIVNSCGFIESAKQESINAVLEWRKLYPSKKILLAGCLAQRYTKELAESMPEADGFFGVDNLAQITQTGANLVNGVKTPDISHNAALHEGERPLLSLPGSAYVKISEGCSNRCSFCAIPLIRGNLVSRTIPDILEECNALLNRGIRELCIIGQDIGSFGADAENAAKLPELLEAISSLKGHFWVRLLYIHPDHFPIKILDLMEKDSRFLPYFDIPFQHASSKILSAMNRHGDAEKYLALLKTIRARLPNAVIRSTFLLGFPNETDEDFAQLLDFQQKADLDWLGCFVYSREEGTAAYSMRGRVSAKTAKERKQIIEERQIPITEKNMDRFVNKNLDVLIEEEIAASETDTKGNETLWLGRLYCQAPDIDGAAVIVKSEASEKNPQVGNFAKCKVIARHGFDLEVSC

SEQ ID NO: 70827 - DNA, 375 bp, Unknown
  Obtained from environmental sample
  misc_feature (1)..(375): n is a, c, g, or t
atgaatgttgttgattcatcctgttggtttgaataccttatgggtacagaaacgggtgcggcggtagcttctgtcatcgaaaatcccgatgaattgattgtacctactattaccctttacgaagtctacaaaaaattattagcagagaaaggcgaagaatatgcattaaatgttgtttcatatatgcaaacaggtacagtaattgatcttaacgcagggttaagcctttccgccgctcaaataagccggaaacataaactgcctatggcggacagtattatttacgcaacatcattacactattcagcggtaatattttcatgcgataaacacttcaaagacattcctgatattcgatattttccaaaaacttga

SEQ ID NO: 70828 - protein, 124 aa, Unknown
  Obtained from environmental sample
  DOMAIN (2)...(120): PIN domain
  misc_feature (1)..(124): Xaa is any amino acid
MNVVDSSCWFEYLMGTETGAAVASVIENPDELIVPTITLYEVYKKLLAEKGEEYALNVVSYMQTGTVIDLNAGLSLSAAQISRKHKLPMADSIIYATSLHYSAVIFSCDKHFKDIPDIRYFPKT

SEQ ID NO: 70829 - DNA, 567 bp, Unknown
  Obtained from environmental sample
  misc_feature (1)..(567): n is a, c, g, or t
atgaaaattgtttctttatgggaatatataaaaatcttagaagaattgcccaggaaaaaaggggcatcgctctattatcgggggcatagtaacgtcgattatgttttagaaccttcgttgtttagaaaaaataatattactaagaatgaacatttaatgtttaaagaaattctaaaagataatcccgaacaattttctgaggacaaatcaacgttagaaaaattagtaaaaatgcagcattttggattaccaacacgtttattagacattacacaaaatccattaatagctctttattttgcatgtgtgtctcatgaaaataaaactgcctctcaaaatgatggtgaaattgttatattgtccattgatggtcgattaatgaaatacaatgacagcgatactgtattgatccttagtaatttatgtaaattaaaaccttcagaaaaaatttttgatacaaatctttcacgagaagaatttaatgatacagataatgttaaaaaacttctttgggaaatcaagcggaaaaacaaatattttatgatattattctcgtgccgaatgtga

SEQ ID NO: 70830 - protein, 188 aa, Unknown
  Obtained from environmental sample
  misc_feature (1)..(188): Xaa is any amino acid
MKIVSLWEYIKILEELPRKKGASLYYRGHSNVDYVLEPSLFRKNNITKNEHLMFKEILKDNPEQFSEDKSTLEKLVKMQHFGLPTRLLDITQNPLIALYFACVSHENKTASQNDGEIVILSIDGRLMKYNDSDTVLILSNLCKLKPSEKIFDTNLSREEFNDTDNVKKLLWEIKRKNKYFMILFSCRM

SEQ ID NO: 70831 - DNA, 579 bp, Unknown
  Obtained from environmental sample
  misc_feature (1)..(579): n is a, c, g, or t
ttgaacagcaaagagcttcttgccaggtattgttctcgtcttatagcaatagaacgccgttctttgcttacaaaggaaagttatcgtctggaaattaaaaattttcttgagtatcttgattcaaaaaagatgcctcttaaaagtacagacgccgcttttctaactaagtaccttgctaaacgaaagaaagagaataatattagttcgcgttcagttgcaaaaataatttccgctttaaggtctttttacagatttgccatagacgaaaaattaataaaagacaatccggcggatattcttgagattccaaaacggaaaatcaatattccagaagtaatggacaaaaaaaccgtagaaagtcttttaggacagatagacgtgtcaaaaccgcaaggatgcagggacaaatgtctttttgagttaatttattctgcgggacttcgcgtttccgaggcggtaaatttaaatatcaaagatattgatatcgaaggagggtcagcgaaagtaaagggtaaaggaaataaagaacgcatcgtgctttttggaaaaaagccggcggtctgtaaaggaataccttag

SEQ ID NO: 70832 - protein, 192 aa, Unknown
  Obtained from environmental sample
  DOMAIN (7)...(90): Phage integrase, N-terminal SAM-like domain
  misc_feature (1)..(192): Xaa is any amino acid
MNSKELLARYCSRLIAIERRSLLTKESYRLEIKNFLEYLDSKKMPLKSTDAAFLTKYLAKRKKENNISSRSVAKIISALRSFYRFAIDEKLIKDNPADILEIPKRKINIPEVMDKKTVESLLGQIDVSKPQGCRDKCLFELIYSAGLRVSEAVNLNIKDIDIEGGSAKVKGKGNKERIVLFGKKPAVCKGIP

SEQ ID NO: 70833 - DNA, 1287 bp, Unknown
  Obtained from environmental sample
  misc_feature (1)..(1287): n is a, c, g, or t
atgaacatttttgcagtatgtgaaaaaccgcaggtactacagtttaaaccacaggaggtatcggcgtctttgaaagttgtttcggttaatgataacgaggagatgataaaggctcgcagcgacaagccggcagtaattaaggttatctcggcaggcggcggaggcggaaacgcgttaaaccgcatggttgatgcaaatataacaggcgttgaatttattgcgataaatactgacattcaggatttgcttaaaaagagcaaggcggatgtaaaattgcaaatcggcaaagaggttacaggcggtcgcggagccggaggaaacccggagaagggagaaaaagcggcgcttgaggatcaggcggcgattgccgaggcgataagaggcgcggatatggtctttataaccgctggaatgggcggcggaaccggaacaggctctgttccgataatcgccagaattgccaggcaattaggcgctcttacggtagcggtagttacaatgccttttgaatttgaaggtcgttatacgatgaaacttgcggaagaaggtatcgaaaaactgcgcggagaagttgacacattaatagttattcccaatcagcatttgtttaaaattattgacagcaaaacaacgtatgacaaagcttacatgatagcggacgaagtgctgtgcaaaggagtacagggcataacctacataattaccaaaccaggtttccaaaatactgattttgccgatgttgaaaccataatgaaaggaaaaggcgacgcgttaatgggtattggcttcggaacaggggaaaatcgcgcaatggacgcggttaaaaacgccattgataatccgctgctcgaagacaccagcatagacggagctaccggagtcctgatcaatattgtgggacctgaggatataacgttagttgaaatacaggaaattattaactctattaaggaaaaatgcgatcaggaagttcaccttatttacggtattgttagagatgataaatttgaaaacagcgttcaaataacggtaatcgcgacaggtttcccaagcgaaaaagaaacgaatacagaacaatctgcttccgttgatgcgacaatagattccgattttatcgattacaacgaatatgtgaaaatggtcgaaagaacaaagaaaccggaatatatctcttatgtgccggagcgcgaatatcacgatgaaatcgacgttcccgccgttatcagaagacatagttttcagaaggaggaaatcgcttctttggaaacaatggagagaaggatttga

SEQ ID NO: 70834 - protein, 428 aa, Unknown
  Obtained from environmental sample
  DOMAIN (241)...(369): Tubulin/FtsZ family, C-terminal domain
  misc_feature (1)..(428): Xaa is any amino acid
MNIFAVCEKPQVLQFKPQEVSASLKVVSVNDNEEMIKARSDKPAVIKVISAGGGGGNALNRMVDANITGVEFIAINTDIQDLLKKSKADVKLQIGKEVTGGRGAGGNPEKGEKAALEDQAAIAEAIRGADMVFITAGMGGGTGTGSVPIIARIARQLGALTVAVVTMPFEFEGRYTMKLAEEGIEKLRGEVDTLIVIPNQHLFKIIDSKTTYDKAYMIADEVLCKGVQGITYIITKPGFQNTDFADVETIMKGKGDALMGIGFGTGENRAMDAVKNAIDNPLLEDTSIDGATGVLINIVGPEDITLVEIQEIINSIKEKCDQEVHLIYGIVRDDKFENSVQITVIATGFPSEKETNTEQSASVDATIDSDFIDYNEYVKMVERTKKPEYISYVPEREYHDEIDVPAVIRRHSFQKEEIASLETMERRI

SEQ ID NO: 70835 - DNA, 1272 bp, Unknown
  Obtained from environmental sample
  misc_feature (1)..(1272): n is a, c, g, or t
atgagtaatgaaatagtagtgtccttggacattggatcaacatatgtacgcgctattgtctgcgaacgcgacgcgggcggcgttttaaaaataatcggaacaggcttgcgtccgtcgacaggtttaagaaaaggagtagtggtaaatatcgaggcgacccttcactcaatagaagaggcgattgaagaagcggaaatgatgagcggacttgaagtaaccgattgctggacaggcataggcgggaatcatgtgaacgggattaactcgcgcggcgttgtgggagtaataggaaaaaaacgcgacgctagagaaagagaaatagggcaggaagatattgatcgcgtaattgaagccgcaaaagcggttgtaatacccacggacagacagatactggaagtaattccgcagaattataaagttgacgatcaaaaaggcattagaaacccgatggatatgatcggagtgcgtcttgaatcggaagttcatcttattactgtttcagtaacaggcgcgcagaatttaattaaatgcgtcaaccgcgccggtttccgcgtgaatgaattaattttacagactcttgccgccggacgcgccgttcttactcaggaagaaatggatcttggcgttgtgttaatggatattggcggcggaacaacggacatgcttgtatatttggaaggcactccgtactcgacatacactatacccgccggaggcacgcaagttacgagcgatatatccattataaaaaatatatcgatagataacgcagaaaaaataaaaattgattcgggttgttgctgggaaaaaatgttggataacgacgagaaagtgatcgtgcccggtattggcgggagaccgccgatgtcgattccgcgttcacagttacttgtaattattaaacccagaatggaggaaatatttaagcttgcaaaacagcatattgattcattaaatcttccgcgtccgcttgggggaggcgttgtattaacaggcggcggagctcaattagctggtgttgtagagcttgcaaacaatattttaagattacctgcgcgtatcggaaccccgataccgacgcaggaattggaaggactggtagaagaataccgtactcccgcttacgctacggcaatagggctcgcgctcgaaggctcgcgcaggctgggtatggattcgggcgaacgaggctccgatatgcggcttggagagaagaagaacggagcctttatacataaattgatttcttggttaaaagaggagtttgcatga

SEQ ID NO: 70836 - protein, 423 aa, Unknown
  Obtained from environmental sample
  DOMAIN (209)...(381): Cell division protein FtsA
  misc_feature (1)..(423): Xaa is any amino acid
MSNEIVVSLDIGSTYVRAIVCERDAGGVLKIIGTGLRPSTGLRKGVVVNIEATLHSIEEAIEEAEMMSGLEVTDCWTGIGGNHVNGINSRGVVGVIGKKRDAREREIGQEDIDRVIEAAKAVVIPTDRQILEVIPQNYKVDDQKGIRNPMDMIGVRLESEVHLITVSVTGAQNLIKCVNRAGFRVNELILQTLAAGRAVLTQEEMDLGVVLMDIGGGTTDMLVYLEGTPYSTYTIPAGGTQVTSDISIIKNISIDNAEKIKIDSGCCWEKMLDNDEKVIVPGIGGRPPMSIPRSQLLVIIKPRMEEIFKLAKQHIDSLNLPRPLGGGVVLTGGGAQLAGVVELANNILRLPARIGTPIPTQELEGLVEEYRTPAYATAIGLALEGSRRLGMDSGERGSDMRLGEKKNGAFIHKLISWLKEEFA

SEQ ID NO: 70837 - DNA, 891 bp, Unknown
  Obtained from environmental sample
  misc_feature (1)..(891): n is a, c, g, or t
atgtggcaaggaacgacgctattacaagcggagtcaggaatccaatttacgacgtatcggagggacaatatgatatctgaatattattatgaatctaaatcctccgagagtatgctgttaaaaaagaaatccgcggaaaaaattgaaaaaggacttaaaagaattttaattatagccggtattatttttgccgccgaattagtttggcttcttggaataagtccgtttattccgttctccacagttgaagttcaagggttctccgatttttctcgctctcaaattctttaccttggcggtattgacgacaactcttcatatttttcaactaacgttaaccttgtaaaagaaagactttcatcaaatattcttgtggaatcggcggttgtcatgaaacgtttcccggataaattgtcaatctatttaaatccgcgcaaacccgccgccgttacactggtaaatacaacttcgggtcaagcaatgatgtacatcgacaggcaaggagttatttataagtttgaagaaacagcctcaatggaaaaaacggatattcccgttatttcgggaatagagaatcctcagcttaatatgcagctgcctacggctcttgttccgttaatgaataaccttagcgaaatttcggtgtcgtcgcctgaattgttatccgccatttccgaaataagactggaaaggaaagcgtgggatggttatgaccttgtgctctttccggttcacagttccataaaggtgagggtagagaacaatttatcagaagaagggcttagatatatgctgcttatgctgaacgtatttgaaagggacaataatcgtcctcaggaaattgattttagatccggtatgggttcatataaaattaaggagttgtcctga

SEQ ID NO: 70838 - protein, 296 aa, Unknown
  Obtained from environmental sample
  DOMAIN (77)...(145): POTRA domain, FtsQ-type
  misc_feature (1)..(296): Xaa is any amino acid
MWQGTTLLQAESGIQFTTYRRDNMISEYYYESKSSESMLLKKKSAEKIEKGLKRILIIAGIIFAAELVWLLGISPFIPFSTVEVQGFSDFSRSQILYLGGIDDNSSYFSTNVNLVKERLSSNILVESAVVMKRFPDKLSIYLNPRKPAAVTLVNTTSGQAMMYIDRQGVIYKFEETASMEKTDIPVISGIENPQLNMQLPTALVPLMNNLSEISVSSPELLSAISEIRLERKAWDGYDLVLFPVHSSIKVRVENNLSEEGLRYMLLMLNVFERDNNRPQEIDFRSGMGSYKIKELS

SEQ ID NO: 70839 - DNA, 1173 bp, Unknown
  Obtained from environmental sample
  misc_feature (1)..(1173): n is a, c, g, or t
atgtacaggtttgacgcggaaaaagcgcaaagttacaatccaattcaactcttttatttatgcgtaacgctgttagtgggtacagggcttgtaaccctttattccgcgtcatattcattcgccgcgcgctttttcggcgacggaaattactttatcgtaagacagttggttttttgcgcggcgggaattatctgcttctttgttttctcccgcattaggcttgatatactcagaaaatgcgttataccgtttgtctgcattgcggcgggactatgtattttaactttgattcccggcataggcgtggagcgttacggcgcgtcgcgctggatcgaaatcggctcgttctcctatcagccgtcggaaatggttaagtttgtactgccgttgtaccttgcgcatctgcttgataaaaaagcaaataatcttgacagttttttgtcgggagtactgccgcctgttgtggttacgggacttttcttcgctcttatctacgggcagaacaatttctccacggcggtttttcttatctttaacgcgatgatcatcttcttccttgcgggaatacgtttccgttactttattgcggcggtcgcgatgattattccggtttccgcgcttttagtatttacaaaagaacatagagtcaggcgtttagtcagtttcttaagacctcaatgggatccgcttggcgcgggttttcaggttaacgccagtaaggacgctattatttcaagcggcttttggggcaagggcataggggaaggaagcaaaaaattggcgagtatcccggaaattcactccgactttattttcagcgcgtatgttgaagaagcgggatttataggcattcttctgttcttcgccctgtttactgtctttgcggttctgggatttaaagcagcgttgaacagtaaatcaatattcggaagattattggcgggcggactgacaacgcttataactacacaagccatgcttaacacggcggttgtttcgggggcgcttcccgcgaccggaatacctcttcctttcttttccgccggcggttcttcgcttcttacaacaatgatttgcgcgggacttatagcgaatgtggcaaggaacgacgctattacaagcggagtcaggaatccaatttacgacgtatcggagggacaatatgatatctga

SEQ ID NO: 70840 - protein, 390 aa, Unknown
  Obtained from environmental sample
  DOMAIN (15)...(372): Cell cycle protein
  misc_feature (1)..(390): Xaa is any amino acid
MYRFDAEKAQSYNPIQLFYLCVTLLVGTGLVTLYSASYSFAARFFGDGNYFIVRQLVFCAAGIICFFVFSRIRLDILRKCVIPFVCIAAGLCILTLIPGIGVERYGASRWIEIGSFSYQPSEMVKFVLPLYLAHLLDKKANNLDSFLSGVLPPVVVTGLFFALIYGQNNFSTAVFLIFNAMIIFFLAGIRFRYFIAAVAMIIPVSALLVFTKEHRVRRLVSFLRPQWDPLGAGFQVNASKDAIISSGFWGKGIGEGSKKLASIPEIHSDFIFSAYVEEAGFIGILLFFALFTVFAVLGFKAALNSKSIFGRLLAGGLTTLITTQAMLNTAVVSGALPATGIPLPFFSAGGSSLLTTMICAGLIANVARNDAITSGVRNPIYDVSEGQYDI

SEQ ID NO: 70841 - DNA, 753 bp, Unknown
  Obtained from environmental sample
  misc_feature (1)..(753): n is a, c, g, or t
atgtttcatgagttttttgatcttttgttcagctatttctctcctttccgcgtattcgcgtatttaacattcaggagcgcttttgccgcgcttactacgctgttaatttgctttattttcggcggaagaattatcgagttcctgcgaaaattaaaaataggtcagtctatacgcgaagacggtccgcagactcatcttgtaaaatccggaacgccgactatgggaggaatatttataattctttccgtcgtaattgctatgctgttatggggcgatttgcataataaatcaatctggatagcgatgggcgcgtttttagggttcggcgcaatcgggtttatagacgactatttaaaagttacgcggcataattcggaaggacttcccgcgtgtgtaaaacttgccggacaatttgggatcgcgattgttattgtactgataatttattttacaggcggcgaaaatgtaaccgctttgtatattcctgtctttaaagagcctgtttgggatatgggctgtgtttggattccgtttgccgttttattggtggtaggtgaatcaaacgcggttaatttgtccgacggtctggagggtcttttggcggggcttttaatcttggtgtttcttgcgcttgcgatactcacatacactacggggcgcatagagtattcatcatatcttggaatacggttatattcctgtagctcggagaacttacagtcgtctgtctggccgccgcaggcgcttgcgtag

SEQ ID NO: 70842 - protein, 250 aa, Unknown
  Obtained from environmental sample
  DOMAIN (98)...(240): Glycosyl transferase family 4
  misc_feature (1)..(250): Xaa is any amino acid
MFHEFFDLLFSYFSPFRVFAYLTFRSAFAALTTLLICFIFGGRIIEFLRKLKIGQSIREDGPQTHLVKSGTPTMGGIFIILSVVIAMLLWGDLHNKSIWIAMGAFLGFGAIGFIDDYLKVTRHNSEGLPACVKLAGQFGIAIVIVLIIYFTGGENVTALYIPVFKEPVWDMGCVWIPFAVLLVVGESNAVNLSDGLEGLLAGLLILVFLALAILTYTTGRIEYSSYLGIRLYSCSSENLQSSVWPPQALA

SEQ ID NO: 70843 - DNA, 753 bp, Unknown
  Obtained from environmental sample
  misc_feature (1)..(753): n is a, c, g, or t
atggccgtttgttttgtttttgtgttcgccgtattcggacaaactgataaagataacgcaaaaaccattcatgtattcgtggccctttgcgacaacaaatatcaaggcatagttccggtgccgaaagcgattggtaacggacaggaccaaaacagtaatctttattggggcgcgctttacggcatacgcacttatttcaaaaaaagcaatgaatggaaactgcttgatacgagggcgaaaaacggcattgtactcgaaaggcttatcttcaaacataccgccgcagactattatttgatagccgacgcctacgatgggcagtacatcgagcagtgtaccgaagatttcctgcgcggcagcagcggaaatcaaaaagacacgttgatgattaacggcaaaatcttgggtataggcggcgacgcgtcccttttggcatacataggccacaatggattaatgaactttgagttatacgaaacttacataaacagtgataaaaagaaacgtgatgtgattatattagcgtgttacagcaagcgttttttcagctcatatttaaaagacgcaaacgtgaacccgttgctttggaccaccaattttatggcccccgaagcatacacattgcacgacgctctctccggatacgtaaacggtgaaacgaacgaaagcatccgcgataagggcgccgcagcttacgccaaatatcaaaattgcagttttaacgcggcaaaaaaattgttggtaacggattga

SEQ ID NO: 70844 - protein, 250 aa, Unknown
  Obtained from environmental sample
  misc_feature (1)..(250): Xaa is any amino acid
MAVCFVFVFAVFGQTDKDNAKTIHVFVALCDNKYQGIVPVPKAIGNGQDQNSNLYWGALYGIRTYFKKSNEWKLLDTRAKNGIVLERLIFKHTAADYYLIADAYDGQYIEQCTEDFLRGSSGNQKDTLMINGKILGIGGDASLLAYIGHNGLMNFELYETYINSDKKKRDVIILACYSKRFFSSYLKDANVNPLLWTTNFMAPEAYTLHDALSGYVNGETNESIRDKGAAAYAKYQNCSFNAAKKLLVTD

SEQ ID NO: 70845 - DNA, 1695 bp, Unknown
  Obtained from environmental sample
  misc_feature (1)..(1695): n is a, c, g, or t
ttgttctccgaaggaaccttttttatgaagatgctcaaccaataccggtgggcgctgctgttggcggcgatgttggtcgccgtggcggtggtcgggacgcgttggctgtctgaacgcggggataaattgatacgggagccagtctccgaaacgagcgaaacgctcgccgataacagagacggcaaaacggacgacgggtacggcgaggataaattgaagcgggaggccgtctccgaaacgtttcccgataaaaaagacggcgaaacgcaaaaggcggacagcgagtgcggcgcggcggatattctgaaggagtcggttggtccggcgggcacggtgtccctgacgttcaccgactccagagactgccggagatatcgggcggtaaagataggcggcgatgtttggatggctgagaaccttaattataaggcgccgagcaattcttggtgtgcggaagacaaggaatcaaactgcaaaaaatacggccgtctgtacgattggggcgcggcgaaaaccgtctgccccgccggttggcatctctccaccgacgaggagtgggacaggatgctgactgctataggcagtaaaaagggtgggagatctggggatgattgggcaggcgcgggcaagaaactgaaaacaaagagcggctggagtaaggatgaagacagcaaactaagcggaaacggcacggacgattacggtttttcggcgttgccgggcggtgagcgctacagaagcggcaaattcggggaactgggcagtcgaggcatttggtggactgccagagagaacaacggtacaagcgcgtacaggcgtgaaattttaaatttccgtgacgatgtgttcgacggccccaccggcaaggaatctggaaattccgtgaggtgcgtcagcgacgacggcgagattgtcaaggccggcgagcgcggcacgttctcgcttacgataaccgccgaaaacggcgggaaggtgcacgccgccccgcgcaagtatttctacgcagtcggagagaaggtaacgctcaccgccgtccccgacgacgggtacgcttttgcaggttggacgggcgggcgcgtcacgaattccgcctcattggttaccaccgccacaatgcgctcggacatgaccgtgaccgcgaatttccggcatatcgactacaacgcgttcgccgacaagagggacgggaaaacgtatcgcacggtaaaaataggccgacaaacgtggatggcagagaacctaaattacgaacccaaaccgtcggagggcaattcgtcgtgtcttggcggcagagaaagcaactgcgcgaagtacggccgtctttacgattggcacacggcggcgaaggtatgcccgtcaggttggcgcttgccatcgtttaaggattgggacatgttggctacttacgttggcggggcagatgtagccggcaagaagctgaaagcggcaagcggctgggcgggagagtccggatatcgcggcacaggcacggattactacggtttctcggccctgcccggcggcggcgaacccgaaagattcgagaacaaaaacatcttcggcgcgtggtggacgactacgaagatgtacgacatcgacccggtaagcgcccgaatcacgctccatcaagacggcctgagcggacttgccaccgacatgagcgacatatattcggtaaggtgcatcatggattag

SEQ ID NO: 70846 - protein, 564 aa, Unknown
  Obtained from environmental sample
  misc_feature (1)..(564): Xaa is any amino acid
MFSEGTFFMKMLNQYRWALLLAAMLVAVAVVGTRWLSERGDKLIREPVSETSETLADNRDGKTDDGYGEDKLKREAVSETFPDKKDGETQKADSECGAADILKESVGPAGTVSLTFTDSRDCRRYRAVKIGGDVWMAENLNYKAPSNSWCAEDKESNCKKYGRLYDWGAAKTVCPAGWHLSTDEEWDRMLTAIGSKKGGRSGDDWAGAGKKLKTKSGWSKDEDSKLSGNGTDDYGFSALPGGERYRSGKFGELGSRGIWWTARENNGTSAYRREILNFRDDVFDGPTGKESGNSVRCVSDDGEIVKAGERGTFSLTITAENGGKVHAAPRKYFYAVGEKVTLTAVPDDGYAFAGWTGGRVTNSASLVTTATMRSDMTVTANFRHIDYNAFADKRDGKTYRTVKIGRQTWMAENLNYEPKPSEGNSSCLGGRESNCAKYGRLYDWHTAAKVCPSGWRLPSFKDWDMLATYVGGADVAGKKLKAASGWAGESGYRGTGTDYYGFSALPGGGEPERFENKNIFGAWWTTTKMYDIDPVSARITLHQDGLSGLATDMSDIYSVRCIMD

SEQ ID NO: 70847 - DNA, 546 bp, Unknown
  Obtained from environmental sample
  misc_feature (1)..(546): n is a, c, g, or t
atggcggtgatgacggcaacggtacggataatttcggattttcggctttgcccggcggccaacgctactccgacggcgatttcgaaaatatcggcaaagtcggcaggtggtggacggctacaatggcggacccatgggattaccacagcttttactggggcatggatgattactccaatgagattgaacagcactacggcagcaggatccgttactggctttccgtgcgctgcctcgcagacggaagcgcaatcccttcggaatgaatacaaattgtcgcgggatgagagagacgggctgacatacctgacggtaaagattggacggcagacttggatggcgcagaatcttaattatgaaatatcgaatagttcttggtgctatgaaaacaacgccgatagttgcaaaaagtatggcaggttgtacacttggaacgccgctatgacggcttgcccaaacggatggaagttgccggattcggcggattggataaagttgttgacgacggcgggcggaaagaagacctgcgtcaaagacacgccctaa

SEQ ID NO: 70848 - protein, 181 aa, Unknown
  Obtained from environmental sample
  misc_feature (1)..(181): Xaa is any amino acid
MAVMTATVRIISDFRLCPAANATPTAISKISAKSAGGGRLQWRTHGITTAFTGAWMITPMRLNSTTAAGSVTGFPCAASQTEAQSLRNEYKLSRDERDGLTYLTVKIGRQTWMAQNLNYEISNSSWCYENNADSCKKYGRLYTWNAAMTACPNGWKLPDSADWIKLLTTAGGKKTCVKDTP

SEQ ID NO: 70849 - DNA, 1185 bp, Unknown
  Obtained from environmental sample
  misc_feature (1)..(1185): n is a, c, g, or t
ttgcgggggctttcgccgcagagccggctttcggaacattcaccgacacaagagacgggcagacgcaccgaaggttggcgcgagatgaaaaaaatattcgttattacgcagattataattatcgtatgtatctcatgcggctgcgtacggcagccggtgtcggggcggagatactatgagggatatatctatacattggatggacaaccgattcaagacctaaaggtttatccctcggactgtaaatattttcgttgtacggaagccgattccgccggaggaatgacggacgggcgcggttattttaaatttgagcaggcgaaaaattggatcacaggaggcctagttgtcgaatcggacgggagaattattgataccattgattgtcgtagtttcggcggcataaattgcgctatattgccgtggccatggccgcagccgaaacgtaatgtttatcgtttttttacagatgcaaccgccgacacattttttgttgatatggattgcaaatgggaaagcgacatggtactgcggggacggaaacgcgcaaccgaacgggtattacgaaaatcggttgtgttggcgaattgcttggccaacgccgccgaaccgtcgttcgggacgttcaccgacgcaagggacgggcagacgtacaagacggtaacgctcgacgggcagacgtggatggcgcagaatctgaactatgagacgtcgttgagcgtatcttggtgctatgaggacaaagccgataattgcaacaaatacggcaggctgtacgactgggagacggcgaagcaggtttgccccagaggatggaaattgccggaggatgaggattgggtaaagttggtcaagacggcgtgcggatatgaatttgccggtaagacgttgagagcaaaaagcggttggaacatcacgtatggcggtgatgacggcaacggtacggataatttcggattttcggctttgcccggcggccaacgctactccgacggcgatttcgaaaatatcggcaaagtcggcaggtggtggacggctacaatggcggacccatgggattaccacagcttttactggggcatggatgattactccaatgagattgaacagcactacggcagcaggatccgttactggctttccgtgcgctgcctcgcagacggaagcgcaatcccttcggaatga

SEQ ID NO: 70850 - protein, 394 aa, Unknown
  Obtained from environmental sample
  misc_feature (1)..(394): Xaa is any amino acid
MRGLSPQSRLSEHSPTQETGRRTEGWREMKKIFVITQIIIIVCISCGCVRQPVSGRRYYEGYIYTLDGQPIQDLKVYPSDCKYFRCTEADSAGGMTDGRGYFKFEQAKNWITGGLVVESDGRIIDTIDCRSFGGINCAILPWPWPQPKRNVYRFFTDATADTFFVDMDCKWESDMVLRGRKRATERVLRKSVVLANCLANAAEPSFGTFTDARDGQTYKTVTLDGQTWMAQNLNYETSLSVSWCYEDKADNCNKYGRLYDWETAKQVCPRGWKLPEDEDWVKLVKTACGYEFAGKTLRAKSGWNITYGGDDGNGTDNFGFSALPGGQRYSDGDFENIGKVGRWWTATMADPWDYHSFYWGMDDYSNEIEQHYGSRIRYWLSVRCLADGSAIPSE

SEQ ID NO: 70851 - DNA, 681 bp, Unknown
  Obtained from environmental sample
  misc_feature (1)..(681): n is a, c, g, or t
atgcgcaaactcatactgactgcggcggcggtcgcggcgatttgctttgcggctaacgcacaaactacggcggacgaacagaaaatcatcaagcggattccggcagggtatcgcctacactcaatcaacggcaaaaaacagatactgcgcggcgacctcaacgcagacggcgcggacgactacgccgtcatcatcaaagaagcggcggcgtccgacgaagcataccccgctcgcggtatcctcatcttcttcaaagacggtgacgactacaaactcgcgttggaaaaccgcaaaggcttggggtcaaaagatgggaagatttgcatgaattgcgatgatagagagatttcgtttgagataaaaaagggtaatttgtatattatttaccacactgaggcaaggttcaaccacattttcgagaccttcacgttccgctataaaaactccgagtttgagttaatcggttatgacactgactatgggaaatcgggggcaagcataaattttgcgacgaaaaagaagttggacgaagattgtccgcaagacaataagtgcaaaaaaacttggacgacattcacaatgaaagaaccgatactgttgcggaaaatcaccgacttcacaacattttatttggatgattatataaaaataactgacgataaaaacggcaatcagaaataa

SEQ ID NO: 70852 - protein, 226 aa, Unknown
  Obtained from environmental sample
  SIGNAL (1)...(20)
  misc_feature (1)..(226): Xaa is any amino acid
MRKLILTAAAVAAICFAANAQTTADEQKIIKRIPAGYRLHSINGKKQILRGDLNADGADDYAVIIKEAAASDEAYPARGILIFFKDGDDYKLALENRKGLGSKDGKICMNCDDREISFEIKKGNLYIIYHTEARFNHIFETFTFRYKNSEFELIGYDTDYGKSGASINFATKKKLDEDCPQDNKCKKTWTTFTMKEPILLRKITDFTTFYLDDYIKITDDKNGNQK

SEQ ID NO: 70853 - DNA, 636 bp, Unknown
  Obtained from environmental sample
  misc_feature (1)..(636): n is a, c, g, or t
atgcgcaaactcatactaactacggcggcggtcgcggcggcgattgcgggggctttcgccggagagccgtctttcggaacattcaccgacggcagggacggtcagacctacaaaacggtgaaaatgccggacggcaaaacatggatggcgcagaatatcaattatcagaccaaaagcgggtcttggtgttataagaatgatacttcatactgcgacaaatacggtaggctgtatggttgggaaaccgcgaaaaaaatttgccccaccggttggcaccttccaactcgtaaggagtgggataatttggtgaaggcggttggcggtacttcagacatctcgctcgcctttaaagcccataccgcagataaacaacttaaagcaaaaagcggttggaaagactataagggcaagagcggtaacggaacggacgattatggattttcggctctgccgacgggtggtcgccacaatggcactttcggcgaagctggtttaaacggttactggtggacggcctcatcttgtgttgatttctttgcctgcctatactctggctgtcgtatagacggtttatacgaggatttttgcaacgaaaaacacaactttgcggtgcggtgcgtcgccgacaacccttga

SEQ ID NO: 70854 - protein, 211 aa, Unknown
  Obtained from environmental sample
  SIGNAL (1)...(20)
  misc_feature (1)..(211): Xaa is any amino acid
MRKLILTTAAVAAAIAGAFAGEPSFGTFTDGRDGQTYKTVKMPDGKTWMAQNINYQTKSGSWCYKNDTSYCDKYGRLYGWETAKKICPTGWHLPTRKEWDNLVKAVGGTSDISLAFKAHTADKQLKAKSGWKDYKGKSGNGTDDYGFSALPTGGRHNGTFGEAGLNGYWWTASSCVDFFACLYSGCRIDGLYEDFCNEKHNFAVRCVADNP

SEQ ID NO: 70855 - DNA, 648 bp, Unknown
  Obtained from environmental sample
  misc_feature (1)..(648): n is a, c, g, or t
atgggtatatatatagaagctcttgtactgtatattctcctttttttgcacggatcgcttgccttatttgcgggcggaggggctgaagcggcgaatttttccgtaacaacggaacttgtaaatattttcgcgtatttaatacccgcgttaatccttatttggctcttaataaccaaaacgccgaaaatagaattatgggctgtaaagccggggaaaaaagaccttttatcctgtgttatcacattcccatgcctgttaattacaggctttattgtaacgataataggctcatatataagcggtccttccgaaagtatgacgttgaatttaccctcttcagccgcagaatgggtattactgtttgttatatgcctcttatccgcttaccttgaggaaagctatttccgtttttatctgttatcaaaaagagaggaatttaatctgaacaccatgtccgcattggcgctttctgtggttttattttctatctgccacatttacgagggaccatggggctttttaaacgcggtaatttccggtacgattcttggttttatgtttttacggtacaactcgcttcacggcattgccgcagcgcataccctgtataatatttcaatttatattatttccggattaactatttag

SEQ ID NO: 70856 - protein, 215 aa, Unknown
  Obtained from environmental sample
  SIGNAL (1)...(30)
  DOMAIN (118)...(211): CAAX amino terminal protease family
  misc_feature (1)..(215): Xaa is any amino acid
MGIYIEALVLYILLFLHGSLALFAGGGAEAANFSVTTELVNIFAYLIPALILIWLLITKTPKIELWAVKPGKKDLLSCVITFPCLLITGFIVTIIGSYISGPSESMTLNLPSSAAEWVLLFVICLLSAYLEESYFRFYLLSKREEFNLNTMSALALSVVLFSICHIYEGPWGFLNAVISGTILGFMFLRYNSLHGIAAAHTLYNISIYIISGLTI

SEQ ID NO: 70857 - DNA, 1443 bp, Unknown
  Obtained from environmental sample
  misc_feature (1)..(1443): n is a, c, g, or t
atggacaacaaagcgcgttataaaaaaagaagcgattttcgttttcttgatttatttataattgttttttttctctctatcgctgttgtaagcctttatttattcaggcaggacttgttaaatacttttagactgcagaatgtcgagcctgccggaaccgtagtaattaaaaaaaatacagtccaaagacggcttggcgatcgcgttatatgggacaggttaaataccgaatcacccgtatatgtgggtgatttaatccgcgttgcggatatttccgccgcgactctctatataaaaggcaatagcatagaattagacgaaaacacgcttatccgtatcgttctttctcccgacggcgaaggcttgcaaattataatgacttccggaaccgtagctgtttttgccgaaaagggagcggaaaaagtttcgattaatttaaacggacaggaagtaaaatcggaaccgggaaccgttgtacgcgcctctatgcccgaaaaaggagagccgactttaaaggtttacgaaagcgtccggaaatttgtcgaggaagtgcctctgcgtaaaatacaggaaccccgtcttttaagtcccgccgcaaacagtattatacattacggtgaagaacttccgtccttgaatttccaatggacaagcatagatgaagcctcctcttatgttttgcagatcagctcttctccggatttttccagtttgcgcatgaatataaatacgaccgctgcttccgtatctgtaaatactttggggcaggggttatggtattggcgcgtaatgcttggtcttcctccgccttataacgtcaatcctgttttttccaacgtgtcttttttccgcacagaacagcacggaccggatagagtgggacctgttcaaaacggcaatattgcagattggattgcgggagaagcgccgtcaacaagtctgccgcccgaagtacccggagaaattctcatggagaacgatctttctccgccgcccgttgttcaagcgccgccgcctgaaccggttagaccgcctcccgaaagaactccgccgccgcccgttctatttgccgctccgcagattatccagcctgcgcggggaacaacttatggttttgagcagcttctgtctcaaagaacaattaatttcaggtggtcgtcggtgcggggagcaaacgcatatatttttactctttatgaacagaccgcaaacggaaggcggcaaattcttcgttcgactataaacagaggcacgcgctatacaatggacaatttgcgcgcgttggaaaaggggacttttgtctggcaggtagaagcggtaagaatgggacgcagaaatgttatcgaacagcatggcagaacaaccgataacatttttacggtaaatttccccgttccgggaccggttgaaattgaagatatcgggattttatatggcaattaa

SEQ ID NO: 70858 - protein, 480 aa, Unknown
  Obtained from environmental sample
  misc_feature (1)..(480): Xaa is any amino acid
MDNKARYKKRSDFRFLDLFIIVFFLSIAVVSLYLFRQDLLNTFRLQNVEPAGTVVIKKNTVQRRLGDRVIWDRLNTESPVYVGDLIRVADISAATLYIKGNSIELDENTLIRIVLSPDGEGLQIIMTSGTVAVFAEKGAEKVSINLNGQEVKSEPGTVVRASMPEKGEPTLKVYESVRKFVEEVPLRKIQEPRLLSPAANSIIHYGEELPSLNFQWTSIDEASSYVLQISSSPDFSSLRMNINTTAASVSVNTLGQGLWYWRVMLGLPPPYNVNPVFSNVSFFRTEQHGPDRVGPVQNGNIADWIAGEAPSTSLPPEVPGEILMENDLSPPPVVQAPPPEPVRPPPERTPPPPVLFAAPQIIQPARGTTYGFEQLLSQRTINFRWSSVRGANAYIFTLYEQTANGRRQILRSTINRGTRYTMDNLRALEKGTFVWQVEAVRMGRRNVIEQHGRTTDNIFTVNFPVPGPVEIEDIGILYGN

SEQ ID NO: 70859 - DNA, 2028 bp, Unknown
  Obtained from environmental sample
  misc_feature (1)..(2028): n is a, c, g, or t
atgagccaaaattataaaaggcgcgctctggataagataaaattccccattagcgccaagttaattatcattatttctttgattgtaatagtttctcttggttccattacagctcttgtttcatggctggttcaaacagatttaagaataaccgcggaagagaataattttgagacaaaccgccgctctgcgatagaagcggagactttgttggaaaatactcgatctaattcaaggatactaattcaatctatcagcgcattaggctcacaaacaactgctgtaaaagaaatgacggattttttctggaaagaaaatccacagattgcggcgattttttttgtcgtttccggtaaacaggaacggctgataatcaacaagcagttttttatttcgcgtcaaattgatgaaacatttgttacttctttttttgatatgcaaagacctgcgctgggaagagccatacgcggcgagactgttcttcttaacgcggctccttttttttcaagagcgattttaagtttattttttccgtggcaaagcgacggagtgggagcggttcttttttcgtgcgaagctttaaatgacagctatggttacagtgtcaataaatcttatatgattaacgccgacggcgacattctttctcatgccgattttaccgtcgttaaagaaaatacaaatgttaaaaatttaagttttatccgcgatattcttaacagccacgaacagaacagacaacagcttatagaaaccgactttggggctacgctgtatgcaaccgctaatgtgaatcttgggcttttagcatccgtctgggaaaaaacaaaaaccacggcgaaatttgtttttgacgaatcgataaaaatgttaaaaaaatatgatctcttaatcatcaaagaaaaagaaaagaaaacgcgtcagtttgtggcatataccaaattaaacaacgcaaacgctgttgtaataacaagcattgagtacaataaaatattcgaaggtattgccgctaccacaagacgaaatatctatcttacaatagcggttttaagcttatcaattatttttatttggtttttctcaaaaacaatttctaatcccataaaatcgttagcatccgccgcaaggcagatcgaatacggaagatttgacgttgtcttgcattccaaaactaacgatgagcttggtattttaacacaaagtttcggaaagatgtgttcggcgttaaatattttcggtaaatttacaaataaggatatcgccgtaaaagcgatgcgcggcgagattaaaccgggcggcttgccaaagcatggcacgatcttcttttccgatattcgcgaatttacggcgaagtcggaaaactttacaaaattcttcggagcggaagcttccgataaaatcgttttctggcttaatcaatattttacgcagatggttgactgcgtggaaaaaacaaacggctgcgtggataaatttatcggcgacgccgtaatggctcactggggaactgcttcctccgcgggcagtccgcgcaaggacgcttttaactgcgttaaagcggcgcttatgatgcgtaaggctctttattttatgaatagccaacgcagagcgggagacccggcaaatccgtcaatccgtatcgggtgcggaataaattcaggcgttgtaactgccggacagcttggcagcgatctgagaatggaatatacggtcataggcgatcctgtcaatcttgcgtcgcgtattgaagctcttacaaaaccgctcggcgcggatattcttatttccgaagatacatggagacttgtcggggatagatttattacggaggaaatgccgtccgtatccgttaaaggaaaagcaaagcccgtgcggattttcgccgttgttaattttgccggagaagacagaggacctcaaacgctgaatgaagtccgctcccttttgggaattgatccgcctgatcttgctaaagtagacgttaacgctgatgaaaagaaatataaaattggcgaggcagcaaaataa

SEQ ID NO: 70860 - protein, 675 aa, Unknown
  Obtained from environmental sample
  DOMAIN (342)...(411): HAMP domain
  misc_feature (1)..(675): Xaa is any amino acid
MSQNYKRRALDKIKFPISAKLIIIISLIVIVSLGSITALVSWLVQTDLRITAEENNFETNRRSAIEAETLLENTRSNSRILIQSISALGSQTTAVKEMTDFFWKENPQIAAIFFVVSGKQERLIINKQFFISRQIDETFVTSFFDMQRPALGRAIRGETVLLNAAPFFSRAILSLFFPWQSDGVGAVLFSCEALNDSYGYSVNKSYMINADGDILSHADFTVVKENTNVKNLSFIRDILNSHEQNRQQLIETDFGATLYATANVNLGLLASVWEKTKTTAKFVFDESIKMLKKYDLLIIKEKEKKTRQFVAYTKLNNANAVVITSIEYNKIFEGIAATTRRNIYLTIAVLSLSIIFIWFFSKTISNPIKSLASAARQIEYGRFDVVLHSKTNDELGILTQSFGKMCSALNIFGKFTNKDIAVKAMRGEIKPGGLPKHGTIFFSDIREFTAKSENFTKFFGAEASDKIVFWLNQYFTQMVDCVEKTNGCVDKFIGDAVMAHWGTASSAGSPRKDAFNCVKAALMMRKALYFMNSQRRAGDPANPSIRIGCGINSGVVTAGQLGSDLRMEYTVIGDPVNLASRIEALTKPLGADILISEDTWRLVGDRFITEEMPSVSVKGKAKPVRIFAVVNFAGEDRGPQTLNEVRSLLGIDPPDLAKVDVNADEKKYKIGEAAK

SEQ ID NO: 70861 - DNA, 699 bp, Unknown
  Obtained from environmental sample
  misc_feature (1)..(699): n is a, c, g, or t
atgaggagccagattcgcggtttgcagcaggcggaacgcaatatccagaacggcgtatcatttatccaagctactgaaggttaccttcaggaaacacaggatattctgcaccgtttaagagagttagcggttcagtcagccaacggcatttattcagacgaagatcgtatgcagatccaagtcgaagtgtcgcagctgtatgacgaagttaaccgtatcgcaagccatgcccagtttaacggcatgaacgtgcttacaggcgcatttgcggctgaatcaccgtcaggcagaataatgcagttgcaagtcggcgcgaacatggatcagaacgccagaatctacgttggcaatatgtcagctaatgcgcttggattgcatgatgcacagggcgacggcaagatttcaattgccaacccgtcagaagcaaaccttgctatcggcacagtagattcagcgttgaaaattgtttccaaacaacgtgctgaccttggcgcttatcaaaaccgttttgaaatcgcggcgcagggcgtagcggtagcggcggagaatttgcaggctgcggaatcccgcattagggataccaacatggcgaataagatggttgactatacaaaagattccatcttgtcacaggctggaaccgcaatgctggcgcaagctaatcttcgcacgcaatcggttttatcactgctttcataa

SEQ ID NO: 70862 - protein, 232 aa, Unknown
  Obtained from environmental sample
  DOMAIN (139)...(210): Bacterial flagellin C-terminus
  misc_feature (1)..(232): Xaa is any amino acid
MRSQIRGLQQAERNIQNGVSFIQATEGYLQETQDILHRLRELAVQSANGIYSDEDRMQIQVEVSQLYDEVNRIASHAQFNGMNVLTGAFAAESPSGRIMQLQVGANMDQNARIYVGNMSANALGLHDAQGDGKISIANPSEANLAIGTVDSALKIVSKQRADLGAYQNRFEIAAQGVAVAAENLQAAESRIRDTNMANKMVDYTKDSILSQAGTAMLAQANLRTQSVLSLLS

SEQ ID NO: 70863 - DNA, 327 bp, Unknown
  Obtained from environmental sample
  misc_feature (1)..(327): n is a, c, g, or t
atgtccgtagcaagtgtgggatttaacactgtctcgccaatgcttttccctgaacaggaaagaacggtcagacagccggcggatcaaccggaaaaaaaagcaaaacctcaaatacacaactctacaacggcggatttagaaaaaatcggtcttgcttttaacagaaaactgcaatttgtggtagatcacagctctcacgaggtcattatcaaggtaattgataaagaaaccgataaagtgattaaggagcttcctcccgaagaattacagcgtctgcacagtaatctaaaagaggctattggtctattatttgatgaaatggtctag

SEQ ID NO: 70864 - protein, 108 aa, Unknown
  Obtained from environmental sample
  DOMAIN (7)...(107): FlaG protein
  misc_feature (1)..(108): Xaa is any amino acid
MSVASVGFNTVSPMLFPEQERTVRQPADQPEKKAKPQIHNSTTADLEKIGLAFNRKLQFVVDHSSHEVIIKVIDKETDKVIKELPPEELQRLHSNLKEAIGLLFDEMV

SEQ ID NO: 70865 - DNA, 2076 bp, Unknown
  Obtained from environmental sample
  misc_feature (1)..(2076): n is a, c, g, or t
ttgatggggagttcaggtatgtctgatgtttatattccgggggtaaaaagcaggttcaactcagaaaagatcgttgacgatctgatgaagattgaaaggatccccagagacagagctcaaaacagcattgacactcttcgcgtacaaaaaggttattggcaggaagtaggaaaacgaataaatacactgcgcgacagctcccgccaactctactcttttcaaaacccctttaatgaaagactaggacgcagcgccgatgaatccgtaattacggctaccgcaaacagggaagcgatggaacaatcgcttttttttaccgttaagcaaaccgctcaggcggacagatttctttccaaacctctcgatgaaaaaacaaaaattgacgcgggaacttacgttttttccgtcggtaatgatgaaatttccataaattaccgcggcggcactttaagaaatttcgcggaaacaattaataatcgcggcaaaaataaaatatccgcctctataatcacagtaaaaccgggaacaaattcccttttgatagaatccaaattaaccggatcagaaaacagattgggcttttcacaagacgcctcaacattagcgacaaaaataggcatgatggaagtcagccatgacgctcaaaaagatatagtcgtcagcgaaaacacagtgaaaaaaacaggacagaacgctgatgctatagcggttaacgacggcatggtacaggttgccccgctctcttcagcgtcccttccgataaatatcgcagtcggctccgattcgccattggtactgcgtcttcaaactcaaactaaggttggatcggacgatagttttaatattccccagcctcctccgggacccgatgtacctacaagttccgtaacctacgaaggaattaccattgaaaataaaccgtccgacgctcccctgcccgaatttactcccccgtccgcgcctgtgcgagtagacaacatggaagttttaaatcttgttttctccgacggcactaccgcaaagcttcctgcactaaccgattcttcctcgcctaccgcaaggcagtataatttagcggaactcgcgcgcggcagaactattacatcgcttaacattgaaaattcaaatactcaccgtgaagtttcaatcggcaaagtggaaattttagaccctactaccacaagcggattaaaaccgttaaacgccgtagctacggcgcgcgacgcgataatatcgatggaagggatagatattgtccgtccttcaaacattattgacgatttaattcccggcgttacattaaatgtaagaggcgtatccgacaaaccggttgagttaaaaattacgcctaatgtggaagcggtaaaagagtctattatcaattttgtcggaaattacaatcggcttatggcggaaataaacgtactaacggcaagaagcgtgtattcgggatcggggtacaatacaagcatagacgatacaatcataaacgaactgacttatttaacgtctgaggaaaaagccgagatgaaaaccagacttggcgcttttaacggagacgttactttaaataatttaagaaaccaccttatgcggacagttacagccccctaccctaccagcatggaaagagaccttactcttttagcgcagataggcgtcagttctaacgcctcaagaacatcgggatacaatccgtcgcagttaagaggttatcttgaaatcgacgaaaaagcgcttgacgccgctttagagactaaaatacccgctatcaaagaattattcgcgagcgatacttcaggcgatttaattgccgatacgggagtcgcgtacaatgtggactccatagtaaaaccttttgttgaaacaggcggcattatttccctaaaaaccagcacaattgactcccgcatttctcaggacgaaaaacgcattgtcaaccttgaccgccagttagccgcaaaagaacaagacttaaaaatgcaatacgcaaaaatggaatccgcctactctcgaatggaaaaaatgtccaattctcttgacagtttcagtcagcaaaaccggggcaataaataa

SEQ ID NO: 70866 - protein, 691 aa, Unknown
  Obtained from environmental sample
  DOMAIN (16)...(115): Flagellar hook-associated protein 2 C-terminus
  misc_feature (1)..(691): Xaa is any amino acid
MMGSSGMSDVYIPGVKSRFNSEKIVDDLMKIERIPRDRAQNSIDTLRVQKGYWQEVGKRINTLRDSSRQLYSFQNPFNERLGRSADESVITATANREAMEQSLFFTVKQTAQADRFLSKPLDEKTKIDAGTYVFSVGNDEISINYRGGTLRNFAETINNRGKNKISASIITVKPGTNSLLIESKLTGSENRLGFSQDASTLATKIGMMEVSHDAQKDIVVSENTVKKTGQNADAIAVNDGMVQVAPLSSASLPINIAVGSDSPLVLRLQTQTKVGSDDSFNIPQPPPGPDVPTSSVTYEGITIENKPSDAPLPEFTPPSAPVRVDNMEVLNLVFSDGTTAKLPALTDSSSPTARQYNLAELARGRTITSLNIENSNTHREVSIGKVEILDPTTTSGLKPLNAVATARDAIISMEGIDIVRPSNIIDDLIPGVTLNVRGVSDKPVELKITPNVEAVKESIINFVGNYNRLMAEINVLTARSVYSGSGYNTSIDDTIINELTYLTSEEKAEMKTRLGAFNGDVTLNNLRNHLMRTVTAPYPTSMERDLTLLAQIGVSSNASRTSGYNPSQLRGYLEIDEKALDAALETKIPAIKELFASDTSGDLIADTGVAYNVDSIVKPFVETGGIISLKTSTIDSRISQDEKRIVNLDRQLAAKEQDLKMQYAKMESAYSRMEKMSNSLDSFSQQNRGNK

SEQ ID NO: 70867 - DNA, 1161 bp, Unknown
  Obtained from environmental sample
  misc_feature (1)..(1161): n is a, c, g, or t
gtgtatttctacgcttatgacgaaaaaggcgaaagaacggctggcaggtcaacggggcaactgactaaaacggcggcaagggtgcttgtaaacaagcttttgaaggaaggggctttgttgccgaagaatgacgatgtgcctactttcggggaatacgccgtaaactggtgggattgggaaaattgcgaatacctgaaaaaaaggcgcaagagggctaatataacccaaagttattccgaccacatgatgaggaatttgaataaggttatattgccgtatttcaaaaatatgaaaatggacgctataaccccttccgttattgaggcgtttcttgacagccttataaaacaggattataaacattccacgattaacgactattacggaacttttaaaactatgatgatcgaagccgttgaccgtgaaattatcgctaaagaccctacagccaaagttgaacggctgataaacaactgtaaaacaataaaaattattacaccgcttgaattcaaaaaattgtttgtcggggattggcgcaaggtttgggaagataaccgcatagtttataccgtgaataaactggcggctttgtcgggaatgagggtgtcggagattttggggcttaaaggggattgtctgttcgatgaccatatttacgtctggatgcaatatgacgtttacggttacaggctaactaaaacgaaggataaacataatataccgcttccggcttcccttattgacgatttgaaaattctgaaagaaaaaaatggggacggttttttgttttccactgacggcggctgtgtacctatttgcagaaagacggttttaatgtatttgcggaaagcgttaataaatatcggcattaccagcgcagaaattaaagagcgtaatttgcatatccacgcttggcggcatttctttaatacggaaatgttaaaaggcggtatgactaaagaacaggcgcaggcgataaccacgcataagagcgaaagaatgacggaaagatatacgcattttgaccctttggaatttgtaaaggcgaaggaaatacaagaggcgttattacagcctgttaacgagaaaaaggaattaccgccgaatgtgtactctttccctgtggctaacataccgcaagaggaacggaaacaagcgtaa

SEQ ID NO: 70868 - protein, 386 aa, Unknown
  Obtained from environmental sample
  DOMAIN (175)...(348): Phage integrase family
  misc_feature (1)..(386): Xaa is any amino acid
MYFYAYDEKGERTAGRSTGQLTKTAARVLVNKLLKEGALLPKNDDVPTFGEYAVNWWDWENCEYLKKRRKRANITQSYSDHMMRNLNKVILPYFKNMKMDAITPSVIEAFLDSLIKQDYKHSTINDYYGTFKTMMIEAVDREIIAKDPTAKVERLINNCKTIKIITPLEFKKLFVGDWRKVWEDNRIVYTVNKLAALSGMRVSEILGLKGDCLFDDHIYVWMQYDVYGYRLTKTKDKHNIPLPASLIDDLKILKEKNGDGFLFSTDGGCVPICRKTVLMYLRKALINIGITSAEIKERNLHIHAWRHFFNTEMLKGGMTKEQAQAITTHKSERMTERYTHFDPLEFVKAKEIQEALLQPVNEKKELPPNVYSFPVANIPQEERKQA

SEQ ID NO: 70869 - DNA, 693 bp, Unknown
  Obtained from environmental sample
  misc_feature (1)..(693): n is a, c, g, or t
atggaaggtgggacattgtttataagccgaaatgtaaaaattttttcaataatgaaattcgtttttgatgaatgcggctttgaggacgtaattttaagctcgtttgaaaattacgagttggcggctctacttaataaaataaagcctaaaaatgtttttataaacagcggtttttattcggcggcaacatcttatatgattggttgtcttatctctaaatttcctgatttaaatttacacgttataaattttggctattatcctgacaaacttgcggtacgctttatttttcatggggcaaaatcttattttgatataaattacggcgttgaggaatttaggaatggtctgaaaaaaattaaattaggacaaaaatattattccccgaatgttcaaagtctaattgacaaaattgaagtaataccaaatttaaaaagagcattaaatgaccgtgaatgggaggtattatttcttgtctgtaatggatttgaaaataatcaaatcgccgtcaacttgaaaattagcaagcgaactgttaactatcttattcataatatatataaattatttgacggcgtgaatagacgggatttaattagaaaaaccctctgtttggggtggatagatataaaacaattaggctttcatggtactgacattaaaatacccccacgaatagtgagggcattttaa

SEQ ID NO: 70870 - protein, 230 aa, Unknown
  Obtained from environmental sample
  DOMAIN (145)...(202): Bacterial regulatory proteins, luxR family
  misc_feature (1)..(230): Xaa is any amino acid
MEGGTLFISRNVKIFSIMKFVFDECGFEDVILSSFENYELAALLNKIKPKNVFINSGFYSAATSYMIGCLISKFPDLNLHVINFGYYPDKLAVRFIFHGAKSYFDINYGVEEFRNGLKKIKLGQKYYSPNVQSLIDKIEVIPNLKRALNDREWEVLFLVCNGFENNQIAVNLKISKRTVNYLIHNIYKLFDGVNRRDLIRKTLCLGWIDIKQLGFHGTDIKIPPRIVRAF

SEQ ID NO: 70871 - DNA, 489 bp, Unknown
  Obtained from environmental sample
  misc_feature (1)..(489): n is a, c, g, or t
atgtcgcgggctataaataaagtctacatggggttctgcgtcggggcgcgtccgccggaacacgaggtgatcgatctgccgcttgcgccaagtcaacgcgagcggatcaaacgtactgtggacaagcgcaaaggcaaaccggcggtcaccgagtatgagctaaaagatttcatctgcggaatagcgcttgtggagttcacactgcacaccggacgcacccaccaaatacgcgtccattgcgcccataaaggctttcccatcattgaggatgatttgtacggcgggacgcgtgaggcggtactcaagattcccccgatggagaggccgttcgcgtacagtatatttaaatgttttgaaagacaagcattgcacgccttgtcgctctcttttgtccaccctttgactaatgaaagcgtaaaggttacagcgccttatcctgatgattttaatagggcgttaggaatattttttttaaatcaaaaacaataa

SEQ ID NO: 70872 - protein, 162 aa, Unknown
  Obtained from environmental sample
  DOMAIN (2)...(82): RNA pseudouridylate synthase
  misc_feature (1)..(162): Xaa is any amino acid
MSRAINKVYMGFCVGARPPEHEVIDLPLAPSQRERIKRTVDKRKGKPAVTEYELKDFICGIALVEFTLHTGRTHQIRVHCAHKGFPIIEDDLYGGTREAVLKIPPMERPFAYSIFKCFERQALHALSLSFVHPLTNESVKVTAPYPDDFNRALGIFFLNQKQ

SEQ ID NO: 70873 - DNA, 1017 bp, Unknown
  Obtained from environmental sample
  misc_feature (1)..(1017): n is a, c, g, or t
atggcccacacggtggagtggctggggtgcccttgggggcacgccgtggcgccctccacgccggtgcaagactaccgcctccacgttaaggcgtggcagagcaacttcgcggcgatattcgggatagacgccctcaagcgcgtccgcgggttctcgccctccgagatggcgctgcccaaccacccggacaccgcctacgagttcgtgaagaccctcaccgagtgcggcttcacctgggtgctcgtccaagagcacaccgtggaacgccccgaaaacggctggggccccgaaaataagtacatcccccaccgcttagtctgcaaaaactccaagggcgagacggcgtccatcatcgccatcatcaaaacccagggtagcgacaccaagctcgtggcgcagatgcagccctactacgaggccaagggcatgtcgcgcaccgccatagcgggcaagagcgttccgccgatcgtcgcccaaatagccgacggcgaaaacggcggcgtcatgatgaacgagttcccgcccaaattcatggaggtggccagagactctacgggatccgactcgccgatgatgaacgtcaccgagtaccttgagcacctagaggcgatgggaatcaccgaaaaagatttacccacgctgcaaccgctctaccaaaagcgcatttgggacaaggcggcggggagcgccaagaaattggacatagcgcagaccatagaggagctcaagaaagaggacggccgcttccacatggacggcgggagctggacgaacaatatctcttgggtgcagggctaccaaaacgttttggacccgatcaacaaattgagcgccttgttcgcgcaaaaggtgctggggtctaaggtgccggtgacagaccataagtacaggaacgcgctgtactacttgctgctgtcgcagaccagctgcttcaggtattggggacagggggtttggacggattacgctagggagatttgtcggagagggatggagattgtcgataaggatttttga

SEQ ID NO: 70874 - protein, 338 aa, Unknown
  Obtained from environmental sample
  misc_feature (1)..(338): Xaa is any amino acid
MAHTVEWLGCPWGHAVAPSTPVQDYRLHVKAWQSNFAAIFGIDALKRVRGFSPSEMALPNHPDTAYEFVKTLTECGFTWVLVQEHTVERPENGWGPENKYIPHRLVCKNSKGETASIIAIIKTQGSDTKLVAQMQPYYEAKGMSRTAIAGKSVPPIVAQIADGENGGVMMNEFPPKFMEVARDSTGSDSPMMNVTEYLEHLEAMGITEKDLPTLQPLYQKRIWDKAAGSAKKLDIAQTIEELKKEDGRFHMDGGSWTNNISWVQGYQNVLDPINKLSALFAQKVLGSKVPVTDHKYRNALYYLLLSQTSCFRYWGQGVWTDYAREICRRGMEIVDKDF

SEQ ID NO: 70875 - DNA, 657 bp, Unknown
  Obtained from environmental sample
  misc_feature (1)..(657): n is a, c, g, or t
atgaacttgactttaaaagattttgattttctccaccccaccccacgcattatatattttataggttcaatatcaaaagccaatcaaaagccatttaaaccgaaaggaaaacgaaccatgaccatcggcccggaaatctttgacgacggcctccccaacatcacctctttcaaagaggtcgaagaggccataaaatcgcgccctaagaacgtcttcggtaaggatgatttgggaagaatcaacttcggcgggatccgcagcgccacggctgtcgccctgcacatgcaccagccgcttatcccggcgggcggcggcgacctcgggacggccgatatcatcagcaacctcaagtatatgatggataatcaagggatcggcgacaaccacaacgcccccgtgttccattggtgctacaagcgcatcggcgagttcattccgcagcttttgggcgagggcaagcagccgcgcgttatgctcgagtactccggcgagcttctctacgggcttcgcaaaatggggctggacgacgtgttcgacgccctcaagcgcgttacatgccgaccccggaatggcccacacggtggagtggctggggtgcccttgggggcacgccgtggcgccctccacgccggtgcaagactaccgcctccacgttaa

SEQ ID NO: 70876 - protein, 218 aa, Unknown
  Obtained from environmental sample
  misc_feature (1)..(218): Xaa is any amino acid
MNLTLKDFDFLHPTPRIIYFIGSISKANQKPFKPKGKRTMTIGPEIFDDGLPNITSFKEVEEAIKSRPKNVFGKDDLGRINFGGIRSATAVALHMHQPLIPAGGGDLGTADIISNLKYMMDNQGIGDNHNAPVFHWCYKRIGEFIPQLLGEGKQPRVMLEYSGELLYGLRKMGLDDVFDALKRVTCRPRNGPHGGVAGVPLGARRGALHAGARLPPPR

SEQ ID NO: 70877 - DNA, 471 bp, Unknown
  Obtained from environmental sample
  misc_feature (1)..(471): n is a, c, g, or t
atggaatataaaattattgaagtaatggataataataagaaagcagaatatacaaatttggttttaagtaaattgcctgaatggtttggcaatgaagaaagtttacaaaaatatgtaaatactgtacataaatatccattttgggctgctttcgataataatagttgtataggttttttctctgtaaaaatacattataatagaacaggtgatatttatgtttgtggcatagatccaaattatcacagaaaaggtataggaactcttttatataaaacaatagaaaactatttcattaaaaatgcttgtgaatatataattgtaaaaacattaagtgaaataaattcagatgaaaattatgcaaagactaggcatttctataaaaaaatgggatttaatgaattaatcacattaacagaaatgtgggatgaaaataatccttgtctaataatgataaaatgtataaaataa

SEQ ID NO: 70878 - protein, 156 aa, Unknown
  Obtained from environmental sample
  DOMAIN (48)...(133): Acetyltransferase (GNAT) family
  misc_feature (1)..(156): Xaa is any amino acid
MEYKIIEVMDNNKKAEYTNLVLSKLPEWFGNEESLQKYVNTVHKYPFWAAFDNNSCIGFFSVKIHYNRTGDIYVCGIDPNYHRKGIGTLLYKTIENYFIKNACEYIIVKTLSEINSDENYAKTRHFYKKMGFNELITLTEMWDENNPCLIMIKCIK

SEQ ID NO: 70879 - DNA, 753 bp, Unknown
  Obtained from environmental sample
  misc_feature (1)..(753): n is a, c, g, or t
atggaggatattttgaatataaataaattcacagataaggcagagaattatgccaaatatagattggattatgataaggaaatattaaaatgtttttatgattacaattttaataataattcaatagtagctgatattggatctggaactggtaaattaacaaaaatattcttagaaaacggtaatattacatatgcagttgaaccaaatgataatatgaggaatatggctaattcactattaaatgaatataaaaattttatctcaataaatggttcggcagaaaatactacattaaaaaaaggaattattgattttattgttgtagggcaggcatttcattggtttgatgcttcaaaagcattaattgaatttaaacgaatacttaaaaataatggtgtactcgctttaatatggtataatagaaaaataaacaccccattttttatagaatatgataatctattaaaaagatatcctgaatataaaggttatgatcatagaaattatgatgatgaaactattaaaaatattttttcaaaagactataaaataattaatatggaaaataaacgtgaaataacttttaatgaattattaggtggttttttatcaagttcttatactccaaaagaggggacacaagaatatattatttcgaaaaagttattggaaaatatttttgaaaaatataatataaataataaagttttgtttgaatatgaatttaaaatatatattggtagaatataa

SEQ ID NO: 70880 - protein, 250 aa, Unknown
  Obtained from environmental sample
  DOMAIN (44)...(135): Methyltransferase domain
  misc_feature (1)..(250): Xaa is any amino acid
MEDILNINKFTDKAENYAKYRLDYDKEILKCFYDYNFNNNSIVADIGSGTGKLTKIFLENGNITYAVEPNDNMRNMANSLLNEYKNFISINGSAENTTLKKGIIDFIVVGQAFHWFDASKALIEFKRILKNNGVLALIWYNRKINTPFFIEYDNLLKRYPEYKGYDHRNYDDETIKNIFSKDYKIINMENKREITFNELLGGFLSSSYTPKEGTQEYIISKKLLENIFEKYNINNKVLFEYEFKIYIGRI

SEQ ID NO: 70881 - DNA, 918 bp, Unknown
  Obtained from environmental sample
  misc_feature (1)..(918): n is a, c, g, or t
atgattaccctgcacaagcttgaaaaactgccccgacaccaaagactcagaaagctcgcaaaaatctttacaatgacagaaactaggctttttcagttgcaagaaaatggcttatccgcaagcaattcgccggcaatcagtttgacagccgaaaaaagcgcaaatttttttagcagtcaggaaattgacttttttgcctcagccgccaaaatgctggcggaagacggacttttttcggtagacgcaaaaaaagcgattatcgagtcaatggaagtttttaaaacggcggcaaagtctcccgccggcgatttatcggtctttctccgcgccctaaacaccatcaagcatattttgcttgcggaaatcggcaaagatcagtccgattgggattttacaatcagcggcggcaaactcgatcctgaaaaacggcaagttttcaaaggaatgcaagtgtatctggaagacatccgttccccgttcaacgtaggagcaatgttccgcaccgcggaaagtttcggcgtagagaaaataatcctatcccctctatgcgccgaccctcgccacaaacgggcggaacgaaccgctatgggctgtgtagacgtaatcccctgggaacggcaagaactttttcccacccctgaaaacgcgccgctcgacaattctacggagactctaccaatttttgcccttgaaacgggcggcgtccccttagctgaatttccttttccgcgccgtgggattatgataacgggttccgaagaattgggagtaagtccccgcgcgttgtccgccgcggactcatcgctggggagggtatcaattccctgctacggcgcaaaggggtcgttgaatgtgtcggttgcgtttggcattgtggtacaggcttgggggcagaggattttgggggagaaacggtaa

SEQ ID NO: 70882 - protein, 305 aa, Unknown
  Obtained from environmental sample
  DOMAIN (148)...(294): SpoU rRNA Methylase family
  misc_feature (1)..(305): Xaa is any amino acid
MITLHKLEKLPRHQRLRKLAKIFTMTETRLFQLQENGLSASNSPAISLTAEKSANFFSSQEIDFFASAAKMLAEDGLFSVDAKKAIIESMEVFKTAAKSPAGDLSVFLRALNTIKHILLAEIGKDQSDWDFTISGGKLDPEKRQVFKGMQVYLEDIRSPFNVGAMFRTAESFGVEKIILSPLCADPRHKRAERTAMGCVDVIPWERQELFPTPENAPLDNSTETLPIFALETGGVPLAEFPFPRRGIMITGSEELGVSPRALSAADSSLGRVSIPCYGAKGSLNVSVAFGIVVQAWGQRILGEKR

SEQ ID NO: 70883 - DNA, 864 bp, Unknown
  Obtained from environmental sample
  misc_feature (1)..(864): n is a, c, g, or t
atgaattctaacataaaattaaaaacccttacccctttgcgttatccgggcggtaaaacaagagcagttaaaaccatacttccattattaccgaaagaattttcagagtttcgtgagccttttgtcggcggcggttctgttttcttagcggcaaaacaaattagaaatgcaaaatatgtaattaatgatttaaactttgatttatattgtttttggaaatacgcaagagatgataatacaaaactatatgaaacgattaaaaatataaaagacacagaaaatgatggtagggctttatttaattattacagagaaaaagaagaatactcggattttgaacgcgctgtccgtttttttgtcttaaatagaattacattttcaggaacagtagacgcgggaggttattccgagaaatcatttcatgaacgctttacttattcttctgtagaacgaataaaaccgcttgagaagatgctgcaaaaagttacaatatgcaataaaagttatgaagaaatcatttttgcggacggaaaagatgtttttatttttttagacccaccgtattatacgcaggttacttcgcgtctttatggtaaaaatggttatttacatacttcatttgatcatgaaaaatttgcatacgatatgaaaaactgcaaacataattggattatcacattggataacacggataaaataaaagaactatttgattttgcgtatatttacgaatgggaattacaatatggaatgaataattacaaacaagataaagcggaaataggaaaagaattatttatttcaaattataaattacacagaatggaaaaaaaagaactaaattatgtttttgaatttaattaa

SEQ ID NO: 70884 - protein, 287 aa, Unknown
  Obtained from environmental sample
  DOMAIN (15)...(251): D12 class N6 adenine-specific DNA methyltransferase
  misc_feature (1)..(287): Xaa is any amino acid
MNSNIKLKTLTPLRYPGGKTRAVKTILPLLPKEFSEFREPFVGGGSVFLAAKQIRNAKYVINDLNFDLYCFWKYARDDNTKLYETIKNIKDTENDGRALFNYYREKEEYSDFERAVRFFVLNRITFSGTVDAGGYSEKSFHERFTYSSVERIKPLEKMLQKVTICNKSYEEIIFADGKDVFIFLDPPYYTQVTSRLYGKNGYLHTSFDHEKFAYDMKNCKHNWIITLDNTDKIKELFDFAYIYEWELQYGMNNYKQDKAEIGKELFISNYKLHRMEKKELNYVFEFN

SEQ ID NO: 70885 - DNA, 1047 bp, Unknown
  Obtained from environmental sample
  misc_feature (1)..(1047): n is a, c, g, or t
atggttataaatgctaaaattacaggcataaaatatactccattgctttgcgactctcttatttcataccaagacactgaatttgaatcggttttaataaaaaatgtttcttttttgcttaatattaacgaacaatctatagctattagtaaatgggtttctccgaaacgcactcggtcatatcccggcgctcgtgtttataatacattaggttattttggaaaaaaggtaacaataattccttttgtaaaagacgaaggaacggatggcgatagagactttattcaatgggacacaatatctttaatgagtttattaggcgtttatgttatagttgcgttttattcgaaagccgctaaaagcgataattataataataaaataacaaatcaaatatatgattcagattttatccttgctgaattagataaattattatcatatcaatcagatgcgttacattggaatattgaacaaattgataatataacaattcccgcaaacatggcaaaacattcttattgcaggattcaaaatgaattaaatgtaaaaatgcatcctttttccgaaatagataagcgaattaaaataattttacaaggtaaagacgaatttatgaatacatccagaaattctgcaaaaaaagcgcaaattagagaaacgcatactattcagccaaaagaaaaattaacagatggaataaaagcgcaagtaaatattactaattacttaggcggaacatattatttaacttgtgatgaggcgaaaataattaataatgaaattcatattatagaggctaaacatactaaaaatggaaaaataccttctctggatgatataaaagaaggttttataaaaatgatattgttttcaaatctgaaagaagtaacagtaaataatttaaaattaaatccaataccatttttaaaacttacctcaaatagtaaaaatattaatttagaagatgagttaataaaaaaaataatatcggaatcaaaaacaaataattttaaattaattttaccggatgggacagttatatga

SEQ ID NO: 70886 - protein, 348 aa, Unknown
  Obtained from environmental sample
  misc_feature (1)..(348): Xaa is any amino acid
MVINAKITGIKYTPLLCDSLISYQDTEFESVLIKNVSFLLNINEQSIAISKWVSPKRTRSYPGARVYNTLGYFGKKVTIIPFVKDEGTDGDRDFIQWDTISLMSLLGVYVIVAFYSKAAKSDNYNNKITNQIYDSDFILAELDKLLSYQSDALHWNIEQIDNITIPANMAKHSYCRIQNELNVKMHPFSEIDKRIKIILQGKDEFMNTSRNSAKKAQIRETHTIQPKEKLTDGIKAQVNITNYLGGTYYLTCDEAKIINNEIHIIEAKHTKNGKIPSLDDIKEGFIKMILFSNLKEVTVNNLKLNPIPFLKLTSNSKNINLEDELIKKIISESKTNNFKLILPDGTVI

SEQ ID NO: 70887 - DNA, 318 bp, Unknown
  Obtained from environmental sample
  misc_feature (1)..(318): n is a, c, g, or t
gtgaaaaacatagtaattttaggtgatgtaagaaaacaatcacatatgcttgatgataatttttttcagtgtattatcacaagtcctccatattttgggcatagattctatacagaaggcaatcctgatgaaatcggaaaagaatctaatttactggattatattgatcatcttgtttgtacatttaatctattacgtcataaattacatgataacggtttattatggcttaacttgggagacacatatagagaaaaagcgttattaggtgtaccatggcgtgtgctttggccttacaggataatggttggattttaa

SEQ ID NO: 70888 - protein, 105 aa, Unknown
  Obtained from environmental sample
  misc_feature (1)..(105): Xaa is any amino acid
MKNIVILGDVRKQSHMLDDNFFQCIITSPPYFGHRFYTEGNPDEIGKESNLLDYIDHLVCTFNLLRHKLHDNGLLWLNLGDTYREKALLGVPWRVLWPYRIMVGF

SEQ ID NO: 70889 - DNA, 978 bp, Unknown
  Obtained from environmental sample
  misc_feature (1)..(978): n is a, c, g, or t
atgaaagatattgttgtacaccaagtaaatatttctcattatcgacttgtagaattatcaaagcttgccgatcaagctaaacctttctatgattggatagaaagaattgcaaaacaggtaacggggtataataaagggttatcagaaatattatttttaagtagtaaaactcaaattaaaaaaattatctccgcttgttacataaatgaacaagaggaaaagccaatattatttgatggtattggaagagtttatgaacacacaaaagcttgtttttatttctttgcttggatgatcagagatgcgccacagcagagactatctccaatgatttctcgtatgcagaaacttgataatataaaaaaaataacagcggaaaccgatacgcttattgaattgatatatgaatatagatatatcgtaaaaacctttgaatggcaaattatacgggaaataattatagataggcttgaaggatcaaggcgaagtataagtgggcataaaattgaggcgagtgtacggacaagctttgttgcatctgttcagcattatttttcgatttataataactatggaaaatttaagaaaattgaatttgccgataaacaaataaaaatagggagacatacagtagatatatctgctaaactgattcctaaaaataaagaggatgtggagagtattcttattccggtaaaaacaagggaaacggaaggaggtggacattcacatttgtttactcgtgatattatgtccgcaataactgacataaagaataatatgaaaaaccatcaccttgttgtggttataattgctgaaaattggtctccagaggaacttgttactattgatgaaaccatagatattatttttcattttaatatgaatccaaataaatttgtaggttttgatgaaaaatctcagcaaaaattaaataaatttatggagtcattatttaagaaaaggaatagaaagtga

SEQ ID NO: 70890 - protein, 325 aa, Unknown
  Obtained from environmental sample
  misc_feature (1)..(325): Xaa is any amino acid
MKDIVVHQVNISHYRLVELSKLADQAKPFYDWIERIAKQVTGYNKGLSEILFLSSKTQIKKIISACYINEQEEKPILFDGIGRVYEHTKACFYFFAWMIRDAPQQRLSPMISRMQKLDNIKKITAETDTLIELIYEYRYIVKTFEWQIIREIIIDRLEGSRRSISGHKIEASVRTSFVASVQHYFSIYNNYGKFKKIEFADKQIKIGRHTVDISAKLIPKNKEDVESILIPVKTRETEGGGHSHLFTRDIMSAITDIKNNMKNHHLVVVIIAENWSPEELVTIDETIDIIFHFNMNPNKFVGFDEKSQQKLNKFMESLFKKRNRK

SEQ ID NO: 70891 - DNA, 423 bp, Unknown
  Obtained from environmental sample
  misc_feature (1)..(423): n is a, c, g, or t
atgcctgctctgtttaatttcgaggtgcataccccataccgtctttttttctccgacaaagccgaagccatcatccttaccctgatggacggcgaaatcggagtatacgcccatcacgccgcctttaccgcacccgtcgttacgtgcaaacttcaaataaagaccgaaagcggcgaatggcgcaccgccttcatcgctgatggcattcttgaagtgaaagaccacaaaaacgtgctcatggtagacaccgccgaatggcccgaagaaattgacaaagagcgcgcgcttgcggacaagaagcaggccgaggaagatttggagaacgcgcatttgaagtttgaggtggatcgcgtgaaggcgagattgcggcgggcggattacaggttgatggtgtgggggatgaggaaaacgggggaagggtga

SEQ ID NO: 70892 - protein, 140 aa, Unknown
  Obtained from environmental sample
  DOMAIN (4)...(86): ATP synthase, Delta/Epsilon chain, beta-sandwich domain
  misc_feature (1)..(140): Xaa is any amino acid
MPALFNFEVHTPYRLFFSDKAEAIILTLMDGEIGVYAHHAAFTAPVVTCKLQIKTESGEWRTAFIADGILEVKDHKNVLMVDTAEWPEEIDKERALADKKQAEEDLENAHLKFEVDRVKARLRRADYRLMVWGMRKTGEG

SEQ ID NO: 70893 - DNA, 1383 bp, Unknown
  Obtained from environmental sample
  misc_feature (1)..(1383): n is a, c, g, or t
atggcgaatataggtcatgttacgcaaataatcggcccggtcgtggatgttcggtttgagcagggacaggttccggctattctgaccgcgcttaaagtgaaaacggaaagcagaaccgtcactttggaagttcttcagcatacgggcgacaatcaggtgcgctgcgtcgctatgtccgccaccgaaggtttgtcccgcggtcttgaagcggaagatacaggccgtcctatcagcgtgccggttggaatagaagttcttggacgaatgtttagcgtaacaggcgacccgattgacaacaagggcgatttcaaagcttcgcagtacgattcaattcaccgcgccgcccccggttttgaagaacagcgcgctgcggtgcagatgcttgagacgggaataaaagtaatagatttaattgcaccttacgcgaaaggcggaaaggtcggacttttcggcggcgcgggagtagggaaaaccgttatcattatggaactgattcgtaacatagcgacagaacattccggctactcggtatttgccggcgtaggagagcgttcgcgtgaaggcgccgatctctggaaggaaatgaacgagagcggcgttattgataaaacagcgcttgtgttcggacagatgaacgaacctcccggagcgcgcatgagggtcgcgcttgcggggcttaccatggcggaacatttccgcgacaaagaaggtcaggacgttctcctctttattgataacattttccgtttcattcaagccggcgccgaagtttccgctcttcttggacgtattcccagcgcggtaggttatcagccgactttggcaaacgagatgggcagtcttcaggagcgaatcaccagcacatcaaaaggctcgataacaagtattcaagctgtctatgttcccgccgacgacttaaccgatcccgcccccgcgacaacctttgcccaccttgacgcgaccaccactctctcccgcaaaatcgtcgagcttggaatttatccatcagttgatccgctcgcctcaagttcacgtatccttgacgcaacgatagtgggagaagaacactacaacacagcccgcagagtacagcaaatacttcagcgttacaaagaactgcaggacatcatcgcgattctgggcatggacgaactttccgtcgaggacaaactgactgtagcgagagcgcggaaaatacagcgctttttcagccaacccttctttgtgggcgaaaaattcaccggcattccggggcgttatgtgccggtgaaggaaaccgtacgcggcttcaagatgattcttgacggcgagtgcgacagcatagccgaacaggaattcttcatggccggcagcatagacgacgttcttgaaagggcgaaataa

SEQ ID NO: 70894 - protein, 460 aa, Unknown
  Obtained from environmental sample
  DOMAIN (7)...(74): ATP synthase alpha/beta family, beta-barrel domain
  misc_feature (1)..(460): Xaa is any amino acid
MANIGHVTQIIGPVVDVRFEQGQVPAILTALKVKTESRTVTLEVLQHTGDNQVRCVAMSATEGLSRGLEAEDTGRPISVPVGIEVLGRMFSVTGDPIDNKGDFKASQYDSIHRAAPGFEEQRAAVQMLETGIKVIDLIAPYAKGGKVGLFGGAGVGKTVIIMELIRNIATEHSGYSVFAGVGERSREGADLWKEMNESGVIDKTALVFGQMNEPPGARMRVALAGLTMAEHFRDKEGQDVLLFIDNIFRFIQAGAEVSALLGRIPSAVGYQPTLANEMGSLQERITSTSKGSITSIQAVYVPADDLTDPAPATTFAHLDATTTLSRKIVELGIYPSVDPLASSSRILDATIVGEEHYNTARRVQQILQRYKELQDIIAILGMDELSVEDKLTVARARKIQRFFSQPFFVGEKFTGIPGRYVPVKETVRGFKMILDGECDSIAEQEFFMAGSIDDVLERAK

SEQ ID NO: 70895 - DNA, 348 bp, Unknown
  Obtained from environmental sample
  misc_feature (1)..(348): n is a, c, g, or t
ttgaatgaaacggaaaatgttatcaataaagaggagaacgtcctgaccttctttgtcgcggaaatgttccgccatggtaagccccgcaagcgcgaccctcatgcgcgctccgggaggttcgttcatctgtccgaacacaagcgctgttttatcaataacgccgctctcgttcatttccttccagagatcggcgccttcacgcgaacgctctcctacgccggcaaataccgagtagccggaatgttctgtcgctatgttacgaatcagttccataatgataacggttttccctactcccgcgccgccgaaaagtccgacctttccgcctttcgcgtaaggtgcaattaa

SEQ ID NO: 70896 - protein, 115 aa, Unknown
  Obtained from environmental sample
  misc_feature (1)..(115): Xaa is any amino acid
MNETENVINKEENVLTFFVAEMFRHGKPRKRDPHARSGRFVHLSEHKRCFINNAALVHFLPEIGAFTRTLSYAGKYRVAGMFCRYVTNQFHNDNGFPYSRAAEKSDLSAFRVRCN

SEQ ID NO: 70897 - DNA, 888 bp, Unknown
  Obtained from environmental sample
  misc_feature (1)..(888): n is a, c, g, or t
atgcggaacttacgcgacgtgcgcctgcgtatgcgggcggttgaacagacatggcaggtaacaaaagcgatgaaactcatctcgaccgccaaaatgcgcaagagccgaagaatgttaagcgacgccgaaccttacttcagaagaattacaaaatcaatgtttgatattctttccggcacaggccatttacgaagcccctttgtccgcaagcctgatgaatcatcttcccgttccgcgataatagtggtaaccagcgacaaggggcttgccggcggctataacgcgaatgttttcagaacggtaaacgatctctgcgcaagggtgcaaaagccgatgctgatactgataggcacgattggctaccgctattttgtccattcgcctcatgttattcttgaaaattttacttttcgttcgcaaatacccacgctggatcacgccgaggaaattgccgagtacatgatttcgcagtacatgtgggggctgtttgacgaaatacatattgtgtacacccacatgttcaacgctgttaaacttctgcccacagaacggcagattttaccgcttgacacaaaaacaattcaagatgagcttacggaaatcggcggcgagaaaagggtggaattgcagtttgagtatttgccttcggcgaaggaagttttcgacatactggttcctcagtatatgaagggcgtaatttacggggcgatggttgaagcctacgcgagcgagcaaaacgcccgcatgaccgccatggacgaagcctcaaaaaacgccgaggatatgcttgcctccctgcgtatcaattacaacagagcgaggcaggcgggcattactcaggaaatgacggaaataacaggcggcgcgacagcgttagccgatcgatag

SEQ ID NO: 70898 - protein, 295 aa, Unknown
  Obtained from environmental sample
  DOMAIN (3)...(292): ATP synthase
  misc_feature (1)..(295): Xaa is any amino acid
MRNLRDVRLRMRAVEQTWQVTKAMKLISTAKMRKSRRMLSDAEPYFRRITKSMFDILSGTGHLRSPFVRKPDESSSRSAIIVVTSDKGLAGGYNANVFRTVNDLCARVQKPMLILIGTIGYRYFVHSPHVILENFTFRSQIPTLDHAEEIAEYMISQYMWGLFDEIHIVYTHMFNAVKLLPTERQILPLDTKTIQDELTEIGGEKRVELQFEYLPSAKEVFDILVPQYMKGVIYGAMVEAYASEQNARMTAMDEASKNAEDMLASLRINYNRARQAGITQEMTEITGGATALADR

SEQ ID NO: 70899 - DNA, 642 bp, Unknown
  Obtained from environmental sample
  misc_feature (1)..(642): n is a, c, g, or t
gtgttctatctgcactcgcggcttttggaacgcgccgtaaaactctcccccgaaaaaggcggcggctccatcacggcccttcccatagttgaaactcaggcgggagacatttcgtcttacatacccactaacataatttcaattacggacggtcagatcttccttgattcagaattgttcaattcaggcttccgtcccgctatcgacgttggtctttcggtaagccgcgtcggaggctccgcccagacaaaagctatacgcaagatttccggccgcataaggctggacctcgcccagtaccgcgagatggcggcgttcgcccagttcggcagcgacttggacaaggccactcaggacaaactcgcgcagggcgagcggctgatggaagcgctcaaacagccgcagttcgcgccgttcgccatggaagagcaggcggcggttttgttccttgcagtaaacggctaccttatggatgttaagacggaagatatttcattgtttgtcaaaaattatctttcgtatttgaaaacgcaaaaggcggatttattgatcagcatcgcggagaccggcgttatctctcccgaacaggagagcgatttacgcgccgcggtggaaagttataagaagagcaagcaggtgtag

SEQ ID NO: 70900 - protein, 213 aa, Unknown
  Obtained from environmental sample
  DOMAIN (1)...(75): ATP synthase alpha/beta family, nucleotide-binding domain
  misc_feature (1)..(213): Xaa is any amino acid
MFYLHSRLLERAVKLSPEKGGGSITALPIVETQAGDISSYIPTNIISITDGQIFLDSELFNSGFRPAIDVGLSVSRVGGSAQTKAIRKISGRIRLDLAQYREMAAFAQFGSDLDKATQDKLAQGERLMEALKQPQFAPFAMEEQAAVLFLAVNGYLMDVKTEDISLFVKNYLSYLKTQKADLLISIAETGVISPEQESDLRAAVESYKKSKQV

SEQ ID NO: 70901 - DNA, 333 bp, Unknown
  Obtained from environmental sample
  misc_feature (1)..(333): n is a, c, g, or t
gtgggacgcggcgaagcggcggaggcggttttgcgttcctcctcgcccgatttcggtctgtcgggggccttcccgtgggtagacaaggttatcgcgctgggtcggggcggcttgaccgatatggagaaggggatagacgacctgcgctgggaggtgctgaacgatatgacaatgttcataccgttcttccgcgtggagaccgtcgccgcgttcgtgcagaagctgttgattgtggagaggtggataaaattggagccggcggcgggtaaggcccggttggataaattgattgacgagttgatgacgagctttgttatgcctgaaggtttttga

SEQ ID NO: 70902 - protein, 110 aa, Unknown
  Obtained from environmental sample
  misc_feature (1)..(110): Xaa is any amino acid
MGRGEAAEAVLRSSSPDFGLSGAFPWVDKVIALGRGGLTDMEKGIDDLRWEVLNDMTMFIPFFRVETVAAFVQKLLIVERWIKLEPAAGKARLDKLIDELMTSFVMPEGF

SEQ ID NO: 70903 - DNA, 888 bp, Unknown
  Obtained from environmental sample
  misc_feature (1)..(888): n is a, c, g, or t
atgagcaccaagggaaaagtgaccggtatagttgcgaacttggtcacgattgaagtcgacggcccggtagcccaaaacgagatctgctacatcgatctcaaaggcaccaagctgatggccgaggtgatcaagatcggcggcaagaacgcatacgtgcaggtgttcgaaagtacgcgtgggctctacgtcgggtgtacggcggagtttgccgggcacatgcttgaggtgacgctcggccccggtatgcttaaaaggaactacgacggtctgcaaaacgacctcgacgcgatggagggggtcttcctcaagcgcggcgactataccaagccgctcgacgaggccaagaagtggcacttcacgcccctcgctaaggccggcgacaccgtccgcgcatccgattggctcggcaatgtgaaggaggggtggatagaccacaagatcatggtgccgttcaacatgagcggtacgtacacggtcaagagcgtcgtctccgagggcgattacaatattatggagaccatagcggttctctccgacgggtctaaagattataacgtgaccatggctatgaagtggccggtgaaggtggaggtcggcggttacaagaacaagccgcgcccgttcaaggtcatggcgacgggcgttcgtacgatagacacgctcaacccgataaccgaaggcgggacggggttcatcccggggcctttcggttgcggcaagacggttatgcagcacgccctttccaaatacgccgaagccgacctgattatagtcgtggcttgcggcgagcgcgccaacgaggttgtgggaaatcttcaccgagttcccggaactcgacgacccgcgcacgggccgcaaactcatcgagcgtatgattattatatgtaa

SEQ ID NO: 70904 - protein, 295 aa, Unknown
  Obtained from environmental sample
  DOMAIN (7)...(71): ATP synthase alpha/beta family, beta-barrel domain
  misc_feature (1)..(295): Xaa is any amino acid
MSTKGKVTGIVANLVTIEVDGPVAQNEICYIDLKGTKLMAEVIKIGGKNAYVQVFESTRGLYVGCTAEFAGHMLEVTLGPGMLKRNYDGLQNDLDAMEGVFLKRGDYTKPLDEAKKWHFTPLAKAGDTVRASDWLGNVKEGWIDHKIMVPFNMSGTYTVKSVVSEGDYNIMETIAVLSDGSKDYNVTMAMKWPVKVEVGGYKNKPRPFKVMATGVRTIDTLNPITEGGTGFIPGPFGCGKTVMQHALSKYAEADLIIVVACGERANEVVGNLHRVPGTRRPAHGPQTHRAYDYYM

SEQ ID NO: 70905 - DNA, 978 bp, Unknown
  Obtained from environmental sample
  misc_feature (1)..(978): n is a, c, g, or t
ttgtgggaaatcttcaccgagttcccggaactcgacgacccgcgcacgggccgcaaactcatcgagcgtatgattattatatgtaatacatccaacatgcccgtcgcggcccgcgaggccagcgtttacacgggtatgaccatcgccgaatactaccgtatgatgggcctcaaggttctgcttttggccgactcgacctcccgctgggcgcaggcgcttcgcgagatgtccaaccgtatggaagagctgcccggccccgacgcgttccctatggacttgccggcggttatctcgcagttctactcccgcgccggattcgtctacctgaacaacggcaatacgggttccatcaccttcatagggacggtcagccccgccggcggtaacttgaaggagccggtcaccgagtccacgaagaaggcggcgcgctgcttctacgcgctcggccagggacgcgccgactctaagcgctatccggcggtcgatcctattgacagctattcgaagtaccttgagtacgacgaggtgatcgagtaccttgacaaggaaatagagccgggttgggtaaaaaaggtcgaagttctcaagaatacgctgttgcgcggcaaggaagcccgcgaccagatcaacatcttgggcgacgacggcgtgccgctcgactaccatattatcttcaacaagtctgaagtcatcgacttcgtgattttgcagcaggacgctttcgacaaaatcgactcgtgttcgccgctcaaccgccagcagtatatggtcaacaaggtgctgggtatcgttgacgcgaagtttaacttcgagggttttgaggagataggcaattactttaagaaggcgattaacttgatgcgccagatgaactatctggagtttcagagcgataaatttaacggactcgaaaaagagctcgacagcctgttggctgagcgggtatcggaacccaaggccggcgcggcgcacgcgtag

SEQ ID NO: 70906 - protein, 325 aa, Unknown
  Obtained from environmental sample
  DOMAIN (6)...(168): ATP synthase alpha/beta family, nucleotide-binding domain
  misc_feature (1)..(325): Xaa is any amino acid
MWEIFTEFPELDDPRTGRKLIERMIIICNTSNMPVAAREASVYTGMTIAEYYRMMGLKVLLLADSTSRWAQALREMSNRMEELPGPDAFPMDLPAVISQFYSRAGFVYLNNGNTGSITFIGTVSPAGGNLKEPVTESTKKAARCFYALGQGRADSKRYPAVDPIDSYSKYLEYDEVIEYLDKEIEPGWVKKVEVLKNTLLRGKEARDQINILGDDGVPLDYHIIFNKSEVIDFVILQQDAFDKIDSCSPLNRQQYMVNKVLGIVDAKFNFEGFEEIGNYFKKAINLMRQMNYLEFQSDKFNGLEKELDSLLAERVSEPKAGAAHA

SEQ ID NO: 70907 - DNA, 1326 bp, Unknown
  Obtained from environmental sample
  misc_feature (1)..(1326): n is a, c, g, or t
atgaatacaaaagcgtttcagaagatttacactcacatcgaaaacgtgaccaaggccacgtgtactgtgcacgccgacggtgtgaccaacgatgaaatggcaatggtggccgggcgtccggcgcaggtcgtgaagattgtaggcgaccgcgtgacgctccagatattccccggcacgcagggcatagccacgaacgccgaggtggtgttcctcggcaggccgcccgtcatcaaggtgtcggacgagctcaaggggcgcttcttcaacccctacggccagcctatcgacggcggcccggaggtcgaaggcaaggagatagagatcggcggcccgtcggtgaaccccgtgcggcgcaaacagccgtccgagcttatcgccaccggtatcgccggcatcgacctgaacaatacgctcgttacaggccagaagatcccgttcttcgccgactccgaccagccgtacaacgcggtcatggccgacgtggcgctaagggcgaaagccgacctcatcattttgggcggcatgggcatgtccaacgacgactacctgtactataggaaactgttcgaaaacgccggcgcgctcgaccgcatcaccgcgttcgtcaacacgaccgacaacccgccggtggagcgtctgctcgttcccgatatgtgcctgaccacggcggagcacttcgccgtagagcaaaagatgaaggtgctggtgctgctcaccgacatgacgctgtacgccgacgcgctctccatcgtgtctaaccgtatggaccagatcccctccaaagacagtatgcccggttcgctgtacagcgacttggcgaaaatatacgaaaaggccgcccagttcccggacggcggctcgatcacgatcatcgcggtcacgaccctctccggcggcgacatcacgcacgccatccccgacaatacggggtatatcaccgaggggcagttgtatttgcgccgcgataccgacgtgtcgaaggtcatcatcgacccgttccgcagcttgtcgcgtctgaaacagctcgttatcggcaagaagacgagaaaggatcacccgcaggttatgaactgcgccatccgactgttcgccgacgccgcgagcgctaagacgaagttggaaaacgggttcgatttgacggattatgatacgcggtcgctgcaattcgcgaaagagtattcgcgtgaactgctggctatcgacatcaacattgaaatcgagcacatgcttgatacggcttggaagctgttcggcaagtactttacgcaggacgaggtgggtatcaagaaggagttgatggatcagttctggaaggcgtcggcgtaa

SEQ ID NO: 70908 - protein, 441 aa, Unknown; identical to SEQ ID NO: 53770
  Obtained from environmental sample
  DOMAIN (127)...(337): ATP synthase alpha/beta family, nucleotide-binding domain
  misc_feature (1)..(441): Xaa is any amino acid

SEQ ID NO: 70909 - DNA, 738 bp, Unknown
  Obtained from environmental sample
  misc_feature (1)..(738): n is a, c, g, or t
atggcgaatatgcggcggcaggccgagaggttcggaacgcggttggtcacggacgacgtcgccgaggtaaacctgtcgcgacgccctttcgccgtttccacggctagcggcgaaaagtttaccgcggacgcgttgataatagcgacgggcgccgcggcgagcaggctcccgcttgattccgaaaaaagactgtggggccgcggcgtctccgcctgcgccgtatgcgacggcgcgttgcccgtctttcgcaacaaagagctggccgttatcggcggcggcgacaccgccgtcgaggaggccgtccacctaacgcagttcgcctcgaaagtctaccttatacaccgcagaaacgaactgagagccggcgctataatgcgggagcgggcggcgtcccacccgaaaatcgaaatcctgtggaacaaagtagttgacgaattcctaggcgagcaaaggctgagcggcctgaaactgcgtgacacggttacaagcgcgacctccgaactaaccgtagccggcgcgttcgaggccatagggcacaagccgaacgtcggtttcctgaacggtcaattaaagttagacgggcaagactacatcgtcgtgacgcccggcacgtcgaaaacgtcaatcgacggcgtcttcgccgccggcgacgtatgcgacccccgctaccgacaggcgataacggcggcggcgagcgggtgcagggcggcgctggacgttcagaggtggctgcagtaa

SEQ ID NO: 70910 - protein, 245 aa, Unknown
  Obtained from environmental sample
  DOMAIN (1)...(223): Pyridine nucleotide-disulphide oxidoreductase
  misc_feature (1)..(245): Xaa is any amino acid
MANMRRQAERFGTRLVTDDVAEVNLSRRPFAVSTASGEKFTADALIIATGAAASRLPLDSEKRLWGRGVSACAVCDGALPVFRNKELAVIGGGDTAVEEAVHLTQFASKVYLIHRRNELRAGAIMRERAASHPKIEILWNKVVDEFLGEQRLSGLKLRDTVTSATSELTVAGAFEAIGHKPNVGFLNGQLKLDGQDYIVVTPGTSKTSIDGVFAAGDVCDPRYRQAITAAASGCRAALDVQRWLQ

SEQ ID NO: 70911 - DNA, 1362 bp, Unknown
  Obtained from environmental sample
  misc_feature (1)..(1362): n is a, c, g, or t
atgaaaaaaacaaatgacgttctggaaggcgtcctggacgaaattgaaaacaacctcaaagacgatatcaatgccgatattctggctgatgaattttcaatgtcttcaatccatttacagcggctttttaagcaaatgtttaaaaaaccgattggaacatatattcgctcccgaaaattatcggcaagcatatgggatttattgtacagcgggttaaatgttcaggatattgctttggattacggttttagttatgaacaggcctatatattaagctttaagcgtgaatttggctttaccccgggcgatttgcgcaaaagcaggtattttgtaagaaccaccccgcctctaaagcctttttgccaaaagccggtatataaaaacgattttcttgtcggcaacatcattaacgaaagatatatggacggcgcttattttgatgttataaagaataattttaatgttgtcacccccgaaaatgacttaaagcctgtttcgataacatcaaaccggggcggctcgtacaactggtcatttgcggacaaaatcgtgaaccggtctctggaaaacggcatgcttgtgcatggtcatgttttaatttggcatgattggacgcccgaatggatgactaaaggaacaagggcggaagtggaagacaaccttaaaaattatattaccgatgtattaaatcattatcgcggcaagattcattcatgggatgtggtgaacgaggcggtagggaattatctttccgagcaagatacaagagactggaaaaagtgcctgcgtactgataacccatggtttcgcgttttaggcgcaggctatattgaaaccgccttccgcgcggcgagggaagccgactcaggccttaccctttattacaatgataattggctggaatggccgactaaaaccgaagcggtatggaaaatgatcaatgacataaataaccggtataaaaaagaaacaggacagaatcgtaaccttattgaaggcttagggatacaatcccattacgatgcaaaatgcttcgatgaaaacagggtgcgctcgtctatggaaaaacttaaaaccttaaacattgaattatctataagcgaactggacgtaaatttcgccgattataaagaaggcagcggaaacgacattatcatgtctgaatatgatgccgcggtacaggcaaggatatatgcccagcttttcaaaatataccgggaatattccgcgtatatatcacgggtaaccatgtggggcatagacgaccgtaacagctggatatccgcgggaaccccttgcctcttcgaccgatatttaaatcccaaaaaagcatttaacgccgtatttaattctgaaaattga

SEQ ID NO: 70912 - protein, 453 aa, Unknown
  Obtained from environmental sample
  DOMAIN (123)...(452): Glycosyl hydrolase family 10
  misc_feature (1)..(453): Xaa is any amino acid
MKKTNDVLEGVLDEIENNLKDDINADILADEFSMSSIHLQRLFKQMFKKPIGTYIRSRKLSASIWDLLYSGLNVQDIALDYGFSYEQAYILSFKREFGFTPGDLRKSRYFVRTTPPLKPFCQKPVYKNDFLVGNIINERYMDGAYFDVIKNNFNVVTPENDLKPVSITSNRGGSYNWSFADKIVNRSLENGMLVHGHVLIWHDWTPEWMTKGTRAEVEDNLKNYITDVLNHYRGKIHSWDVVNEAVGNYLSEQDTRDWKKCLRTDNPWFRVLGAGYIETAFRAAREADSGLTLYYNDNWLEWPTKTEAVWKMINDINNRYKKETGQNRNLIEGLGIQSHYDAKCFDENRVRSSMEKLKTLNIELSISELDVNFADYKEGSGNDIIMSEYDAAVQARIYAQLFKIYREYSAYISRVTMWGIDDRNSWISAGTPCLFDRYLNPKKAFNAVFNSEN

SEQ ID NO: 70913 - DNA, 813 bp, Unknown
  Obtained from environmental sample
  misc_feature (1)..(813): n is a, c, g, or t
atgagaaaacattcagtaacaaagagaatcataccggtattgatttgctgctttttatcggcatgtgctttatcaaaatcgaatgagggacaggaaatgaatcaagaaccgaagaaacaagaaccaaccgggataatatttaacggcaacagcaacggaagcaaacctttggaaggcactccttacagttatgaaatatggagcgccagcgggaataataaccggattatttggcgcgggccggatacgggcggcggcgcggcgttcatggccgaatggaataacgcggatacctttctggggcgcgtgggactttattggaatcgcggaaaaccatatacggaatacaaaaatgtattttgtgattttgagtttactaaatccgcaaatggcactgccggaggtcattcatatcttggaatttacggctggtctaaaaaccctatgatagaatggtacattgtggatgattggtatggaaacggaataattcagcctcataatataggcggaggagcggtaaaaaaaggcgagttttcagcagatggcgcggtctattatatttatctggcgacaaggccggcgggttccggcaatattgaaggcagcaaaaatccttttcctcaatatttcagcatacgacaggaacgccgccaaaaaggaacaatttccataacggaacattttaaggcatgggaaaaaatcggcttaaaattgggaacaaacatgtatgaggcaaaattccttgttgaggcgggcggcggaacaggatggttcgacgcctcgtatatatcgttttatcaaaaagaataa

SEQ ID NO: 70914 - protein, 270 aa, Unknown
  Obtained from environmental sample
  SIGNAL (1)...(25)
  DOMAIN (59)...(263): Glycosyl hydrolases family 11
  misc_feature (1)..(270): Xaa is any amino acid
MRKHSVTKRIIPVLICCFLSACALSKSNEGQEMNQEPKKQEPTGIIFNGNSNGSKPLEGTPYSYEIWSASGNNNRIIWRGPDTGGGAAFMAEWNNADTFLGRVGLYWNRGKPYTEYKNVFCDFEFTKSANGTAGGHSYLGIYGWSKNPMIEWYIVDDWYGNGIIQPHNIGGGAVKKGEFSADGAVYYIYLATRPAGSGNIEGSKNPFPQYFSIRQERRQKGTISITEHFKAWEKIGLKLGTNMYEAKFLVEAGGGTGWFDASYISFYQKE

SEQ ID NO: 70915 - DNA, 1395 bp, Unknown
  Obtained from environmental sample
  misc_feature (1)..(1395): n is a, c, g, or t
atgaaaaacaaattaatcgcttgtattggtcttgtttttatgttcttaagcgttatttctgtttttgcgcaggaagttccgaaagccccggctgcaatagaaaaaacgctgaagggtatgaacatcgttattggtttatggtggaggtattacgataccggtcaaaatccgccgacgaatcagtgggtgggaagtgattatcaggaaaaacagcttgaataccggaaaaagctgctgcaaaaatacaaatttaccatgacggaaaagcaaattgccccatgggaacagatggcgcaaattacggctacttcgattatggcgggaaaacccgccgcttcaatttttgtattgcagccggattgggcgctcgccctgtaccgtcagaaccttctgtatccggtaagttcaagcagagctgttaactggaacgcaaccgtcccggttgaatggaataaggccgttgccgaggcttttacgtttaagaacgggcgcagcaatgatgcttacgcttttgccgaaggttatggcagcagcgagcacgccgcctgcgtgttttttaacaaacgattgttcagggaggctggactggatcctaatttgccatacgatcttcaaaaagcgggaacatggacatgggataaatttcttgaaatatgtaaaaaacttacaagggatataaacaacgacggtattacagatatatacgctatgccgaatgatctttctacggaaattctggacgccttgatctcaagtaacggcgcaatgtatgtggacaaagacaagaacggaatgcttgttaacgcttcgggaaggccggaattcattgaagctatgcggttttacgtaaccctgagagacgcaaaagttatgaaggaaaaaccgccgggagataatactccgtggaactggtatgtttccgagttttacgacgggaaatgcgctatgcgtattgcccagcagtttcaggcgacaaatgaccttcgtcatatgaaagacgattggggcatggttcttcctccgaaaggaccaagggtaaagaactatgtcgttttcaacgatgataacgtttgcgtaatccccgccaaagtatatacaaaagaacaggttgacgcgattctttgggcttatcaggcctggtcggctcctatggaaggcaccaactggaaagtgcaaaattatcctaacttcagggatagaagggccgttgacgaaacgctcgctatgatccgcgaccataaattatggctgtggagataccaccttcacgttcccggtcttcagcgcggcggcatcgcctacgaaatgcggtatccggacaatcaaccggctgagttaattgaggcggtttcactagtttggaacgccttaattgatgacgctaacggcttgtaa

SEQ ID NO: 70916 - protein, 464 aa, Unknown
  Obtained from environmental sample
  SIGNAL (1)...(23)
  misc_feature (1)..(464): Xaa is any amino acid
MKNKLIACIGLVFMFLSVISVFAQEVPKAPAAIEKTLKGMNIVIGLWWRYYDTGQNPPTNQWVGSDYQEKQLEYRKKLLQKYKFTMTEKQIAPWEQMAQITATSIMAGKPAASIFVLQPDWALALYRQNLLYPVSSSRAVNWNATVPVEWNKAVAEAFTFKNGRSNDAYAFAEGYGSSEHAACVFFNKRLFREAGLDPNLPYDLQKAGTWTWDKFLEICKKLTRDINNDGITDIYAMPNDLSTEILDALISSNGAMYVDKDKNGMLVNASGRPEFIEAMRFYVTLRDAKVMKEKPPGDNTPWNWYVSEFYDGKCAMRIAQQFQATNDLRHMKDDWGMVLPPKGPRVKNYVVFNDDNVCVIPAKVYTKEQVDAILWAYQAWSAPMEGTNWKVQNYPNFRDRRAVDETLAMIRDHKLWLWRYHLHVPGLQRGGIAYEMRYPDNQPAELIEAVSLVWNALIDDANGL

SEQ ID NO: 70917 - DNA, 555 bp, Unknown
  Obtained from environmental sample
  misc_feature (1)..(555): n is a, c, g, or t
atgtctcaggaagtaataacctttcctctgctgccagggcttgacggtaaaaataaaatgagcaaatccctggataactacataggcatagacgaacctgcggaaattattttcgaaaaatgcatgaagatccccgacaatattctgcaggtttattttatgttaaccacagacataccggaagacgattacataaaaaatattaaaaatgatatatggcaggctcatttggtttatgcgcgggagatagtaaagatgtatcacggggaaatttatgtttctccggcggaagaacgttaccggacagtggcaaataaaaaggcgcctgattcaacaagagtctatacaatttacaatgaagagcaaattacccggttacttattcttacggaactggccgggacaaattcagagtctcgcagattgataaatgagggaggagtaaaaattgacggcataacaattaatgattccgctttaatcgtacaaaaagattgtattataagccggggaaagaataaatttataaaaattcattttgacaaagaaaaataa

SEQ ID NO: 70918 - protein, 184 aa, Unknown
  Obtained from environmental sample
  misc_feature (1)..(184): Xaa is any amino acid
MSQEVITFPLLPGLDGKNKMSKSLDNYIGIDEPAEIIFEKCMKIPDNILQVYFMLTTDIPEDDYIKNIKNDIWQAHLVYAREIVKMYHGEIYVSPAEERYRTVANKKAPDSTRVYTIYNEEQITRLLILTELAGTNSESRRLINEGGVKIDGITINDSALIVQKDCIISRGKNKFIKIHFDKEK

SEQ ID NO: 70919 - DNA, 1173 bp, Unknown
  Obtained from environmental sample
  misc_feature (1)..(1173): n is a, c, g, or t
gtgaatttggatttcgcgccggataaggtgaagggatttctgacacgcgatcagcacaaactttacgaactggtatggaagaggtttttggcgtcgcaaatggaaaacgcgctcttcgactccacccgcgttgatattgacggcggcggctgcgtttttagggcgagcggttctatcatgaagttcgacgggttccttgccctctacgacgagaccgtcgaggacgccgtcgatacggtggagggtcagaacgatacgctgccggagcttgaggtcggcgtcgcggtggaaaagaaggagcttgttgacaaacagcatttcacgcaaccgccgccgcgttacacggaggcgtcgctggtgcgggagcttgaggacaagggcatcggccgtccgagcacctacgctcagatcatcgacacgctaaagcgccgcaagtacacgacggtggaggcgcgtaggttctcgccaaccgacgtcggctacatggtgaagaacactctggtcaaccaattcccggacgtattcgacgtgngattcacggcggagatggagtcgcgtttggatgagatagagtccggcgacgccgattggataggcgtgctcaagaccttctacacgcccttcgccgaccgtctcgacgtggtgcgcggcaacatcaaagatctgcgcgcgcagaatcaggaggttaccgacagaaagtgtcccgtgtgtcaagagaatttccttgtcgtcaagtggagcaagaacggcagattcttggcctgtcaagggttccccacgtgcaagtacacggagccgcttgagaagagcgccgccgtggagacggacgagaaatgcgacaagtgcggcgccccgatggtcgttttgacaatgaacaacagcaaattcttgggctgttcgcgttttccggattgcaagaacaccaaatcgctctccataggcgtgccctgcccgcagaagggttgcgacggtagcgtggtggagcgaaaaacacgcaggggcaaggtattctacgggtgcaataggtatcccaagtgcgatttcgccagttgggacaggcccatagacaggaagtgcgagaagtgcgggaatccgtatttgatacagaaggactacaaacgcaaaggcgcgacgatacggtgtccggcttgcaagacggaagtggaagggtaa

SEQ ID NO: 70920 - protein, 390 aa, Unknown
  Obtained from environmental sample
  DOMAIN (1)...(190): DNA topoisomerase
  misc_feature (1)..(390): Xaa is any amino acid
MNLDFAPDKVKGFLTRDQHKLYELVWKRFLASQMENALFDSTRVDIDGGGCVFRASGSIMKFDGFLALYDETVEDAVDTVEGQNDTLPELEVGVAVEKKELVDKQHFTQPPPRYTEASLVRELEDKGIGRPSTYAQIIDTLKRRKYTTVEARRFSPTDVGYMVKNTLVNQFPDVFDVXFTAEMESRLDEIESGDADWIGVLKTFYTPFADRLDVVRGNIKDLRAQNQEVTDRKCPVCQENFLVVKWSKNGRFLACQGFPTCKYTEPLEKSAAVETDEKCDKCGAPMVVLTMNNSKFLGCSRFPDCKNTKSLSIGVPCPQKGCDGSVVERKTRRGKVFYGCNRYPKCDFASWDRPIDRKCEKCGNPYLIQKDYKRKGATIRCPACKTEVEG

SEQ ID NO: 70921 - DNA, 348 bp, Unknown
  Obtained from environmental sample
  misc_feature (1)..(348): n is a, c, g, or t
atgaacacgcgcgagaaggggaaaataggggaggaccaagccgccgagtaccttttgagtcgcgggtacgccattcaggcgcggaactttcggacgcggtacggagagatagacatcgtggccgtcgcgcccgacgggacgattgtctttgtggaggtaaagtcggcgacgacaaagagttgcggcaacccgctctttaaggtcacgccggccaagcagaggacgattgccggaatggcgaaacggtacatgtacgatcgcaaactcatcgggcgggcgtgtcgtatggacgtgatagggatctatcgcggaaagatagatcatattccaaacgcatattgggtgtga

SEQ ID NO: 70922 - protein, 115 aa, Unknown
  Obtained from environmental sample
  DOMAIN (9)...(102): Uncharacterised protein family UPF0102
  misc_feature (1)..(115): Xaa is any amino acid
MNTREKGKIGEDQAAEYLLSRGYAIQARNFRTRYGEIDIVAVAPDGTIVFVEVKSATTKSCGNPLFKVTPAKQRTIAGMAKRYMYDRKLIGRACRMDVIGIYRGKIDHIPNAYWV

SEQ ID NO: 70923 - DNA, 1281 bp, Unknown
  Obtained from environmental sample
  misc_feature (1)..(1281): n is a, c, g, or t
atggactttataacagaattacgttggcgtggcatgatccacgatgttacccccggccttgaggaaaagcttgcggccggggcggtttccgggtacatcgggtttgaccctacgggcaagtcgctccacatagggcacatgatccccattatgctgctcgtgcactttcagcgttgcgggcacaagcccatagcgcttgtaggcggcgccacggggatggtcggcgacccgtccggcaagtcggtcgagcggaatatgctctccgccgaggccgtggcggcaaacgccgaatttatccgcaagcagctgcagaagtttcttgtcttcggcgatagcgccggcggcgcggagatggcgaacaattacgagtggactaaggacgtcaccatactcgaattccttagggaggtcgggaaacacatcacagtcaactacatggtggccaaggactccgtaaaaggacgctgggagcagggcatctccttcacggagttcagctaccagctgctacaggcctacgacttctaccgtttgcataccgataggaactgctcgttgcagttgggcggctccgaccagtgggggaacatcaccaccggaacggagttcatacggcgcaagtcgggaggggaggcgtttgcgcttacctgtccgctgctcacacgctccgatgggaagaaattcggaaagtcggagggcggggagagcgtatggctcgaccccgcgatgacgagcccgtacaagttttaccaatactggctgaattgcaccgacgacgacgcccctaagctgctccgattctttacgttgatgagtcaggccgagatagcggcgcttgaaacgcggcacgccgccgctccgcacgagaggatcatgcagagggcgctggcggcggacgttacgacgcgtgtccactcggaggaggagtgcaagaaggcgattgacgcgtcggaaattctcttcggcaaaggatcgacggaggcgctgacggcgctctcggaggacgacttcctctccgtattcgacggcgtcccgcagtgccgcgttccgcgctccgagattgacgccgggatgcaggtcatagacttggtgacggataagagcaagttcttcccctctagaggagaggcgcggcggatgatttcgcagggcggtctgtcggtcaacaagataaagatagaagatccggcgtttacggtgggggcgcagatgttgctcaatgggaaatatctgctgttgcagaaagggaagaagagttattttgtcgttggtatcaattag

SEQ ID NO: 70924 - protein, 426 aa, Unknown
  Obtained from environmental sample
  DOMAIN (358)...(406): S4 domain
  misc_feature (1)..(426): Xaa is any amino acid
MDFITELRWRGMIHDVTPGLEEKLAAGAVSGYIGFDPTGKSLHIGHMIPIMLLVHFQRCGHKPIALVGGATGMVGDPSGKSVERNMLSAEAVAANAEFIRKQLQKFLVFGDSAGGAEMANNYEWTKDVTILEFLREVGKHITVNYMVAKDSVKGRWEQGISFTEFSYQLLQAYDFYRLHTDRNCSLQLGGSDQWGNITTGTEFIRRKSGGEAFALTCPLLTRSDGKKFGKSEGGESVWLDPAMTSPYKFYQYWLNCTDDDAPKLLRFFTLMSQAEIAALETRHAAAPHERIMQRALAADVTTRVHSEEECKKAIDASEILFGKGSTEALTALSEDDFLSVFDGVPQCRVPRSEIDAGMQVIDLVTDKSKFFPSRGEARRMISQGGLSVNKIKIEDPAFTVGAQMLLNGKYLLLQKGKKSYFVVGIN

SEQ ID NO: 70925 - DNA, 1056 bp, Unknown
  Obtained from environmental sample
  misc_feature (1)..(1056): n is a, c, g, or t
gtgaagttggcaatgtcgataaataccgaattaaccgattatctgaacgccgcgattcgccgccaagcgtttcccgggtgcgcgttggcttgggtctctaaagacgaagagtccgtagtcgccgtaggacatcgtacttatgacgacggcgatgtcccgatatccgaaaactctctgtatgactgcgcctctattaccaaggctatacccgtaagcaatttggcgctatggttgattgaccgcaacaaacttagtattgatagccggctgatagattttgttcccgaatacaccggatcctttagggacgacgttcgtatacaacaccttttgacgcatacgcttgactttgatttccgtctctccggttgcaaggatttaccgcctgatgagttgctgcgtaccatattaaacgtaaagatgaagtgcgcgcccggagagaaattttgttactccaatgcctccagtattctgctcgggcttacggtggaacgtgcttccggcaagccgttagacgcactggcgtcggaggtattctttgacccgttgggtatggttgatacaactttctttattgacgacgccaagcgttcccgttgcgttcctaccgaaattgacccttggcgcggtcgcgccgtctgcggggaggtgcacgacgagagcgcctatacgctgcaaaagataatgacgccggggtcggccggactattctcaaccgcgggcgacttattgaaatatctcaagatgttgattgacgggtgggaaccgttcttttcgaaggagacggcggaatcaatgcaaactaaccaaatcccgcgcatcggcggcatgtgtacaggtttgggatgggagctgaatcaggagtatatggggaaaaaacggtcgccgtcgacattcggaaagaccggatttacggggtgcgcggtggtcgtcgacagaccgaggcggtcaggattcgcgttgctgtctaactatacttggcctaagcgtaagcctaatagggatatgataaacgaagttcgcgggggggtggcggatattgtgctgggcggatga

SEQ ID NO: 70926 - protein, 351 aa, Unknown
  Obtained from environmental sample
  DOMAIN (11)...(342): Beta-lactamase
  misc_feature (1)..(351): Xaa is any amino acid
MKLAMSINTELTDYLNAAIRRQAFPGCALAWVSKDEESVVAVGHRTYDDGDVPISENSLYDCASITKAIPVSNLALWLIDRNKLSIDSRLIDFVPEYTGSFRDDVRIQHLLTHTLDFDFRLSGCKDLPPDELLRTILNVKMKCAPGEKFCYSNASSILLGLTVERASGKPLDALASEVFFDPLGMVDTTFFIDDAKRSRCVPTEIDPWRGRAVCGEVHDESAYTLQKIMTPGSAGLFSTAGDLLKYLKMLIDGWEPFFSKETAESMQTNQIPRIGGMCTGLGWELNQEYMGKKRSPSTFGKTGFTGCAVVVDRPRRSGFALLSNYTWPKRKPNRDMINEVRGGVADIVLGG

SEQ ID NO: 70927 - DNA, 705 bp, Unknown
  Obtained from environmental sample
  misc_feature (1)..(705): n is a, c, g, or t
atgaagccgataaatgaggtaaaagcgctgaagacccaaaatccggaagaatccgcctacatgtcccaataccgccaagagctacgcgacaaaggcgaaaacgactccctaatccggaaattcgtccccctagactccatatcgaaaaatctaatctacgccgtcttagccgttgaggacgacggcttttacacccatccgggcttctccctagacgctattgtggaggccatagaatacaacaaaaccgccagcgccaacaaacaacgcggcgccagcaccatcacccagcaactggcgaagaacctgttcctctcgccggaaaagagcttcgagcggaagatcaaggaactcgggtacacgctgctcatggagaaatacttgggaaaggaccgtatcctcgaactatatatgaactacgcgcagtggggaaaaaacatcttcgggtgcgaggcggcggcgaacgcatactacaaaaaggccggtatgaatctaacgatgattgagtccgcacggatggcggcctgcttggctatgccgtcgaagatcactccgctccacacgaaatcggtttacatggggaagcggataatgatcattgccaataatatgtacctcaggaaacggctcgacgacgccggatatttggcgctcaccggagtctacccgccggggagagaagcggagattgagggggatgagtga

SEQ ID NO: 70928 - protein, 234 aa, Unknown
  Obtained from environmental sample
  DOMAIN (26)...(190): Transglycosylase
  misc_feature (1)..(234): Xaa is any amino acid
MKPINEVKALKTQNPEESAYMSQYRQELRDKGENDSLIRKFVPLDSISKNLIYAVLAVEDDGFYTHPGFSLDAIVEAIEYNKTASANKQRGASTITQQLAKNLFLSPEKSFERKIKELGYTLLMEKYLGKDRILELYMNYAQWGKNIFGCEAAANAYYKKAGMNLTMIESARMAACLAMPSKITPLHTKSVYMGKRIMIIANNMYLRKRLDDAGYLALTGVYPPGREAEIEGDE

SEQ ID NO: 70929 - DNA, 765 bp, Unknown
  Obtained from environmental sample
  misc_feature (1)..(765): n is a, c, g, or t
gtgagagggacggtttccaccatcgagctgcggggcacggaggtcggcacgatccttaatatagacaggaagatacggatgaccgactccgtccgcatagccgtggtgaacgtggggctcttaggggaacgcggcataggcgtcaccctctccccgcagggcaaaacagtcccgttcatctccgccgactctaaggacaccgtcatcatacgggggcgcttcgacaccggcatatccgaggccatgggtatgctcggcacggtactctccgaggtcgagaccctcgtggtcaacgtggccggcatcctcgacgccaccataggcgacgccgccttcatcaaccgctttcacgacatagtgggcaggttggacaccgtctgcatagtggccaacaggctgctgataagaaacgagccggtgctgaacgccgccatgaccgacctgaagaaggtctccgccgacctgaagcagctgatagcgagaaacggccccggcatagacagcatagtggtcggcggcgaccagttgatgaccaagggcatggctttggtcgcgcaagccgaatcgctggtggtcaacgtgcagggcgtactgaaagacattgagggcggtaaggggtcgctcggcaaactgtacacggacgagtccttctacaaagaactaaaggacgtcataggaagcgtggataccctagtcggcgaggtacgccaagacgccctgaaactgagggtaagactgggattcggaaggaagaaaaagcaatga

SEQ ID NO: 70930 - protein, 254 aa, Unknown
  Obtained from environmental sample
  misc_feature (1)..(254): Xaa is any amino acid
MRGTVSTIELRGTEVGTILNIDRKIRMTDSVRIAVVNVGLLGERGIGVTLSPQGKTVPFISADSKDTVIIRGRFDTGISEAMGMLGTVLSEVETLVVNVAGILDATIGDAAFINRFHDIVGRLDTVCIVANRLLIRNEPVLNAAMTDLKKVSADLKQLIARNGPGIDSIVVGGDQLMTKGMALVAQAESLVVNVQGVLKDIEGGKGSLGKLYTDESFYKELKDVIGSVDTLVGEVRQDALKLRVRLGFGRKKKQ

SEQ ID NO: 70931 - DNA, 1329 bp, Unknown
  Obtained from environmental sample
  misc_feature (1)..(1329): n is a, c, g, or t
gtgagactttctgaaaggaatcaggttttccgtatgtccaaaaatcacataggaatagtaggcgtaggcaccgtaggcggcggcgtcgttaaagctcttgattcccggatcgactacttcaaaagcgctctgggcctggacatccgccttgcccgcatagccgacagggttgcgtcgcgcttctcgcagctccccgtccgcgacgcagtttgcaccgccgatcccaacgacattctcaacgacgactccgtaaacgtcgtcgtcgagctcgccggcggcaccggcttcgcccgcaccctcgtgctcgacgccctcaaacgcggcaagcacgtcgtcaccgccaacaaggcgctaatcgccgagtacggcccggagatcttcgagacggctgacaaggccggcgtctcgctctacttcgaggcctccgtcggcggcggtatgcccgtcatcaagtccatacgggagggattgatcgggaacgagataatcagtattcggacgataatcaacggtacctgcaactacatcctgacgcaaatgtcgactcaggggctgccgttcgccgacgccctcgcggccgctcaggagaacggctacgccgaggccgaccccaccctggacgtaggcggcggcgactccggccacaaggtcgcgatactcgcctcgcttgccagcggcggctacgtcccttacggcgacctatcggtggagggtattacgggcatagccaaagaggacatcaagttcgccgccgagcttggctacgtcgtcaaattgctgggcgtcatcaagaggaacgcggacggtctcgacgtgcgcgtgcatccgaccatgctgcccaaaggccacattctcgcctcggtctccgacgtgttcaacgcggtgctgctggagggcgacgccgttgggcagatactcatttacggcaggggcgccggcgagatgccgaccgcttccgccgtggttggcgatataatagacgccgccaggaacatcgcggacaactgccccaagcgggtgccgatggattactatcgtgccgacaaaaaggtggcgcttgttcccatcgagcggatagagagccggtactatctgcgtttcaacgtcagcgacaaccccggcgtgctggcgtcgataacgagccgtttgggcgccgagggaatatcgatagcctccgtcatgcagcaagagggcggcggcgagacgtgggtgccggtgataatcattacgcacagggctatggagcgtggggtaaggaaagcgatcagggaaattgagaaggaggcgtttgttagagcgcctacgcagattataaggatagaggaatga

SEQ ID NO: 70932 - protein, 442 aa, Unknown
  Obtained from environmental sample
  DOMAIN (363)...(437): ACT domain
  misc_feature (1)..(442): Xaa is any amino acid
MRLSERNQVFRMSKNHIGIVGVGTVGGGVVKALDSRIDYFKSALGLDIRLARIADRVASRFSQLPVRDAVCTADPNDILNDDSVNVVVELAGGTGFARTLVLDALKRGKHVVTANKALIAEYGPEIFETADKAGVSLYFEASVGGGMPVIKSIREGLIGNEIISIRTIINGTCNYILTQMSTQGLPFADALAAAQENGYAEADPTLDVGGGDSGHKVAILASLASGGYVPYGDLSVEGITGIAKEDIKFAAELGYVVKLLGVIKRNADGLDVRVHPTMLPKGHILASVSDVFNAVLLEGDAVGQILIYGRGAGEMPTASAVVGDIIDAARNIADNCPKRVPMDYYRADKKVALVPIERIESRYYLRFNVSDNPGVLASITSRLGAEGISIASVMQQEGGGETWVPVIIITHRAMERGVRKAIREIEKEAFVRAPTQIIRIEE

SEQ ID NO: 70933 - DNA, 510 bp, Unknown
  Obtained from environmental sample
  misc_feature (1)..(510): n is a, c, g, or t
gtgggtctgttccgccgcatccgcatatccaaagacccgctgtacttggaattgagggtgcaagtgcgcaatatcaacaaaggccacagcgtagacatagtggagcaaagcccgctcctccgcgattacgtggcgtttgtagaggaagtacgcgaagtaggcaaagaagagggcatgacccccgaattggcgatggagaaagccatagaaaactgcataaaaaaagggatattaaccgattttttgaaccaccataaaacggaggttatgaaaatgctcgtaacggagtgggattacgatttagaaaaggaagtcttaaaagaagaagcgcatgaggatgatcgggaggaaggcctaaaggaaggcctatcgcaaggcctatcgcaaggccgagaggaagaacgcgccatactcatcaagagtatgtacgaaaacggcctaaccgttgcgcaaatagtaaaaagcacaaacctttcagaaacggtcgtcaagcagattttaggcttgtag

SEQ ID NO: 70934 - protein, 169 aa, Unknown
  Obtained from environmental sample
  misc_feature (1)..(169): Xaa is any amino acid
MGLFRRIRISKDPLYLELRVQVRNINKGHSVDIVEQSPLLRDYVAFVEEVREVGKEEGMTPELAMEKAIENCIKKGILTDFLNHHKTEVMKMLVTEWDYDLEKEVLKEEAHEDDREEGLKEGLSQGLSQGREEERAILIKSMYENGLTVAQIVKSTNLSETVVKQILGL

SEQ ID NO: 70935 - DNA, 762 bp, Unknown
  Obtained from environmental sample
  misc_feature (1)..(762): n is a, c, g, or t
atgcagacaaccaatcacgcgaaattcggaaacggcattatcaaagacggcgaaagcgaggatgtgcgggtctggatcgacgtgatgaacgaagccggcggcagatccattctgcccttcgatagcatgattaccgcggacgcgtatctgtgggcggcgtaccgcgacgacaccgtcatgacggaaaagttggctgatattacccaaaaacaatacggaagcctgcgcggcgcttacggagtcgtcggatcgggcgcgacaattaaaagctgttccgttatcaaggatacggcaatcggaagctgcgcatacatcaaaggggcgaacaaactaaaaaacctgacgattcattcttcttctgaagagccgacgcagataggcgagggcgtggaattggtgaacggcattgtcgggtacgcgtgcaatattttttacggcgcgaaagcggtgcggtttgtcataggcaggaactgtagcctgaagtacggggcgcggcttatccattccgtgcttggggacaattcaaccgtgtcgtgctgcgagatgcttaacaatttgattttcccggtgcatgaacagcaccacaacaattcatttttaatagcgagccttatccagggaatgtcgaacatggcggcggcggccaccataggcagcaaccacaacagccgcgccaacgacggcgagattcgggcaaagcgcggtttttggccggggcttgccgtaagccttaacattcctgcgtcttcgcgtccttcgtaa

SEQ ID NO: 70936 - protein, 253 aa, Unknown
  Obtained from environmental sample
  misc_feature (1)..(253): Xaa is any amino acid
MQTTNHAKFGNGIIKDGESEDVRVWIDVMNEAGGRSILPFDSMITADAYLWAAYRDDTVMTEKLADITQKQYGSLRGAYGVVGSGATIKSCSVIKDTAIGSCAYIKGANKLKNLTIHSSSEEPTQIGEGVELVNGIVGYACNIFYGAKAVRFVIGRNCSLKYGARLIHSVLGDNSTVSCCEMLNNLIFPVHEQHHNNSFLIASLIQGMSNMAAAATIGSNHNSRANDGEIRAKRGFWPGLAVSLNIPASSRPS

SEQ ID NO: 70937 - DNA, 873 bp, Unknown
  Obtained from environmental sample
  misc_feature (1)..(873): n is a, c, g, or t
atgcccgcgtatttctggcttcacaacctgtacgcccttgaacgcaattcatggaagagcaaaacccgcgacaaaagaaaaataaaaaaccagcgaatagaaaccgattatctcgcgccggacaccgccgaagaaataattcacgctctgacgatcttaaacggctggcttggagaagccggctattcggcgcaggacatgacaggcgtggacggcgtccatgtccgcatgatcctttgccgccaccttgaacacagcaagcgcgggcaggtaatcataaagccgcttgaggcaatcgccggataccgacagatgctgcgctactacgcggtaaaaaccctcgctgaattttttgacgcccacccggaactggattatcagggatttttggaattacttggcccgccttctgtgcaagagcgcgtcagcgattggacaaacataggcgggcagatagtcccctctttccgcattgacgaattgcgcaagagcatacgccagaacgaaataaagagctgggatgaaattcaccgcgtatacggccactgggacgaagcgtaccccttcgacaaatgcagccacgcgtggtccacgctggcgcttcttcgcaactcggaagaagccgtttccgcccccacgttcagaacggagatagcccttattcagggaatccgccactggatagacaaacaaatctacgacagcagggcgaaagattttcacagctcatttaagagagcgacctaccgcaatgtcgcggaaatggagcaaattttaggcggtccgggcgataatcagttcctgcacattgtgcaaaaagagagcgatgaattttttgaaatgacggaaagagttactgctagattgaaatag

SEQ ID NO: 70938 - protein, 290 aa, Unknown
  Obtained from environmental sample
  misc_feature (1)..(290): Xaa is any amino acid
MPAYFWLHNLYALERNSWKSKTRDKRKIKNQRIETDYLAPDTAEEIIHALTILNGWLGEAGYSAQDMTGVDGVHVRMILCRHLEHSKRGQVIIKPLEAIAGYRQMLRYYAVKTLAEFFDAHPELDYQGFLELLGPPSVQERVSDWTNIGGQIVPSFRIDELRKSIRQNEIKSWDEIHRVYGHWDEAYPFDKCSHAWSTLALLRNSEEAVSAPTFRTEIALIQGIRHWIDKQIYDSRAKDFHSSFKRATYRNVAEMEQILGGPGDNQFLHIVQKESDEFFEMTERVTARLK

SEQ ID NO: 70939 - DNA, 1197 bp, Unknown
  Obtained from environmental sample
  misc_feature (1)..(1197): n is a, c, g, or t
atgagtaaaacatctgtcaacacttctgacattaaaacactggttaaaaacaacattcgcagttattcaatgtttatcatgcttgcggcgatcatgataattttcgccccgctgacgaatggaaccaactggagtccgcgtaattttaccaatattttcttccagaacagttatgtattgattttagctattggcatggttcaggtaatcattgtgcagggaattgatctttcggtcggttccgtatgcgcgatggtgggcgcgttaagcgcgatgatttacaataccggaatcgggatgccgcttacgctgctggcctcgcttgccatgggcgtgattatcggcgcttatcagggagcgtgggtagctttcgcgaaaatgccggcgtttatcgtaaccctttcgggaatgatgcttttccgcggtcttacctacattattacaaaggtaagccccataagcatgcacgacattggatattcggaattatccaccggaaccgtggacgaaatgatgcatatagggcaaataggaccttatttcccaatgtcaataattgtggctgtcattgtgcttgcaattttttattcaacctcttttatgggacgcaagaaaaaaatcgccaatggttttgaagtatctcctttccccttgtttgtaacccagcttgttttaatcagccttttaactctcggccttgccgaccgtttcgcgcgctacaggggtcttcccgttgtagttctcgtcctcggtattgccgttgtggcttttcacttcctcttgaacaataccgttcttggccgctacatctacgcggtcggcggcaacccgcgctcggcgactctttccggtatcaactcggaaatggtaacgttcatcgtcttctgtttcatgggcggacttacggggcttgcggcggtagtcagcacaggttacatgaacagcgctcttccacaggcgggcaacctctttgaattggacgcgattgccgcgtgttacatcggcggcgtttccgcgggcggcggcatcggctccgtaatcggggttgttgtcggcggtcttgtaatgagcgcgatcaacaacggcatgaccttgatgaaccttgggcagcattaccagtatgttgttaaagcttcgattttgattcttgcggtcttctatgacgtgtattcaagacgcaaagcgggattgggctga

SEQ ID NO: 70940 - protein, 398 aa, Unknown
  Obtained from environmental sample
  DOMAIN (48)...(385): Branched-chain amino acid transport system / permease component
  misc_feature (1)..(398): Xaa is any amino acid
MSKTSVNTSDIKTLVKNNIRSYSMFIMLAAIMIIFAPLTNGTNWSPRNFTNIFFQNSYVLILAIGMVQVIIVQGIDLSVGSVCAMVGALSAMIYNTGIGMPLTLLASLAMGVIIGAYQGAWVAFAKMPAFIVTLSGMMLFRGLTYIITKVSPISMHDIGYSELSTGTVDEMMHIGQIGPYFPMSIIVAVIVLAIFYSTSFMGRKKKIANGFEVSPFPLFVTQLVLISLLTLGLADRFARYRGLPVVVLVLGIAVVAFHFLLNNTVLGRYIYAVGGNPRSATLSGINSEMVTFIVFCFMGGLTGLAAVVSTGYMNSALPQAGNLFELDAIAACYIGGVSAGGGIGSVIGVVVGGLVMSAINNGMTLMNLGQHYQYVVKASILILAVFYDVYSRRKAGLG

SEQ ID NO: 70941 - DNA, 429 bp, Unknown
  Obtained from environmental sample
  misc_feature (1)..(429): n is a, c, g, or t
atgctgcccaaggttcatcaaggtcatgccgttgttgatcgcgctcattacaagaccgccgacaacaaccccgattacggagccgatgccgccgcccgcggaaacgccgccgatgtaacacgcggcaatcgcgtccaattcaaagaggttgcccgcctgtggaagagcgctgttcatgtaacctgtgctgactaccgccgcaagccccgtaagtccgcccatgaaacagaagacgatgaacgttaccatttccgagttgataccggaaagagtcgccgagcgcgggttgccgccgaccgcgtagatgtagcggccaagaacggtattgttcaagaggaagtgaaaagccacaacggcaataccgaggacgagaactacaacgggaagacccctgtagcgcgcgaaacggtcggcaaggccgagagttaa

SEQ ID NO: 70942 - protein, 142 aa, Unknown
  Obtained from environmental sample
  misc_feature (1)..(142): Xaa is any amino acid
MLPKVHQGHAVVDRAHYKTADNNPDYGADAAARGNAADVTRGNRVQFKEVARLWKSAVHVTCADYRRKPRKSAHETEDDERYHFRVDTGKSRRARVAADRVDVAAKNGIVQEEVKSHNGNTEDENYNGKTPVARETVGKAES

SEQ ID NO: 70943 - DNA, 1074 bp, Unknown
  Obtained from environmental sample
  misc_feature (1)..(1074): n is a, c, g, or t
gtggaaattgcccgcgccctttccaaaaaagccgaactgttaattcttgacgagccgacttcttcgcttaacgacgatgaaagcgaaaagctgctcaacctgatacttgaatttaaacgccagggtattacctcggtgataatttcccataaattaaacgaagtcttaaaagttgcggatacagtaaccatcctgcgcgacggtcagtcaatccgcacttacgacgtaaaaggcgacaagcttaccgaagagatgatcatcaaagacatggtaggccgcgatcttacccaccgcttcccggaacggaagtcgtcgcccggcaatacaataatggaagtaaaaaactggagcgtgtaccatcccgaataccacgatataaaagtggtggacaatgtttctttctttttacgcaagggcgagattctggctttttgcgggcctatgggcgcgggacgcacagaattgatgatgagcatctttggaaattcctacggaaaccgcagcgagggcgaactaataattaacggcaaaaggcaaaagttcaaaagcccccacgaagcgattagttcaaagcttggctatatttccgaagaccgcaagagcctgggccttgtgctgattcaggatataaagacgaatattactcattccagcctgaataaaatttccaatttcctcgggataattgacgaccataaagaagttatggaagcggaacgttaccgtaacgatttgaacataaggactccgtcgattaaccagattgtccgtaacctgtccggcggcaaccagcaaaaagtggttgtcagcaaagctctttttgcggatccggaaatattaatagtagacgaaccgacaaggggtatagacgtaggcgccaaaacggaaatttacggaattatgaacgatatgattaccgccggaaagagcgtcatcatggttacctccgagcttcccgaagcgttgggaatggcggacagaatttacgttatgaacgaaggtcatattaaaggggtgcttaacaaatcggaagcaacccaggaaaaaataatgcatctggcgcttgtcggatga

SEQ ID NO: 70944 - protein, 357 aa, Unknown
  Obtained from environmental sample
  DOMAIN (139)...(334): ABC transporter
  misc_feature (1)..(357): Xaa is any amino acid
MEIARALSKKAELLILDEPTSSLNDDESEKLLNLILEFKRQGITSVIISHKLNEVLKVADTVTILRDGQSIRTYDVKGDKLTEEMIIKDMVGRDLTHRFPERKSSPGNTIMEVKNWSVYHPEYHDIKVVDNVSFFLRKGEILAFCGPMGAGRTELMMSIFGNSYGNRSEGELIINGKRQKFKSPHEAISSKLGYISEDRKSLGLVLIQDIKTNITHSSLNKISNFLGIIDDHKEVMEAERYRNDLNIRTPSINQIVRNLSGGNQQKVVVSKALFADPEILIVDEPTRGIDVGAKTEIYGIMNDMITAGKSVIMVTSELPEALGMADRIYVMNEGHIKGVLNKSEATQEKIMHLALVG

SEQ ID NO: 70945 - DNA, 837 bp, Unknown
  Obtained from environmental sample
  misc_feature (1)..(837): n is a, c, g, or t
gtgatctttattgtagtggttgtggcggggagcatcgcggtcattctgctgcaaaaggcttccaagattatccttgaagacagccttgaaagtattggttatatgggtgatgagcaggcgagattttgggaaggcagggaaaacaggtattttgaggtaatacgcacgattgcggcaatagcgggcgattttaaagacaccgcaccttcagaacggcgcgaccggaatgacgatatacttctggcggctttgaattcccagccaaacattatacgcatagccgctgtttataaaccagacgctctcgacggcatggattcccgtttcataggtcggcttggatcaacgcccacggggcaatactcaatgacatggagcagggaaaccggtgagattaaaggttcggctaacctcgacattttgggtacaatgacttatttgaacgggccaaacgcgcgtaaagaccgggtagaagatcccataccccttaaagtacaaggaaaagacacttttgttttcaggctgggggttccggttattaataatttaaccaacgaagtagtcgggagcgtaacctgtcttttaactattgacggagcgcagcccagggtggaagcgaccattaaagggaaacaagcaatagccgccatgtccatgtataccaacaccgggtttattatcgcgagttatgtgccggaacgcataggcaaaaacctgcgtgatgtagacaatatctacggcaaatatattaatgacgcgtacaaggcggttgttgaaggaaaggatttccagtgcaccagctattccagtgtattggggaacaaatgtgtcaattga

SEQ ID NO: 70946 - protein, 278 aa, Unknown
  Obtained from environmental sample
  misc_feature (1)..(278): Xaa is any amino acid
MIFIVVVVAGSIAVILLQKASKIILEDSLESIGYMGDEQARFWEGRENRYFEVIRTIAAIAGDFKDTAPSERRDRNDDILLAALNSQPNIIRIAAVYKPDALDGMDSRFIGRLGSTPTGQYSMTWSRETGEIKGSANLDILGTMTYLNGPNARKDRVEDPIPLKVQGKDTFVFRLGVPVINNLTNEVVGSVTCLLTIDGAQPRVEATIKGKQAIAAMSMYTNTGFIIASYVPERIGKNLRDVDNIYGKYINDAYKAVVEGKDFQCTSYSSVLGNKCVN

SEQ ID NO: 70947 - DNA, 828 bp, Unknown
  Obtained from environmental sample
  misc_feature (1)..(828): n is a, c, g, or t
atgacgcgtacaaggcggttgttgaaggaaaggatttccagtgcaccagctattccagtgtattggggaacaaatgtgtcaattgacttaacgtcttttctgataggccaatcccacgtaatgtggactataatgattggggcatcggaagaatacattttgaaagatgtaaaggatatgacttattttaccatcatcctaacgttgatagcccttgtattgtcgacagtaattgtatactttacccttcacagcactacaaaaccaatagtcacggtagccgcaaccctcaaggacatctcggaaggcgagggcgatttaacacggcacattgatgtcaatacaaaagacgagatcggcgaccttgcccattacttcaataaaacattggagaagataaagaaacttgtcctgatcatcaaaaaagaggcggcgggccttcacgaaattggcaacgaccttgccagcaatatgaccgaaaccgctgcggcagtcaaccaaatcaacgccaatatccaaagtataaaaggccgggttattaaccaggccgccagcgttaccgaaactaacgccaccatggaacaggttatcgccaacatcaacaaacttaacggccatgttgaaaaccaaagcagaaatgtttcccaggcttcgtccgctattgaagaaatggtagccaatatcggctcagttaccaatacgctggtcaacaactccgccaatgttaaaacattacgggaagcgtccgaagtaggaaaggccggattgcaggaagtggcgtcggacattcaggaaatatcccgcgaatcggaggcttactggaaataa

SEQ ID NO: 70948 - protein, 275 aa, Unknown
  Obtained from environmental sample
  DOMAIN (64)...(135): HAMP domain
  misc_feature (1)..(275): Xaa is any amino acid
MTRTRRLLKERISSAPAIPVYWGTNVSIDLTSFLIGQSHVMWTIMIGASEEYILKDVKDMTYFTIILTLIALVLSTVIVYFTLHSTTKPIVTVAATLKDISEGEGDLTRHIDVNTKDEIGDLAHYFNKTLEKIKKLVLIIKKEAAGLHEIGNDLASNMTETAAAVNQINANIQSIKGRVINQAASVTETNATMEQVIANINKLNGHVENQSRNVSQASSAIEEMVANIGSVTNTLVNNSANVKTLREASEVGKAGLQEVASDIQEISRESEAYWK

SEQ ID NO: 70949 - DNA, 372 bp, Unknown
  Obtained from environmental sample
  misc_feature (1)..(372): n is a, c, g, or t
gtgctaaacaaattcgaggcgattgactcaggagtcaaaaccgtttcggatcaggaagataacatccgcaactcgatggaggagcaggggcaagggagcaaacaggtgcttcaaagcgtgggcgatttgagcgagataagccgacaagtaaagggcgggtccaatgaaatgctggtaggggcaaaggaagtaattcaggagagcaacaatttagagaaggcaacccaggaaataaccggcggcatgaacgagatggcaaccggcgcggatcagataaatttagcgatacaccatgtcaacgagataagcaacaagaaccgcgaaggcattaacaccctgataaaggaagtttcgcgcttcaaagtagattaa

SEQ ID NO: 70950 - protein, 123 aa, Unknown
  Obtained from environmental sample
  misc_feature (1)..(123): Xaa is any amino acid
MLNKFEAIDSGVKTVSDQEDNIRNSMEEQGQGSKQVLQSVGDLSEISRQVKGGSNEMLVGAKEVIQESNNLEKATQEITGGMNEMATGADQINLAIHHVNEISNKNREGINTLIKEVSRFKVD

SEQ ID NO: 70951 - DNA, 1443 bp, Unknown
  Obtained from environmental sample
  misc_feature (1)..(1443): n is a, c, g, or t
atgaagacctgccgcatactgctgaacacgccgtcggcgcaaggcggcataggcgacttgtacaacttccgcctgcggccttcgctcactttgggctgcggcagttggggcggcaattcggtttcggaaaatgtcggcgttaaacacctgttaaatattaaaacactggcggcaaggagggaaaatatgctgtggttccgcgctcccgaaaaagtatatatcaagagaggatgccttcccgtggctttagacgaacttaaaaccgttatggggaaaaaacgcgcgttcatcgtaaccgacacattcctgtacgaaaacggttacaccaaatgcatcaccgacaaactggacagcatgggaattgtccacgaaactttttttgatgtcgctcccgacccgactcttgcctgcgcgaaaaagggcacttcgattatgagcgcgttcaaacccgatgtgatcatcgccattggcggcggctcggcaatggacgcgggcaaaatcatgtgggtgctctacgaacatcccgaagttgattttgaggatatggctatgcgcttcgccgacatacgcaagcgcgtctacaccttccccaagatgggagagaaggcgtactttatcgccattcccacctccgccggaacaggcagcgaggtaacgccctttgccgtcatcaccgatgaaaccaaaggcatgaagtacccgcttgcggattacgaacttttacccgacatggcgatagtggacgccgacgtgcagatgaacgcgcccaaaggactgacaagcgcgtccggcatagacgctgtaacccacgcgctggaagcctacgcctcggtcatggctacggactacaccgacggtcttgcgatacaggcgctcaaggtgattttcgaatggctgccagccgcgtacaacgaaggcgcggcgaaccctgttgcgcgcgagaagatggcgaacgccgccacgatagcgggcatggcttttgccaacgcgttcctcggcgtgtgccactcgatggcgcacaagctcggcgcgttccaccacctgccccacggcgtcgccaacgcgctgatgatcagcgaagtgctccgctacaactcctgcgaagttccgccgaagatgggaaccttccctcaatatgatcatcccaagacattatcacggtacgcgcagattgcggacgcgctggctctgggcggcaagaccgatgaagaaaaacttgaaaaattaatcgccgcagtggaaaaactgaaagagcagatcggtatcaagaagactatcaaagattacggcatagatgaaaaagattttcttgcccgccttgacgacatgagcgaacaggcttttgacgatcaatgcaccggggcgaatccgcggtatccgttaatcgaggaaatcaaaaagatgtacctcaatgtttactacggaaagagagaaaaggtgtaa

SEQ ID NO: 70952 - protein, 480 aa, Unknown
  Obtained from environmental sample
  DOMAIN (69)...(465): Iron-containing alcohol dehydrogenase
  misc_feature (1)..(480): Xaa is any amino acid
MKTCRILLNTPSAQGGIGDLYNFRLRPSLTLGCGSWGGNSVSENVGVKHLLNIKTLAARRENMLWFRAPEKVYIKRGCLPVALDELKTVMGKKRAFIVTDTFLYENGYTKCITDKLDSMGIVHETFFDVAPDPTLACAKKGTSIMSAFKPDVIIAIGGGSAMDAGKIMWVLYEHPEVDFEDMAMRFADIRKRVYTFPKMGEKAYFIAIPTSAGTGSEVTPFAVITDETKGMKYPLADYELLPDMAIVDADVQMNAPKGLTSASGIDAVTHALEAYASVMATDYTDGLAIQALKVIFEWLPAAYNEGAANPVAREKMANAATIAGMAFANAFLGVCHSMAHKLGAFHHLPHGVANALMISEVLRYNSCEVPPKMGTFPQYDHPKTLSRYAQIADALALGGKTDEEKLEKLIAAVEKLKEQIGIKKTIKDYGIDEKDFLARLDDMSEQAFDDQCTGANPRYPLIEEIKKMYLNVYYGKREKV

SEQ ID NO: 70953 - DNA, 1152 bp, Unknown
  Obtained from environmental sample
  misc_feature (1)..(1152): n is a, c, g, or t
atggcggagaacaagcaagaaccggcgctggagccggtaaccgggcctgagagcttagaacgggcccttagccgtatacgcgaagcccaaaaggctttcgcgacgttcagtcaggagcaggtagacaagatcttcttcgcggcggctaaggccgcggcgatggagcgcataccgctggccaaaatggccgtgtcggagaccggcatgggcgtggtcgaggacaaggtcatcaaaaaccactacgcgtcggagtacatatacaatcagtataggtacgaaaagacctgcggcgttatcgaggaagatccggttgggggcatcacccgcatcgccgagccgataggcctcgtggcggcggtcatcccgaccaccaaccccacttccacggcgattttcaagtcgctgatctgcctcaaaacccgcaacggcatcataatctcgccgcacccgcgcgccaagggcagcacctgcgcggcggccaaggtcgtgctggacgcggcggtcgccgccggagcgccggcggggatcatcggctggatagacgaaccgagcctcgaaatgaccaacacggtgatgaaagaggcggacatcatcctcgccacgggcggaccggccatggtcaagtcggcctactcctccggcaaacccgccgtcggcgtggggtcgggcaacgtgccggccataatcgacgacagcgcggacatcatcctcgcggtgaactcgatcatccactccaaaactttcgacaacggcatgatatgcgcctccgagcagtcggtaatcgccctgaacagcgtctacgacaaggtgaaagccgagttcaaacgccgcggctgctacttcctgaacgcggaagagaccgaaaaggtgcggaaagcaattatcgtcaaaggggcgctgaacgcgaaaatcgtcggtcagaaggccgcgaagatcgcggagatcgccggcgtgaccgttccggaagagacgaaaatactcatcggcgaagtggaaagcgtggagctctcggaagagttcgcccacgaaaagctctcgcccgtgcttgccatgtataaagcgaaggatttcgacgacgcggttaacaaagccgaccaactgataaagacggcggctacgggcacacctcaagcgtgtacctcaacccgctga

SEQ ID NO: 70954 - protein, 383 aa, Unknown
  Obtained from environmental sample
  DOMAIN (5)...(382): Aldehyde dehydrogenase family
  misc_feature (1)..(383): Xaa is any amino acid
MAENKQEPALEPVTGPESLERALSRIREAQKAFATFSQEQVDKIFFAAAKAAAMERIPLAKMAVSETGMGVVEDKVIKNHYASEYIYNQYRYEKTCGVIEEDPVGGITRIAEPIGLVAAVIPTTNPTSTAIFKSLICLKTRNGIIISPHPRAKGSTCAAAKVVLDAAVAAGAPAGIIGWIDEPSLEMTNTVMKEADIILATGGPAMVKSAYSSGKPAVGVGSGNVPAIIDDSADIILAVNSIIHSKTFDNGMICASEQSVIALNSVYDKVKAEFKRRGCYFLNAEETEKVRKAIIVKGALNAKIVGQKAAKIAEIAGVTVPEETKILIGEVESVELSEEFAHEKLSPVLAMYKAKDFDDAVNKADQLIKTAATGTPQACTSTR

SEQ ID NO: 70955 - DNA, 1077 bp, Unknown
  Obtained from environmental sample
  misc_feature (1)..(1077): n is a, c, g, or t
ttgaggtgtgcccgtagccgccgtctttatcagttggtcggctttgttaaccgcgtcgtcgaaatccttcgctttatacatggcaagcacgggcgagagcttttcgtgggcgaactcttccgagagctccacgctttccacttcgccgatgagtattttcgtctcttccggaacggtcacgccggcgatctccgcgatcttcgcggccttctgaccgacgattttcgcgttcagcgcccctttgacgataattgctttccgcaccttttcggtctcttccgcgttcaggaagtagcagccgcggcgtttgaactcggctttcaccttgtcgtagacgctgttcagggcgattaccgactgctcggaggcgcatatcatgccgttgtcgaaagttttggagtggatgatcgagttcaccgcgaggatgatgtccgcgctgtcgtcgattatggccggcacgttgcccgaccccacgccgacggcgggtttgccggaggagtaggccgacttgaccatggccggtccgcccgtggcgaggatgatgtccgcctctttcatcaccgtgttggtcatttcgaggctcggttcgtctatccagccgatgatccccgccggcgctccggcggcgaccgccgcgtccagcacgaccttggccgccgcgcaggtgctgcccttggcgcgcgggtgcggcgagattatgatgccgttgcgggttttgaggcagatcagcgacttgaaaatcgccgtggaagtggggttggtggtcgggatgaccgccgccacgaggcctatcggctcggcgatgcgggtgatgcccccaaccggatcttcctcgataacgccgcaggtcttttcgtacctatactgattgtatatgtactccgacgcgtagtggtttttgatgaccttgtcctcgaccacgcccatgccggtctccgacacggccattttggccagcggtatgcgctccatcgccgcggccttagccgccgcgaagaagatcttgtctacctgctcctgactgaacgtcgcgaaagccttttgggcttcgcgtatacggctaagggcccgttctaa

SEQ ID NO: 70956 - protein, 358 aa, Unknown
  Obtained from environmental sample
  misc_feature (1)..(358): Xaa is any amino acid
MRCARSRRLYQLVGFVNRVVEILRFIHGKHGRELFVGELFRELHAFHFADEYFRLFRNGHAGDLRDLRGLLTDDFRVQRPFDDNCFPHLFGLFRVQEVAAAAFELGFHLVVDAVQGDYRLLGGAYHAVVESFGVDDRVHREDDVRAVVDYGRHVARPHADGGFAGGVGRLDHGRSARGEDDVRLFHHRVGHFEARFVYPADDPRRRSGGDRRVQHDLGRRAGAALGARVRRDYDAVAGFEADQRLENRRGSGVGGRDDRRHEAYRLGDAGDAPNRIFLDNAAGLFVPILIVYVLRRVVVFDDLVLDHAHAGLRHGHFGQRYALHRRGLSRREEDLVYLLLTERRESLLGFAYTAKGPF

SEQ ID NO: 70957 - DNA, 669 bp, Unknown
  Obtained from environmental sample
  misc_feature (1)..(669): n is a, c, g, or t
gtggtgatactgcccgataatgatgacgggacgttgttgccgggcatgaccgcaaacgtagagttcatagaagctagagaggtgaacgccctgacggtccccgcgtcggtattccgtttccagccgcccaaagaagcgcaggagaagttgaagaagatgatagatgaacggaaagcggcgagagacggcggtggcggcgggatggacggcggaatgataccagacggcggcgcagggatgatagcggtgaaagacgacggcgggatgacgggcggcggcggtcggggcgacggtcaattcaagatggacagggagcgccgtaaagacggcggcggcgacggtcgtcggcaaggcggcggggacggccgcggcgaaggccgccgtgagggcggtcagggcgggggagggaagaggccgccggccggcgttatgggtagccgcggcgtactgtggacattggacgaaaacggtacgttcaagccggtgttcgtgaagatagggctgagcgacggcgtgacgacagccgttacgggaagggatgatttgaccgaggggatgaagattgtcgtcagcgaagtaaggagcgacaaggacaagaagtcgtcggataagaaaaaacagaacaatccgctgatgccgcagggcgggggcgggcctaggaggatgtaa

SEQ ID NO: 70958 - protein, 222 aa, Unknown
  Obtained from environmental sample
  misc_feature (1)..(222): Xaa is any amino acid
MVILPDNDDGTLLPGMTANVEFIEAREVNALTVPASVFRFQPPKEAQEKLKKMIDERKAARDGGGGGMDGGMIPDGGAGMIAVKDDGGMTGGGGRGDGQFKMDRERRKDGGGDGRRQGGGDGRGEGRREGGQGGGGKRPPAGVMGSRGVLWTLDENGTFKPVFVKIGLSDGVTTAVTGRDDLTEGMKIVVSEVRSDKDKKSSDKKKQNNPLMPQGGGGPRRM

SEQ ID NO: 70959 - DNA, 864 bp, Unknown
  Obtained from environmental sample
  misc_feature (1)..(864): n is a, c, g, or t
gtgctacggcgcggcgcggatactatattctatactatgaaatcctacgccagccacaaatcaaagtctgcggtcaaagcgctgatagccgtcgttatcctccttctgctttgcggcggtggcgtttacgcttacttttactaccagcgaaccctcgacagccgccccaaggagtacgagaccgtctcggtctcccgcggcaccgtggaacgcgtcatcgtcagcaccggcacgctcgaccccgtgggttccgtggaggttgggacgcaggtctccggaactgtcgaaaaggtgcttgtcgatttcaacgacaccgtcaaagccgggcagatcatcgcggagatcgaccgcagcgtgctcactagcaagctgacggaggcgcaggcctcgtattcgcgggccgaggcgctgtttttgcagagcgagcaggagttcaagcgcggggaggtgctgttcgagaaggggttgatctcggagcaggactttaccaaggcgcgcaccgactacctgtcgcagaaggcctctctgcaagtggccaaggcctcggtcacaacggcgtcggagaacgtgcgctacgccaccatccgttcgcccgtgcgggggacggtcataaaacgcgccgtggacgtcggccagacggtcgcggccagcctcagcgcgccgacgctgttcgtcatagccgaggatttgaagaagatgaaaatcatggcgcaggtggacgagacggacataggcaaaatcaagaccgcgcaggaagtgcgtttttccgtacaggcgtatcccgataagaagtacgccggtacggtgagccaaatcaggcttcagccggatgaattcaaaacgtcgtcacgtatacggtggtga

SEQ ID NO: 70960 - protein, 287 aa, Unknown
  Obtained from environmental sample
  misc_feature (1)..(287): Xaa is any amino acid
MLRRGADTIFYTMKSYASHKSKSAVKALIAVVILLLLCGGGVYAYFYYQRTLDSRPKEYETVSVSRGTVERVIVSTGTLDPVGSVEVGTQVSGTVEKVLVDFNDTVKAGQIIAEIDRSVLTSKLTEAQASYSRAEALFLQSEQEFKRGEVLFEKGLISEQDFTKARTDYLSQKASLQVAKASVTTASENVRYATIRSPVRGTVIKRAVDVGQTVAASLSAPTLFVIAEDLKKMKIMAQVDETDIGKIKTAQEVRFSVQAYPDKKYAGTVSQIRLQPDEFKTSSRIRW

SEQ ID NO: 70961 - DNA, 2031 bp, Unknown
  Obtained from environmental sample
  misc_feature (1)..(2031): n is a, c, g, or t
atgttactgcggacaatgcggaatatcggcattatggcccatattgacgccggaaagaccaccacaaccgaaagaatcctcttctataccggaaaaagccaccgtatcggcgaagtggacgacggcgaagctattatggactggatggaacaggaacagcagcgcggcatcaccattcaaagcgcggcgactaccacttactggagagaccaccagatcaatataatagacacgccgggccatgttgattttttcgccgaggttgagcgctcgcttagagtgctggacggcgccatagcgattttcgacgcggtccatggcgttgagccgcaaaccgaaaccgtctggcggcaggcgcgcaggtacaatgtcccatgcataggctatgtgaacaaaatggacaggatgggggcggattttttctttgttatcgaagacgtaaaaaacaaattgaaaataaatacggttcctcttcaaattccaataggcagggaaaactcttttgagggcgtcatcgacttaatcgaaatgaaagaaatccgctggaaggaccaaggcgacgagatggaatactcccctgtcgcggcgcagcgtgaagaagacgcgaaaaaatggcgcgagaaacttgtcgattcgctttcaggcgtttccgacattattaccgaaaaatatcttgccggcgaagaaattgacgcggcccttatccgcgcggagcttcgcaaggcggtcattaaacgcgaacttctccccatgttcgcgggcgcgtcaaggcgcaatatgggcgttcagcccgtcattgacgccatagttgattatctgcccgcgccggacgaaattaagccggcgattgggcatcatattaaaaaagaggaagatatttcgattccctgcgatccaaagggacagcctataggccttgtatttaagattcaaaatgaccgcgaggcgggaagcctttgctatgtaagaatgtactcaggctccattccgtcgggcagcgcggtctttaatcagggaaagaaaaagcgcgaaagggcgaacaggattttacgtatgcattccaataaatcggagcctatggacagcttgagcgccggcgatataggcgtcattatcgggatgaagctggcgcagacgggcgacacaatagggagcgaaggctggccggttttgcttgaaaagatgcagtttcccgaacccgtcatttcaatttccatagagcctaaaacaatttccgagcaggataaacttaaagacattttggcgatcctttccaaagaagacccgacttttaccatcagggaaaacgatgaaaccggacagcttattatttcgggcatgggcgagcttcaccttgatgtgcttgttacacggattttaagagaatacaaactcggcgcgaaggtgggaaatccacaggttacataccgcgagtcgataagcaaaaccatagaacataccgaaagtttttcaaaagttatcgccggaaaggaaaacgccgcgggcgttacattgcgcgtggaacccgccaagcgcggaaccggcaacaaatatgttttagcaaggcagggaaaaagcgatgtcccgcaggaaatccttgacgcgattgagaacggcataaacggcgccttttcctccggcattatcatgggctatccatgtattgatattacggcgacggttacaggcattcagtattcagaacaaaccggcactcccttcgcctttgaagcctgcgccagcatggcctttgacgaagcctgccgaaacgcctcccccatcctccttgagcctattatggccgttaaccttaacactccccatgaatttgtaggggaggtcatgagccttgtaacacagcgcggcgggcaaattcttaacatgaacgcgaaatcggacgcggacgaaataaaggctcaggcgcctatggaaaaaatgttcggttttatgaccagccttcgcagtgtttcacagggacgcgcaagttttagtttggaattttcgcattttgagaagaagtcggaaaaataa

SEQ ID NO: 70962 - protein, 676 aa, Unknown
  Obtained from environmental sample
  DOMAIN (7)...(134): GTPase of unknown function
  misc_feature (1)..(676): Xaa is any amino acid
MLLRTMRNIGIMAHIDAGKTTTTERILFYTGKSHRIGEVDDGEAIMDWMEQEQQRGITIQSAATTTYWRDHQINIIDTPGHVDFFAEVERSLRVLDGAIAIFDAVHGVEPQTETVWRQARRYNVPCIGYVNKMDRMGADFFFVIEDVKNKLKINTVPLQIPIGRENSFEGVIDLIEMKEIRWKDQGDEMEYSPVAAQREEDAKKWREKLVDSLSGVSDIITEKYLAGEEIDAALIRAELRKAVIKRELLPMFAGASRRNMGVQPVIDAIVDYLPAPDEIKPAIGHHIKKEEDISIPCDPKGQPIGLVFKIQNDREAGSLCYVRMYSGSIPSGSAVFNQGKKKRERANRILRMHSNKSEPMDSLSAGDIGVIIGMKLAQTGDTIGSEGWPVLLEKMQFPEPVISISIEPKTISEQDKLKDILAILSKEDPTFTIRENDETGQLIISGMGELHLDVLVTRILREYKLGAKVGNPQVTYRESISKTIEHTESFSKVIAGKENAAGVTLRVEPAKRGTGNKYVLARQGKSDVPQEILDAIENGINGAFSSGIIMGYPCIDITATVTGIQYSEQTGTPFAFEACASMAFDEACRNASPILLEPIMAVNLNTPHEFVGEVMSLVTQRGGQILNMNAKSDADEIKAQAPMEKMFGFMTSLRSVSQGRASFSLEFSHFEKKSEK

SEQ ID NO: 70963 - DNA, 474 bp, Unknown
  Obtained from environmental sample
  misc_feature (1)..(474): n is a, c, g, or t
ttgaagaggaaccgtatttattttcaatttgttttttacgtcttcgataacaaagaaaaaatccgcccccatcctgtccattttgttcacatagcctatgcatgggacattgtacctgcgcgcctgccgccagacggtttcggtttgcggctcaacgccatggaccgcgtcgaaaatcgctatggcgccgtccagcactctaagcgagcgctcaacctcggcgaaaaaatcaacatggcccggcgtgtctattatattgatctggtggtctctccagtaagtggtagtcgccgcgctttgaatggtgatgccgcgctgctgttcctgttccatccagtccataatagcttcgccgtcgtccacttcgccgatacggtggctttttccggtatagaagaggattctttcggttgtggtggtctttccggcgtcaatatgggccataatgccgatattccgcattgtccgcagtaa

SEQ ID NO: 70964 - protein, 157 aa, Unknown
  Obtained from environmental sample
  misc_feature (1)..(157): Xaa is any amino acid
MKRNRIYFQFVFYVFDNKEKIRPHPVHFVHIAYAWDIVPARLPPDGFGLRLNAMDRVENRYGAVQHSKRALNLGEKINMARRVYYIDLVVSPVSGSRRALNGDAALLFLFHPVHNSFAVVHFADTVAFSGIEEDSFGCGGLSGVNMGHNADIPHCPQ

SEQ ID NO: 70965 - DNA, 708 bp, Unknown
  Obtained from environmental sample
  misc_feature (1)..(708): n is a, c, g, or t
atgctgggacccatagtaaacgctgtcgccgttgtaattttttcgcttatcgggacatttcttgtaaagggcatacccgaccgcgtcgaggaaatcatcaaaaaagccataggcctttccatcatcttcttaggtattaaaggcgcgtttgaaaatgaaaagctccttctgctgattatgagcatggtcttcggggggataataggcgaactaatcgacatagacaaatggatgaacaaattcggcaagtgggcggaaagcaaactcattaaaaacaatcaggaaggttctaagcacgatttcgccaaaggctttgtttccgctaccatcctcttctgtacaggctcaatggcgattttaggctctatgcaaagcgggcttgttgggaatcatcagatactttttacaaaaaccgtcatggacggttccatgtctattgtcttcggcgcgacattcggaataggagcggcgttctcggcaataccgctcttgctctatcaggggggaatcgcgcttgcttcttcttttatacgcgattttcttgacccggaagtaatccgcgaaatgtccgccgtgggaagccttgtcatcacggctataggctttaacttcctttccgtaaaagagataaaagtcgcaaatcttatccctgccatgtttatcccatggatctacctgacagccgcccaatactttattcatggttaa

SEQ ID NO: 70966 - protein, 235 aa, Unknown
  Obtained from environmental sample
  DOMAIN (1)...(232): Protein of unknown function (DUF554)
  misc_feature (1)..(235): Xaa is any amino acid
MLGPIVNAVAVVIFSLIGTFLVKGIPDRVEEIIKKAIGLSIIFLGIKGAFENEKLLLLIMSMVFGGIIGELIDIDKWMNKFGKWAESKLIKNNQEGSKHDFAKGFVSATILFCTGSMAILGSMQSGLVGNHQILFTKTVMDGSMSIVFGATFGIGAAFSAIPLLLYQGGIALASSFIRDFLDPEVIREMSAVGSLVITAIGFNFLSVKEIKVANLIPAMFIPWIYLTAAQYFIHG

SEQ ID NO: 70967 - DNA, 1185 bp, Unknown
  Obtained from environmental sample
  misc_feature (1)..(1185): n is a, c, g, or t
atggttaatatgcgtataatctttgtatttattatctgccttctctttctgccggcctgtacaaagcgcgaatctgttaaccaagaaaaaaacaaggttaacgaacctaaaaaagaggttgcagttgacgaaatttacgaaaaatggctgcgcgccagggaaattgccgcttcccttgatgaccgtttgcttgcggctcaggttcttatcagcgggatagagggcaaggggagtttagattcaaacatagtaagcctgttaagcgaattccctaccggaggaattatgcttttcaagtacaatcttgacacggataacgattcaatacgctccctgattaatcaaactgccgcgcttattaacagcgagtcgggcattccgccatttatagcggtagatcatgaaggaggcaccgtcaaccgtttcaggagaggtacagccgacttgccggacgcttcctcttattgggaactctctcttgctcagggcaaacagacaagtcttaaaaaaattgaaaatgacagtttaagggcgggcagagaattaaaggatttgggaatcaatgtaaatttcgcgcctgtagcggaatacttaaatgacgagaaccgtgtctttttaagccgccgctcctacggacccgacccgctttttacggcaaacgcggcgcaggcttttatcacgggaatgaaacaggcgggagtcctatgcgtaatcaagcatttccccggcatcgcgggaagtgatccccactactctgcttccgtaattaacggggacagggatgaattggataagctggtttttccttttaagacgattattgataacatcattggaggcggcgcgacaatggtttcacataccgttgtttcggctttggacggtaaaatagcgagcctgtcaaaagttgtcatggaagactggctaaggggcgaactgggtttttcaggtctgttaatttccgatgattttagcatggcctccgcgggcatgcttagtcccgataaattggcggtcatgtccatcgccgccggcgcggacatggtacttgtctggcccaaagatttaagacgcacacacagcgcgattatgtacgccctctatgacgggcggctgtcccgcgaaagattgcgtaatactgcctataggataattattacaaaaataaacatgggattaatgtaa

SEQ ID NO: 70968 - protein, 394 aa, Unknown
  Obtained from environmental sample
  SIGNAL (1)...(21)
  DOMAIN (118)...(351): Glycosyl hydrolase family 3 N terminal domain
  misc_feature (1)..(394): Xaa is any amino acid
MVNMRIIFVFIICLLFLPACTKRESVNQEKNKVNEPKKEVAVDEIYEKWLRAREIAASLDDRLLAAQVLISGIEGKGSLDSNIVSLLSEFPTGGIMLFKYNLDTDNDSIRSLINQTAALINSESGIPPFIAVDHEGGTVNRFRRGTADLPDASSYWELSLAQGKQTSLKKIENDSLRAGRELKDLGINVNFAPVAEYLNDENRVFLSRRSYGPDPLFTANAAQAFITGMKQAGVLCVIKHFPGIAGSDPHYSASVINGDRDELDKLVFPFKTIIDNIIGGGATMVSHTVVSALDGKIASLSKVVMEDWLRGELGFSGLLISDDFSMASAGMLSPDKLAVMSIAAGADMVLVWPKDLRRTHSAIMYALYDGRLSRERLRNTAYRIIITKINMGLM

SEQ ID NO: 70969 - DNA, 720 bp, Unknown
  Obtained from environmental sample
  misc_feature (1)..(720): n is a, c, g, or t
gtggaaaatataaaagaacttcaacagcggctgctttttcagagtacagactgcatagtcgtgaacaaattaaagggagaagctgtcgaaggcgcgggcagcggtatggttaatctgccaaaagagctgtctgccctgctcccttcgtatacggaactcatagaagccgtccaccgtcttgacgtgccggtaacaggctgcgcgctgtttgcccttacaaaagacgccctcatttttctgaacgacgcctttgcgggtaaaaacgcgatgtctgtcgaaaaaatttattgggcaatagtagaaaagccttcccttcctataaacgaaagcatattttccggcgaggaacttgttcactggatagagacaaacacgcaaaaaaacaaatcattcgcgttcaccgaaaacgctcccgggcgtaaaaaagcgtccttgcgcctgagaaaaacaggcgaaggtgataactatcttttcctagaaatagaacttctttccggcaggcatcatcagatacgcgcacagttggcgaaagagggcttacacataaaaggcgacttaaaatacggcgcgaaacgaagtgaaaaaggaggcggcatccgccttcacgcccgttccctttctttccccgacccgttaaacaaagacggaaagatacgcgtaactgcggatcctcccgaacttgataatttatggatgtcaatgatgaatagtatgctgtga

SEQ ID NO: 70970 - protein, 239 aa, Unknown
  Obtained from environmental sample
  DOMAIN (17)...(177): RNA pseudouridylate synthase
  misc_feature (1)..(239): Xaa is any amino acid
MENIKELQQRLLFQSTDCIVVNKLKGEAVEGAGSGMVNLPKELSALLPSYTELIEAVHRLDVPVTGCALFALTKDALIFLNDAFAGKNAMSVEKIYWAIVEKPSLPINESIFSGEELVHWIETNTQKNKSFAFTENAPGRKKASLRLRKTGEGDNYLFLEIELLSGRHHQIRAQLAKEGLHIKGDLKYGAKRSEKGGGIRLHARSLSFPDPLNKDGKIRVTADPPELDNLWMSMMNSML

SEQ ID NO: 70971 - DNA, 708 bp, Unknown
  Obtained from environmental sample
  misc_feature (1)..(708): n is a, c, g, or t
atgatcgcgacggccgagtacggcggcgcgcgaaaagattccaaatacacaacaataatggaaggcgccggacttaccggaataaatcgttatgaatatgtgttaaaagcttttcaatttgcgcgaaaatacgcggatgaaaacggcggagaaaatgttaaactttttttaacggactttggcattgaaagagcattcccggacgatgtagcggcaggtaaaaaaagcaaaatagacatgtttgatggattggtagattatctaattgaaaataacgcgccctttgacggcattggtttccagggacatttcaggctttatgatcatcctgtaacgcaaatcagcgacgggattgacagattttccgcaaaaaaaagaaaagacggaaaaaatttaaccatacatgtttgcgaactggatttctcggttttcagtaacgctaagggtgaaggcaatgctaaaaatatttccaatgataaacttgaagaacgtctgacggatttggcggcaaattaccgtgatttctttgatatgtttgaaacaaaatacatcgagggaaaacttgacatggtactgatatgggggataacggacaaaaacagctggctgaacaatcatcccgtatccggaaggacggattatcccctgctttttgacagagactataaacccaaaaaagcgtttataagtttaactgaaggccgataa

SEQ ID NO: 70972 - protein, 235 aa, Unknown
  Obtained from environmental sample
  DOMAIN (3)...(235): Glycosyl hydrolase family 10
  misc_feature (1)..(235): Xaa is any amino acid
MIATAEYGGARKDSKYTTIMEGAGLTGINRYEYVLKAFQFARKYADENGGENVKLFLTDFGIERAFPDDVAAGKKSKIDMFDGLVDYLIENNAPFDGIGFQGHFRLYDHPVTQISDGIDRFSAKKRKDGKNLTIHVCELDFSVFSNAKGEGNAKNISNDKLEERLTDLAANYRDFFDMFETKYIEGKLDMVLIWGITDKNSWLNNHPVSGRTDYPLLFDRDYKPKKAFISLTEGR

SEQ ID NO: 70973 - DNA, 333 bp, Unknown
  Obtained from environmental sample
  misc_feature (1)..(333): n is a, c, g, or t
ttgtgcctgctggttgaaaaaaactgctttaggcacattgaattggttttacaaaaaatcgaacaaaaccttgacgaacaaaacgggatacttgacgttactatcgaatccgcggctcctgtggacagcggttttgaaaaagaactttctaaaatgataaaagagagaacaggcgcggcggacatcaaaatgaaaacgcgcattaaaccggaattgctgggcggttaccttctgcgaatcggcagtcattatgttgacgcaagtttaaaggggcagttggaaaacatagcggcgcatttaggcgagaatataggaggtccccgcaatggctaa

SEQ ID NO: 70974 - protein, 110 aa, Unknown
  Obtained from environmental sample
  DOMAIN (5)...(100): ATP synthase delta (OSCP) subunit
  misc_feature (1)..(110): Xaa is any amino acid
MCLLVEKNCFRHIELVLQKIEQNLDEQNGILDVTIESAAPVDSGFEKELSKMIKERTGAADIKMKTRIKPELLGGYLLRIGSHYVDASLKGQLENIAAHLGENIGGPRNG

SEQ ID NO: 70975 - DNA, 903 bp, Unknown
  Obtained from environmental sample
  misc_feature (1)..(903): n is a, c, g, or t
atggctaattatgacgacctaactaaagttttaaaagagcgaattgaaaattggaagggacaagcttcatcaggcagcggcggctttgtcgttcaggttggcgattctgttgccaccgtctacggtcttaacgacgcggtttacggggagatggttgaatttgcctcaggcgcgcatggaatagtttttaatcttgaggaagaaaacgcggggtgcgtaattttaacgggcgaagaccttgttaaagacggcgaggaagtaaaaagaacaggcaaggttgtgtctattccttccggtaaagcgtttttcggcagggtggtaaatccgttaggcgaagctcttgacggcaagggaccggtaacagccgaagtttttatgccgatggaagctcccgccgcgcctgtaatcgaccgcggaagcgtggatactccgcttcaaacgggatgtatttccattgacgcgatgattccaatcgggcgcggtcagcgagaactgataatcggcgaccgccagacggggaaaacagccatcgccattgatacgataattaaccaaaaaggaaaaaatgttatctgtatatactgcgctatcgggcaaaaggcatcttcgatagtggcgattatgaattatcttgagaaacacggcgcgatggactacacatttgtagtgcttgcgtccgcttccgattcggcggctcttcaatatattgcgccttattcggcggtcgcaatggcggaacattttttacatcagggaaaagacgtgcttgttgtttacgacgatctttcaaagcacgccgtcgcttacgcgcgatcagtttgcttctgcgccgccctccgggacgcgaggcttttcccggcgatgtgttttatcttcattcgcggcttttggaacgggcggtaa

SEQ ID NO: 70976 - protein, 300 aa, Unknown
  Obtained from environmental sample
  DOMAIN (23)...(91): ATP synthase alpha/beta family, beta-barrel domain
  misc_feature (1)..(300): Xaa is any amino acid
MANYDDLTKVLKERIENWKGQASSGSGGFVVQVGDSVATVYGLNDAVYGEMVEFASGAHGIVFNLEEENAGCVILTGEDLVKDGEEVKRTGKVVSIPSGKAFFGRVVNPLGEALDGKGPVTAEVFMPMEAPAAPVIDRGSVDTPLQTGCISIDAMIPIGRGQRELIIGDRQTGKTAIAIDTIINQKGKNVICIYCAIGQKASSIVAIMNYLEKHGAMDYTFVVLASASDSAALQYIAPYSAVAMAEHFLHQGKDVLVVYDDLSKHAVAYARSVCFCAALRDARLFPAMCFIFIRGFWNGR

SEQ ID NO: 70977 - DNA, 414 bp, Unknown
  Obtained from environmental sample
  misc_feature (1)..(414): n is a, c, g, or t
atgttccgccattgcgaccgccgaataaggcgcaatatattgaagagccgccgaatcggaagcggacgcaagcactacaaatgtgtagtccatcgcgccgtgtttctcaagataattcataatcgccactatcgaagatgccttttgcccgatagcgcagtatatacagataacattttttcctttttggttaattatcgtatcaatggcgatggctgttttccccgtctggcggtcgccgattatcagttctcgctgaccgcgcccgattggaatcatcgcgtcaatggaaatacatcccgtttgaagcggagtatccacgcttccgcggtcgattacaggcgcggcgggagcttccatcggcataaaaacttcggctgttaccggtcccttgccgtcaagagcttcgcctaa

SEQ ID NO: 70978 - protein, 137 aa, Unknown
  Obtained from environmental sample
  misc_feature (1)..(137): Xaa is any amino acid
MFRHCDRRIRRNILKSRRIGSGRKHYKCVVHRAVFLKIIHNRHYRRCLLPDSAVYTDNIFSFLVNYRINGDGCFPRLAVADYQFSLTAPDWNHRVNGNTSRLKRSIHASAVDYRRGGSFHRHKNFGCYRSLAVKSFA

SEQ ID NO: 70979 - DNA, 684 bp, Unknown
  Obtained from environmental sample
  misc_feature (1)..(684): n is a, c, g, or t
ttgcttctgcgccgccctccgggacgcgaggcttttcccggcgatgtgttttatcttcattcgcggcttttggaacgggcggtaaaactttcaccgtcaaagggcggcggttcaattaccgcgatgcccattgtagaaactcaagcaggcgacatttcgtcctacattcccaccaacgtaatttcgataacggacggacagattttccttgattccgaattgtttaattccggtttccgtcctgcgatagacgttggtctttcggtaagccgcgtcggaggttccgcgcagacaaaggcgatgcggaaaatttcagggcgcataagactggacttagcgcagtaccgcgagatggcggcgtttgcgcagttcggcagtgatttggatagggctactcaggataaattggcgcaaggcgaaagacttatggaagtgcttaagcagccgcagtattcgccgtatcatattgaggaacagatagtaattcttttccttgcggtggaaggttttcttcttgatgttaaaacggaaaatgtttccgcgtttgtaaaagattttttattgcaccttaaaagcgggaaggcggatttacttaagaacattgcggagacgggagttgtttccaaagaacaggaagacgaattacgcatagcaattgagtcctttaagggagcaaggaaataa

SEQ ID NO: 70980 - protein, 227 aa, Unknown
  Obtained from environmental sample
  DOMAIN (1)...(90): ATP synthase alpha/beta family, nucleotide-binding domain
  misc_feature (1)..(227): Xaa is any amino acid
MLLRRPPGREAFPGDVFYLHSRLLERAVKLSPSKGGGSITAMPIVETQAGDISSYIPTNVISITDGQIFLDSELFNSGFRPAIDVGLSVSRVGGSAQTKAMRKISGRIRLDLAQYREMAAFAQFGSDLDRATQDKLAQGERLMEVLKQPQYSPYHIEEQIVILFLAVEGFLLDVKTENVSAFVKDFLLHLKSGKADLLKNIAETGVVSKEQEDELRIAIESFKGARK

SEQ ID NO: 70981 - DNA, 897 bp, Unknown
  Obtained from environmental sample
  misc_feature (1)..(897): n is a, c, g, or t
atgtctaatttaagagatgtgcgcctgcggatgcgggctattgaacagacattacaggtaaccaaggcgatgaaccttatctctaccgcaaaactgcgcaagggacggaagatgctcgcggataccgtgccgtatttcagcaggattcaaaaagcaatgttcgatattctttccagcgagaaaaatattgacagtgtatttttcaaaaaacaagataaggagtcaaagcctccgcgtaccgcggtaattgtcataaccagcgacaaggggcttgcaggcggctataatgcgaatatttaccgccatgtagacgagctttgcaaaaagctgcggaatcctgtgctgatacttatcggcggcaatgtcggctatcgctattttggtcattctccgtatgtaattctggaaaacttttcttttcatccgcagatacccacagtggaacacgccggagaagtttccgagtatgtggtttctcagctcatttgggaaatttttgattcggtgcatattgtttataccaatatgttcagcatggtaaaacttttgccggtagatcatcaaataattccgcctgtaaaagaaaaaatacaaaatggtattttggaaatcggcggagtaaagagagtggatttaaagtttgaattcctgccgactacagaggcggtttttgatacgctggttccccaatatataaagggcgtaatttacggggcgatggtggaagcgtacgcaagcgaacagagcgctcgcatgaaggcaatggacgaagcttccaagagcgccgaagatatgctcgcttctctgcggataagttacaaccgcgcgcgtcaggcgggcattacgcaggaaatggcggaaataacaggcggttctacagcgctggctgataggtag

SEQ ID NO: 70982 - protein, 298 aa, Unknown
  Obtained from environmental sample
  DOMAIN (2)...(295): ATP synthase
  misc_feature (1)..(298): Xaa is any amino acid
MSNLRDVRLRMRAIEQTLQVTKAMNLISTAKLRKGRKMLADTVPYFSRIQKAMFDILSSEKNIDSVFFKKQDKESKPPRTAVIVITSDKGLAGGYNANIYRHVDELCKKLRNPVLILIGGNVGYRYFGHSPYVILENFSFHPQIPTVEHAGEVSEYVVSQLIWEIFDSVHIVYTNMFSMVKLLPVDHQIIPPVKEKIQNGILEIGGVKRVDLKFEFLPTTEAVFDTLVPQYIKGVIYGAMVEAYASEQSARMKAMDEASKSAEDMLASLRISYNRARQAGITQEMAEITGGSTALADR

SEQ ID NO: 70983 - DNA, 1230 bp, Unknown
  Obtained from environmental sample
  misc_feature (1)..(1230): n is a, c, g, or t
atggcaaacaagggatatattactcaagtaatcggacccgttgtagacgttcgttttgaacaggggcaggttcctctgattttaaatgcgttgaaagtgaaaaccgagcgtattgttactcttgaagtccttcagcatatcggcgacaactgtgtgcgctgtgttgcgatgtccgccgccgagggattgtcccgcgggcttgaagttgaggatacaggcaaaccgatcagcgtgccggtcggcaaggaagtgctgggacgaatgttcagcgtaaccggcgatcccattgacgacaagggagcgttcagcgcatcgcaatatgagtcgatacaccgtgatgcgcccggcttcagcgaactgcgtccggcgaccgcactgcttgaaacgggaataaaagtaatagatttaattgcgccctacgcgaagggcggaaagattggactgttcggcggcgccggagtagggaagacagtcgttatcatggaacttatccgcaacatagcgacggaacattcgggctactcggtgtttgccggtgtcggcgaacgttcgcgcgaaggagccgacctttggaaagaaatgaccgagagcggcgttatcgaaaagacagcgcttgtttttgggcagatgaacgaaccgcccggagcgagaatgagagtagcgcttgccggtcttaccatggcggaacattttagagatcaggacaggcaggacgttcttttatttgtcgataatattttccgctttattcaggcgggcgcggaagtatccgctcttctcgggcgcataccaagcgcggttggttatcaaccgacgcttgctaacgagatgggcagtcttcaggagaggattgcaagcacatcaaaaggatcgattaccagtattcaggcggtttatgttccagccgacgaccttaccgatcctgcgcctgcgacaaccttcgcccacttagacgcaaccaccacactgtcgcgcaaaattgtagagttgggaatttatccctctgtcgatcctcttgcttcaagctcccgtattcttgacgcggcgatagtaggcgaagatcattacaacaccgcccgcagagctcagcagattttgcaacggtacaaagagttacaggatataatcgccattttgggaatggacgagctttcagaggaagacaaactcacagtcgccagggcaagaaagatacangcgctttttcagccagccgtttttcgtcggtga

SEQ ID NO: 70984 - protein, 409 aa, Unknown
  Obtained from environmental sample
  DOMAIN (356)...(409): ATP synthase alpha/beta chain, C terminal domain
  misc_feature (1)..(409): Xaa is any amino acid
MANKGYITQVIGPVVDVRFEQGQVPLILNALKVKTERIVTLEVLQHIGDNCVRCVAMSAAEGLSRGLEVEDTGKPISVPVGKEVLGRMFSVTGDPIDDKGAFSASQYESIHRDAPGFSELRPATALLETGIKVIDLIAPYAKGGKIGLFGGAGVGKTVVIMELIRNIATEHSGYSVFAGVGERSREGADLWKEMTESGVIEKTALVFGQMNEPPGARMRVALAGLTMAEHFRDQDRQDVLLFVDNIFRFIQAGAEVSALLGRIPSAVGYQPTLANEMGSLQERIASTSKGSITSIQAVYVPADDLTDPAPATTFAHLDATTTLSRKIVELGIYPSVDPLASSSRILDAAIVGEDHYNTARRAQQILQRYKELQDIIAILGMDELSEEDKLTVARARKIXALFQPAVFRR

SEQ ID NO: 70985 - DNA, 411 bp, Unknown
  Obtained from environmental sample
  misc_feature (1)..(411): n is a, c, g, or t
atgtcagctttatttacttttgaggtttatacgcccaaacggctcttttattcgggcaaggtgcaggcgataaccatcagtcttgatgacggcgaaatcggaatatacgcaaaccatgctccgttttccgcgcactctgttaccggaatgcttcgcattaaagacgacaccggcaactggcgctccgcatttgtctgcggcggcattttggaagtgaaagaatttaaagatgtgttgatggttgagagcgccgaatggcccgaagaaataaatattgagcgtgttcttgaacttaaaaagcaagccgaagaaatattgaaggatacgcatttaaaatttgagattgataaagccaaaaaacaactgcaccacgctgaatgcagactgacagttttagaaactatgaaatag

SEQ ID NO: 70986 - protein, 136 aa, Unknown
  Obtained from environmental sample
  DOMAIN (4)...(86): ATP synthase, Delta/Epsilon chain, beta-sandwich domain
  misc_feature (1)..(136): Xaa is any amino acid
MSALFTFEVYTPKRLFYSGKVQAITISLDDGEIGIYANHAPFSAHSVTGMLRIKDDTGNWRSAFVCGGILEVKEFKDVLMVESAEWPEEINIERVLELKKQAEEILKDTHLKFEIDKAKKQLHHAECRLTVLETMK

SEQ ID NO: 70987 - DNA, 351 bp, Unknown
  Obtained from environmental sample
  misc_feature (1)..(351): n is a, c, g, or t
atggcaaagaaacgagaagcatatgtttatcatgacttggaattcaagattaaacttgtaaagctttatcttgaaggaaatggcggttatagggcacttgcaagagaatatggaataaaaaactcaacacagcttagagattgggtaaaaaaatataagaacggcgatcttactgaagaaaattcagacagacgaggcaaatgtacttttcttaaaaaaagcttcaaggacagagatgaggaaatggaatacttgaaacatgagaatgaatatcttaaaaaaaaattgcttttaatgggcgagccgcagagctccattgcaaatttatggtcatcaaagaatctaaagtaa

SEQ ID NO: 70988 - protein, 116 aa, Unknown
  Obtained from environmental sample
  DOMAIN (14)...(85): Transposase
  misc_feature (1)..(116): Xaa is any amino acid
MAKKREAYVYHDLEFKIKLVKLYLEGNGGYRALAREYGIKNSTQLRDWVKKYKNGDLTEENSDRRGKCTFLKKSFKDRDEEMEYLKHENEYLKKKLLLMGEPQSSIANLWSSKNLK

SEQ ID NO: 70989 - DNA, 840 bp, Unknown
  Obtained from environmental sample
  misc_feature (1)..(840): n is a, c, g, or t
atggtcatcaaagaatctaaagtaaaattaagtatagcgaaaaaatgccgtgttttagaggtaaatcgaagcagttattataaatggcttaataaaaaaccattaaaaattgacgaaaatgccgaagcggaaataataaaattatatcataaacataaaggcacatacggaagggcaagaatcacacaggcgcttaaaaacgagggaatcgttataaatcacaagaaagtataccgtataatgcgtaaattaggcttaaaagccgttatacgcaagaaatggagtatcaggaaatatgttaaagaaaacgtggcttgtaatatattgaatcgcgaatttaatactgatgaaccgtttaagaaattgacatgcgatgtaacagaaatgaaacgcgttaatgacaaccgttattatttattcagcgtaatggatttatataataacgccataatctgcgcgagcatgtcagagcataacgactgggggcttgtcgcaaaagggcttgaaaagattccctgtcaagccgagaaaatattgcttcattccgatcagggaccgcagtttacttcaaaggcgtatcatgaattaaccggacaaaagaatatagtgttgtcgatgtcacgggtaggaaactgttatgataacgccgttaaagaaagttttttcgggcattttaaggaggaattttatgtttattataaccctaaaacgcaggaggagttatatcaaaatgtaagcgatttcattgaatattacaataatgacagaattcaaatgaggtttaaaatgagccctgttcagtatttaaaaaagaataaaatacagactgagtttttataa

SEQ ID NO: 70990 - protein, 279 aa, Unknown
  Obtained from environmental sample
  DOMAIN (114)...(270): Integrase core domain
  misc_feature (1)..(279): Xaa is any amino acid
MVIKESKVKLSIAKKCRVLEVNRSSYYKWLNKKPLKIDENAEAEIIKLYHKHKGTYGRARITQALKNEGIVINHKKVYRIMRKLGLKAVIRKKWSIRKYVKENVACNILNREFNTDEPFKKLTCDVTEMKRVNDNRYYLFSVMDLYNNAIICASMSEHNDWGLVAKGLEKIPCQAEKILLHSDQGPQFTSKAYHELTGQKNIVLSMSRVGNCYDNAVKESFFGHFKEEFYVYYNPKTQEELYQNVSDFIEYYNNDRIQMRFKMSPVQYLKKNKIQTEFL

SEQ ID NO: 70991 - DNA, 627 bp, Unknown
  Obtained from environmental sample
  misc_feature (1)..(627): n is a, c, g, or t
atgcttaataaattcataaaatttgtaggtggaaattttggaaatcccaatggatttgcaggaaaaatatccactaaaataatgaatataataaataaaagacaatataaagcaatattggataatattaatttagaacaaaatgatatattattagatattgggtttggaaatggatattttataaataaattattcaaaaaaaatatcccaataaatatatatggaatagaaatatctaatgatatgataaaaaatgtgtcaaaaaaatataataaatatattgaaaatggtttattaaaattatctttagaaaatatcgtaagtacatcatttgaaaatgcaacatttaataaaatatatacaataaatacaatatatttttggaatgagttggaaaaatgtttttctgaaataaaaagaatattaaagccaaaagggatatttttaaatgcaatttatacaaaagaatatttggataatataatatatacaaaatatggttttaataaatattctataaaggatataataaaaataaccgaagaaaatggaatgaaaataaataaaatagtggaaataaagaaaaataaaatatattgtataatatcggaaaatgataaataa

SEQ ID NO: 70992 - protein, 208 aa, Unknown
  Obtained from environmental sample
  DOMAIN (32)...(207): Putative methyltransferase
  misc_feature (1)..(208): Xaa is any amino acid
MLNKFIKFVGGNFGNPNGFAGKISTKIMNIINKRQYKAILDNINLEQNDILLDIGFGNGYFINKLFKKNIPINIYGIEISNDMIKNVSKKYNKYIENGLLKLSLENIVSTSFENATFNKIYTINTIYFWNELEKCFSEIKRILKPKGIFLNAIYTKEYLDNIIYTKYGFNKYSIKDIIKITEENGMKINKIVEIKKNKIYCIISENDK

SEQ ID NO: 70993 - DNA, 1269 bp, Unknown
  Obtained from environmental sample
  misc_feature (1)..(1269): n is a, c, g, or t
ttgttacgcttttttttgttttttttgcgtcggtatgtaaaaattatatatttttcatactatggacagaccgcgcacgataaaagccccgccggcgctggatcgctcttgggtcgccgcgtgcggtcttttgagcggcgtaaggcccggcagccgcctgacgctcgacctatccgagacggtgcgtatcgactcggcgggcgtctgcttcatagagctcctgcgcaggatgcaccgcgagcagggcggcgaattcgccctgcagggcgccagtcggcagataacgaaccagctggccgccgaaagaaaagccgccgccgtcgcggcgccgcccgccaaagacgggcttatcgaacgcatcggcggcgccgccgcggccgccgtgagcacgtcggtggacgccctatccttccttgccgagatgctctactggagcacaataggcttcttcaaacgccagaatataaaaaagggcgccctctacgagcagatgtaccagctcggctacaaggccgtgggaatcatagcgctgctctctttccttataggcatagtgctctcgctgcagagcgccaagcagctcaagacgcttgggatgggcatcttcttggtcccgctaatcggcatcaccatgattcgccagatgggcccgctgctgaccgctataatcctcgccggccgcaccggcagcgccacgacggccgaaatcgccacgatggtggtcggggaggaggtagacgccctgcgcgccatgggcgtgaaccccatgcagtacataatggccccgaagttctgggccatatccctcacaatgccgctgctctccataatcgccacggcgacggggatactcggcgggtacgtgatagcgttcctgtatttggacatgacttcgtccatgtttatgcgggagctcgccaaagtgataaaactggaacatatattgtccggctgcttcaagtccatggtcttcgcctggctaatcatctggattggctgttacttcggcttcagggtgaggggcggcgcggaggcggtggggagggagactacgtcgagcgtggtggccggaatctttataataattgtggcgaacgctttgttctcgtttgtgatgtgatttttgggatatttgcgatgttcttgattggcttcgccgagattaaacggttgcatggtttcgctcttaacgaaagtcgtcattgcgaggagcgaagcgatgaagcaatccggtatgtactatcaatttcaatgaccaggaggcattaa

SEQ ID NO: 70994 - protein, 422 aa, Unknown
  Obtained from environmental sample
  misc_feature (1)..(422): Xaa is any amino acid
MLRFFLFFLRRYVKIIYFSYYGQTAHDKSPAGAGSLLGRRVRSFERRKARQPPDARPIRDGAYRLGGRLLHRAPAQDAPRAGRRIRPAGRQSADNEPAGRRKKSRRRRGAARQRRAYRTHRRRRRGRREHVGGRPILPCRDALLEHNRLLQTPEYKKGRPLRADVPARLQGRGNHSAALFPYRHSALAAERQAAQDAWDGHLLGPANRHHHDSPDGPAADRYNPRRPHRQRHDGRNRHDGGRGGGRRPARHGREPHAVHNGPEVLGHIPHNAAALHNRHGDGDTRRVRDSVPVFGHDFVHVYAGARQSDKTGTYIVRLLQVHGLRLANHLDWLLLRLQGEGRRGGGGEGDYVERGGRNLYNNCGERFVLVCDVIFGIFAMFLIGFAEIKRLHGFALNESRHCEERSDEAIRYVLSISMTRRH

SEQ ID NO: 70995 - DNA, 1059 bp, Unknown
  Obtained from environmental sample
  misc_feature (1)..(1059): n is a, c, g, or t
atggacagaccgcgcacgataaaagccccgccggcgctggatcgctcttgggtcgccgcgtgcggtcttttgagcggcgtaaggcccggcagccgcctgacgctcgacctatccgagacggtgcgtatcgactcggcgggcgtctgcttcatagagctcctgcgcaggatgcaccgcgagcagggcggcgaattcgccctgcagggcgccagtcggcagataacgaaccagctggccgccgaaagaaaagccgccgccgtcgcggcgccgcccgccaaagacgggcttatcgaacgcatcggcggcgccgccgcggccgccgtgagcacgtcggtggacgccctatccttccttgccgagatgctctactggagcacaataggcttcttcaaacgccagaatataaaaaagggcgccctctacgagcagatgtaccagctcggctacaaggccgtgggaatcatagcgctgctctctttccttataggcatagtgctctcgctgcagagcgccaagcagctcaagacgcttgggatgggcatcttcttggtcccgctaatcggcatcaccatgattcgccagatgggcccgctgctgaccgctataatcctcgccggccgcaccggcagcgccacgacggccgaaatcgccacgatggtggtcggggaggaggtagacgccctgcgcgccatgggcgtgaaccccatgcagtacataatggccccgaagttctgggccatatccctcacaatgccgctgctctccataatcgccacggcgacggggatactcggcgggtacgtgatagcgttcctgtatttggacatgacttcgtccatgtttatgcgggagctcgccaaagtgataaaactggaacatatattgtccggctgcttcaagtccatggtcttcgcctggctaatcatctggattggctgttacttcggcttcagggtgaggggcggcgcggaggcggtggggagggagactacgtcgagcgtggtggccggaatctttataataattgtggcgaacgctttgttctcgtttgtgatgtga

SEQ ID NO: 70996 - protein, 352 aa, Unknown
  Obtained from environmental sample
  DOMAIN (104)...(352): Domain of unknown function DUF140
  misc_feature (1)..(352): Xaa is any amino acid
MDRPRTIKAPPALDRSWVAACGLLSGVRPGSRLTLDLSETVRIDSAGVCFIELLRRMHREQGGEFALQGASRQITNQLAAERKAAAVAAPPAKDGLIERIGGAAAAAVSTSVDALSFLAEMLYWSTIGFFKRQNIKKGALYEQMYQLGYKAVGIIALLSFLIGIVLSLQSAKQLKTLGMGIFLVPLIGITMIRQMGPLLTAIILAGRTGSATTAEIATMVVGEEVDALRAMGVNPMQYIMAPKFWAISLTMPLLSIIATATGILGGYVIAFLYLDMTSSMFMRELAKVIKLEHILSGCFKSMVFAWLIIWIGCYFGFRVRGGAEAVGRETTSSVVAGIFIIIVANALFSFVM

SEQ ID NO: 70997 - DNA, 540 bp, Unknown
  Obtained from environmental sample
  misc_feature (1)..(540): n is a, c, g, or t
atgacgcaaaacaaaaatttcgacttggacgccgctatacgcaaagtccccgactttcccaaacccgggatactcttctacgatatcaccagcatcttcacagacccgccggcctacaagtacgtggttgacgagatgctgaaccgctacaagggcgccaagattgacggcgtcatagccattgagagcagaggcttcctgcttggctcctgcttcgcctacgctaacggcgttccgctcgtcttggcgcggaaaaagggcaaattgcctagaaaaacggtagagatgagctatagcttagagtacggctcggccacgttggagatacacgaggaggacatagagctcgggcacaggtggctgataatcgacgacctgatagccacaggcgggacgctcgccgcggtcgccgcaatgattgaggggaaaggcggggagattgcgggaatattctccattatcgggctgccgtttctggggtttaaggagaaagtaggaaagtacgggccgattacgcttattgattatgatagcgagtag

SEQ ID NO: 70998 - protein, 179 aa, Unknown
  Obtained from environmental sample
  DOMAIN (28)...(164): Phosphoribosyl transferase domain
  misc_feature (1)..(179): Xaa is any amino acid
MTQNKNFDLDAAIRKVPDFPKPGILFYDITSIFTDPPAYKYVVDEMLNRYKGAKIDGVIAIESRGFLLGSCFAYANGVPLVLARKKGKLPRKTVEMSYSLEYGSATLEIHEEDIELGHRWLIIDDLIATGGTLAAVAAMIEGKGGEIAGIFSIIGLPFLGFKEKVGKYGPITLIDYDSE

SEQ ID NO: 70999 - DNA, 1947 bp, Unknown
  Obtained from environmental sample
  misc_feature (1)..(1947): n is a, c, g, or t
ttgcatatcagcgtggtttttgggggcgaaagccgttcttccgcacaaagcctatcgaaaaaagcggcgtccggggattgggctataaccgtctcggcggcggggtacgttgataccacatacccgtttaggcccaaggctgggatgaacgccaggcagaacatagagttgcgcgcagcgccggtgaacggtcacgaggtaatagttttaagcgcgggtacgggcgcgaccggcggcggcgtttacgcggtgggcacgacggtcaacataacggcggggacgccgccgaccgggcagcagttcaaagattggacgtcgtcggcaagcaacgtaatatttgcaaacgctaatagcgccgcgaccatgttcataatgcccgcaaacgcggtgacggtaacggcgaactttgaggcggcggtcaagtccacatacgctgtgtcggtgtccgccggtatgggttcgaccggcgcgggcaattacgaggcgggcgcgacggtcagcataacggtaggaacgccgccaacgggaaaacggttcaaaaactggagcggcggagtatcgtttgccaacgcgagcagcgagtcgactacgtttaccatgcccgcgaacgccgtaacagtaacggcggtgtttgaggatatatccaccacgccaaccacatacgcggttacggttacaagcgcgggtactggcgcgaccggcggcggcaattacgcgtccggcgcaacggtcagcataaacgcgggaacggcgccgtccggctatgtgttcaaccaatggaccggcacttcaggcgtaaacttcaccaacgcgaacagcgcggcgactacgtttaccatgccctcaaacgccgtaacggtaacggctaactttgtgatggtcacataccatgtaacggtttcaagcacaggtacgggagcgaccggcggcggggattacacgcagggtatgacggtcagcatatcggcggggacgccgccgtccggccaagtattcgacaaatggacctcttcaagcaacggcgtaaacttcgccaacgcgaacagcgcgtcgacggcgtttactatgcccgcgaacgccgtagcggtaacggcgggctttaaggtggcgcctacgtacaaagtgacgatttcaggcggttatgtggtgaacaatagcgatagttacgcggtgggaacgccgatcagcataaaggcgggaagatcgatcggtgggcgaggatttggaagttggatatgtaatagcggatgtcaagatataaccattgatcttactaaaccggaagccacgtttaccatgcccgcgcacgacataaagattactgtgaaatttgcggatgagttcacagatgatagagacggtacattatacaaaacagtgaccatagacggaaaaacatggatgaagtgggaactatcttataaaccgacgtcgggtaattcttggtgttatgacggcaaatcccaaaattgtacagacttcggtaggttgtacgattacaagactgcggcaggtggatattttgcgtttaaagaagaagggaaaccgggtttgcggggcatttgtcctgcagggtggcacatgcctagccgttgggagtggggagagttggctaaggccgccggcggcacaggcgattatggcgccgaaggtgcgggtggtaacgcgctgaaatcaacaagcggttgggggaatagcggcaacggtactgatattttgggttttgaggcacgtcccaacggttaccgcaccccaaacggtgctttcaacaatttcggcaaacgcgtcggatggtggacaatatcgggaacgacatatataaaaaatggcgaggaatactttgataaaggctatcgccggtatctaggcaatgacttcgacaacgtagatgaggaagccgtcaatccggactacggtttttatgtgcgttgcgtagaaaattggtag

SEQ ID NO: 71000 - protein, 648 aa, Unknown
  Obtained from environmental sample
  misc_feature (1)..(648): Xaa is any amino acid
MHISVVFGGESRSSAQSLSKKAASGDWAITVSAAGYVDTTYPFRPKAGMNARQNIELRAAPVNGHEVIVLSAGTGATGGGVYAVGTTVNITAGTPPTGQQFKDWTSSASNVIFANANSAATMFIMPANAVTVTANFEAAVKSTYAVSVSAGMGSTGAGNYEAGATVSITVGTPPTGKRFKNWSGGVSFANASSESTTFTMPANAVTVTAVFEDISTTPTTYAVTVTSAGTGATGGGNYASGATVSINAGTAPSGYVFNQWTGTSGVNFTNANSAATTFTMPSNAVTVTANFVMVTYHVTVSSTGTGATGGGDYTQGMTVSISAGTPPSGQVFDKWTSSSNGVNFANANSASTAFTMPANAVAVTAGFKVAPTYKVTISGGYVVNNSDSYAVGTPISIKAGRSIGGRGFGSWICNSGCQDITIDLTKPEATFTMPAHDIKITVKFADEFTDDRDGTLYKTVTIDGKTWMKWELSYKPTSGNSWCYDGKSQNCTDFGRLYDYKTAAGGYFAFKEEGKPGLRGICPAGWHMPSRWEWGELAKAAGGTGDYGAEGAGGNALKSTSGWGNSGNGTDILGFEARPNGYRTPNGAFNNFGKRVGWWTISGTTYIKNGEEYFDKGYRRYLGNDFDNVDEEAVNPDYGFYVRCVENW

SEQ ID NO: 71001 - DNA, 591 bp, Unknown
  Obtained from environmental sample
  misc_feature (1)..(591): n is a, c, g, or t
gtgctgaaaatcccgaatcaggacggtattgtccacactgttaaaaaaggggaaaacctaagcgctatagcggaaaaatacaaggcaaatactgaagccataaaaaccgttaatgaacttttttccgacaaaataacaccgggaacagaactttttattcccggagccaagcttgattggtcaacactacaggaaattaacggcgatttatttatgtggcctgttaacggcaatattacgtcatccttcggctggaggagagacccctttaacagaagccgccgccagcttcacaacggtattgatattaaaagcagcaccggcacgcctgtcagggcggcaatggctggaagggtaagtgcggtagggtatgacaatgttttcggtaattatgtattaatcagccacaactctggatatcgcaccctctacggacacatgcatgtaatcaggacaaaaacaggctcttatgtcgcccagggagaacgcatcggggacgtaggcaatacgggtcagagtacagggtcccaccttcactttacagtttacaaaaacggcgtcgccaccaacccgcgcgtattacttagatag

SEQ ID NO: 71002 - protein, 196 aa, Unknown
  Obtained from environmental sample
  DOMAIN (12)...(54): LysM domain
  misc_feature (1)..(196): Xaa is any amino acid
MLKIPNQDGIVHTVKKGENLSAIAEKYKANTEAIKTVNELFSDKITPGTELFIPGAKLDWSTLQEINGDLFMWPVNGNITSSFGWRRDPFNRSRRQLHNGIDIKSSTGTPVRAAMAGRVSAVGYDNVFGNYVLISHNSGYRTLYGHMHVIRTKTGSYVAQGERIGDVGNTGQSTGSHLHFTVYKNGVATNPRVLLR

SEQ ID NO: 71003 - DNA, 1968 bp, Unknown
  Obtained from environmental sample
  misc_feature (1)..(1968): n is a, c, g, or t
ttgtcaacttttataaaaccgcttgtagcgttaataatttccattctcttgtttgtcgggcttattttcctagcgcatggaaatttattggattttgtagagtctcatttttttaatccttcggttgtcaattcttatgttaaggaaaacgcggcagattcgcaaattgttcaaaagcatattaataaccttaaaagcaagttttacgctaccctgacaatacccgccattcgcagcagttttttatataaccagagtcccaatgatatttttgaacgttcaaaagtatacggaatactgatggaatcaacatcggggcttcaatcggtgcaatttgtggacagtaacggaataaggattcattattcaacttccgcgcgcgatataatgagtcaggatcaaagatcgacagcttatcgtaattataacgaaaacccgatgtccctgccttatgaagtagtcggcgttgaagacgctaatcacgccaaacttataatggacgatcaaaatgacagaattatcttttcatacccttttagggattcaatggacgttttccgtgggaccgcgcttttttccgtatcaatcagggcgtttaccgaaagacttgtcgaagccgggcggttaaaaataagcgacaatgtttccataataaacgagccgtcgggaattattttgggaagccccgaaacatcaaaaaccgctattttaaaaagaattgcggaagcatggaacgaaggtattaaagattatattactcttgacgcggaagattccggggcggctttttctcttatttcgacaaaaacagatcaaaacttattttttggtcgtttggttaacagtgatttattttcaatttcagagccaatgaagctaattttaaatgtttctatttttttgacattcttcctgacattctttttcctgataaatcttaaacctaatcccgttgcggttgtacgcaatcgtataaggcgtttaagagaaagtttttttgaacaaataggcgatgataaatccgttcaggaaaaagcaaaattggtgctggaactggaacagcgtcaggatgaaatttacagtcagttaaaacgcggtattaaattaaaccgccggttggaagcgattcttaacggtatcattgataaatcgtgggaagaaatactgatctatcttaaagtcagcagcggtcatgaattatcttctattcatactgttaagggtattgcaaaaaaagcggaagcgaagactgaccaaaaaccggaagaagttgacgtaatagacgaagtagaaactctggaagccgaagaagttgataaaattacggaagccgaaccactggaagaaattgacgaagtagaagcgcttgaagaagctgaaccgatagaggaaatagaagaggcggagtctattgaagaagctgaagccttagaagagattgaagaaataggggaaattgaggaagcggagccaattgaagaaatcgaggaaattgaaccattagaagaaatcgaagaagcggaagcgattgaatcagccaaaccgccgcccaaaaaagccgagaaacccccaaaagttgaaaaaccgaatataattgacattgctctccgcgccgccatggaacccgaaccccgccgaggagggctttttgggcgcgccagtaaaatcagcgaaaagaaatcttcctcgggcaaagggcttcttaacaaggcaagtaaaaaagcgacaaaaaaagccgccggcaaaggacttttggctcgagccggcgaacttgaaaagcccgcttccaaaggcaaggggcttcttgcccgagcaaacaaaaaagctcgccgcggcaagggacttttggcttatgccgatgaaattggcgctgaagataacaatgaagatgctcaggatttaaatattgacgtagctgtggtatcgccgttctcgtctatgttttcgactttatcggaaaaagaataa

SEQ ID NO: 71004 - protein, 655 aa, Unknown
  Obtained from environmental sample
  SIGNAL (1)...(27)
  misc_feature (1)..(655): Xaa is any amino acid
MSTFIKPLVALIISILLFVGLIFLAHGNLLDFVESHFFNPSVVNSYVKENAADSQIVQKHINNLKSKFYATLTIPAIRSSFLYNQSPNDIFERSKVYGILMESTSGLQSVQFVDSNGIRIHYSTSARDIMSQDQRSTAYRNYNENPMSLPYEVVGVEDANHAKLIMDDQNDRIIFSYPFRDSMDVFRGTALFSVSIRAFTERLVEAGRLKISDNVSIINEPSGIILGSPETSKTAILKRIAEAWNEGIKDYITLDAEDSGAAFSLISTKTDQNLFFGRLVNSDLFSISEPMKLILNVSIFLTFFLTFFFLINLKPNPVAVVRNRIRRLRESFFEQIGDDKSVQEKAKLVLELEQRQDEIYSQLKRGIKLNRRLEAILNGIIDKSWEEILIYLKVSSGHELSSIHTVKGIAKKAEAKTDQKPEEVDVIDEVETLEAEEVDKITEAEPLEEIDEVEALEEAEPIEEIEEAESIEEAEALEEIEEIGEIEEAEPIEEIEEIEPLEEIEEAEAIESAKPPPKKAEKPPKVEKPNIIDIALRAAMEPEPRRGGLFGRASKISEKKSSSGKGLLNKASKKATKKAAGKGLLARAGELEKPASKGKGLLARANKKARRGKGLLAYADEIGAEDNNEDAQDLNIDVAVVSPFSSMFSTLSEKE

SEQ ID NO: 71005 - DNA, 630 bp, Unknown
  Obtained from environmental sample
  misc_feature (1)..(630): n is a, c, g, or t
ttgccgcggcgagcttttttgtttgctcgggcaagaagccccttgcctttggaagcgggcttttcaagttcgccggctcgagccaaaagtcctttgccggcggctttttttgtcgcttttttacttgccttgttaagaagccctttgcccgaggaagatttcttttcgctgattttactggcgcgcccaaaaagccctcctcggcggggttcgggttccatggcggcgcggagagcaatgtcaattatattcggtttttcaacttttgggggtttctcggcttttttgggcggcggtttggctgattcaatcgcttccgcttcttcgatttcttctaatggttcaatttcctcgatttcttcaattggctccgcttcctcaatttcccctatttcttcaatctcttctaaggcttcagcttcttcaatagactccgcctcttctatttcctctatcggttcagcttcttcaagcgcttctacttcgtcaatttcttccagtggttcggcttccgtaattttatcaacttcttcggcttccagagtttctacttcgtctattacgtcaacttcttccggtttttggtcagtcttcgcttccgctttttttgcaatacccttaacagtatga

SEQ ID NO: 71006 - protein, 209 aa, Unknown
  Obtained from environmental sample
  SIGNAL (1)...(28)
  misc_feature (1)..(209): Xaa is any amino acid
MPRRAFLFARARSPLPLEAGFSSSPARAKSPLPAAFFVAFLLALLRSPLPEEDFFSLILLARPKSPPRRGSGSMAARRAMSIIFGFSTFGGFSAFLGGGLADSIASASSISSNGSISSISSIGSASSISPISSISSKASASSIDSASSISSIGSASSSASTSSISSSGSASVILSTSSASRVSTSSITSTSSGFWSVFASAFFAIPLTV

SEQ ID NO: 71007 - DNA, 720 bp, Unknown
  Obtained from environmental sample
  misc_feature (1)..(720): n is a, c, g, or t
atggatcttcgagatacagtactgaacactttaagggtagttgataacaacaaacaaaaagcgcaaaaagccgttgtgaattataaagctatacttcttgacggaattgttgttattggcggcgcgactaaatccattaccgaaatcatcgctaaactgcaggaaaatcaaacggtgctggaaagccggaagaaaacattttttgaggcggtaaaagagttaatcaggcaaattacaaacgccgagccggaagaagttatctacaatgtggaatctttggatcctacaaagggtattcccgttaaagaaagggtaaattttcatcaacttatggatgagttagagaaaaagaataaaattttagccagttttgtacacggtcccgcgtataataagcttgccaatatgaccgaagatcaaattattggttatttggaaaaaaatgttaaagatgtacaaacctatcacagaatcttaacctctctggatgacttttttaaggcaaatgtacagccggaagcccgtaataaaattaagggtattaagcctgaattatcacagttaaagaatacttttataaaagccaaccaactgcggtatgagtacagcgctcaaatggaagcggacgagcagatgaaacggcttggagccgctcccgacgcgcctcctccccctcctccgggtcccgccgttgcgccgcctacatcgtcaaaatcttag

SEQ ID NO: 71008 - protein, 239 aa, Unknown
  Obtained from environmental sample
  misc_feature (1)..(239): Xaa is any amino acid
MDLRDTVLNTLRVVDNNKQKAQKAVVNYKAILLDGIVVIGGATKSITEIIAKLQENQTVLESRKKTFFEAVKELIRQITNAEPEEVIYNVESLDPTKGIPVKERVNFHQLMDELEKKNKILASFVHGPAYNKLANMTEDQIIGYLEKNVKDVQTYHRILTSLDDFFKANVQPEARNKIKGIKPELSQLKNTFIKANQLRYEYSAQMEADEQMKRLGAAPDAPPPPPPGPAVAPPTSSKS

SEQ ID NO: 71009 - DNA, 693 bp, Unknown
  Obtained from environmental sample
  misc_feature (1)..(693): n is a, c, g, or t
atggcggaacaaggacaatctaactatattgatacgctccagcagactcttattgcaagaaaagattggctggaaaagactgaaatggtaaaactaaaggacgagcttaggatatatcaaatttcattcgcttctttgtacaatatttatctgaaaaagaaagtaatagacgaagatccttataaacaagatacaaaaatcagtgaaattgaggctccggaatccggtgttatgccggaagcaaggaaattagagcagctttctatcagactctcgaattttgacaaccagcttgactatttggtcaatttttaccagttaagcgtggattatcttaatcttgaccgtataaaacgtattgtcgggcttatccggtacatagattgggttagtttaacgccggattcccagtctccaatgactaaaatggtctcggaaataaccagtcacgcaaaaaccggcgttgatccgcttaccctcagcattatcggtgaaagtctttctaaattgtccaaaacaaccgcatcttcaatgaccatactaaaagatctcaatatctactatagagaaacatataaacttaatgtccgccaaagcgttacaaaagatatgtcggcgggggaagcaagtcttgagcatatcaagaaaaaaatgcataccgaaatgccgggctcgcctttttacaaggattaa

SEQ ID NO: 71010 - protein, 230 aa, Unknown
  Obtained from environmental sample
  misc_feature (1)..(230): Xaa is any amino acid
MAEQGQSNYIDTLQQTLIARKDWLEKTEMVKLKDELRIYQISFASLYNIYLKKKVIDEDPYKQDTKISEIEAPESGVMPEARKLEQLSIRLSNFDNQLDYLVNFYQLSVDYLNLDRIKRIVGLIRYIDWVSLTPDSQSPMTKMVSEITSHAKTGVDPLTLSIIGESLSKLSKTTASSMTILKDLNIYYRETYKLNVRQSVTKDMSAGEASLEHIKKKMHTEMPGSPFYKD

SEQ ID NO: 71011 - DNA, 699 bp, Unknown
  Obtained from environmental sample
  misc_feature (1)..(699): n is a, c, g, or t
gtgccaagccttgaagaagcggcgcgcacgttcggaacaagaattatccgctcatgccacgatttagaaggaactcttaccgacatttccgcaaaaatgaaagcaatgaaacacgcgggagacgaaataataaaaatagcggttgccgtaaaatccacacgcgatgtgttaaatgttttcagcgcttccggttcttttaccaatcaggataaaattctcatctgtatgggacactacggagtttattcaagaattcttgcggaaaaattcggctcttttttaacttactcaagcgcgttatctgaaagcgtcattcccggcgctcccggtcagttagatgtaaaagagctttctgaattataccatttccgcaaaataacaaaaaaaacaaaagtatacggcgtcattggcaacccgttaaagtccagcgtaagcccatggttttttaacactatttttaatcttgaagacatagatgccgtgtatgccccatttccggtaacagatgtcggtgattttatggaacttgcgaaagaaatagatatacaggggctttcggtcacagtacctttcaaggaaactgttcttccgtatcttggagaaaagtcggcgattgtacaatcaatcgaagcgtgcaataccgtataccgcaaagatgatatatgggtcggcgacaataccgatacctcggccatctga

SEQ ID NO: 71012 - protein, 232 aa, Unknown
  Obtained from environmental sample
  DOMAIN (1)...(120): Type I 3-dehydroquinase
  misc_feature (1)..(232): Xaa is any amino acid
MPSLEEAARTFGTRIIRSCHDLEGTLTDISAKMKAMKHAGDEIIKIAVAVKSTRDVLNVFSASGSFTNQDKILICMGHYGVYSRILAEKFGSFLTYSSALSESVIPGAPGQLDVKELSELYHFRKITKKTKVYGVIGNPLKSSVSPWFFNTIFNLEDIDAVYAPFPVTDVGDFMELAKEIDIQGLSVTVPFKETVLPYLGEKSAIVQSIEACNTVYRKDDIWVGDNTDTSAI

SEQ ID NO: 71013 - DNA, 2061 bp, Unknown
  Obtained from environmental sample
  misc_feature (1)..(2061): n is a, c, g, or t
atgactctcatgtccattttgagcgtaggaactagagcactgcaaacatcgcagctgggaatcgacatcacaggtcaaaacgtcgccaacgccgacgttgacgggtactcccgcaagcgtataaaccaggcgacgatgtatgcctacgactcagcctacgggcagatgggtttgggcgctcgggtggtcaacatagagaggatgcgcaacgtttttctcgatgagcagatccgcaagcagaactcggaagtcggttacttcgcccaagtcaactccacgttcaaccgcatggaggcgatactctgcgaacccagcgatctcggcatcatgcactatttagacgagttcttcgactcttgggacaaccttgccaataaccccaaggacatctcggcgcgcacgatggtaagaaccaacgcccaaatgatgatcgacaacttccacaaagccgcaacggagctccagaacctccgtgaccaaaagaacgaagaaattccggtgcacgtcgctaggatcaaccagatatccttccagattatgaacctgaaccaagaggtagcgactgtggaggccggcgatcaaaacgccaacgacagccgcgacaggcgcgaggtgctcctgaaggaactctcgcagctcatagacataacagtggtggagaacccgatggggcaggtgaccgtcaccaccggcggcaacgtgttggtcgcgccgtcctacatgcagaacttagaggtcataacggtgtcgagggagatggacgacggcaccatcatgagggacatgggcatccgctttgcggatacgcggctggacttcatacccgccggcgggcagctccgcggactcatcgacagccgcgacatctacatccccgagtatcaggccaagctcgacgaactcgccgccgccataataaaagccattaacgatgtacacgtgcagggctataaccttatggggcacagcggctttaaatttttcgacgattcggtctttgagaagaaagacgagagaaccggcttatcgaccataccgccgacatacttgcccaaatacaataaggccgccactattaggctggcgccggagatactccaagacgtacagaacatcgccgcggcttcggagcagcagtcgatcagcaggggtatgccgatgacggtgaagccgtcgacgactaaatactcgtcgttgctgaccgtcatctcgacgaatgtcggtaatccgcagcaacttttttttgaaaacaatccgagcgctcccgcgcatgatatcctgcccgattcggtcgtggtaatcgccgcgaacggcaactcgcttaccgtgggcgcaatcggttccggcatggactgcgaaatcgactacgttacgggcgagatggtattgaataacgccttgtacgccgaccagccgcttaccataaattacaagattcgcaaccaagtcggtacggacataccatcctatagctacggcgatccggcggtgcagctcgtccgcgaagacgactcgagggtgcccgcacgaaacatcatcgccaacagcgttacggtaagggtggttaccaaaaacggcgtcccggtggtcccgtccgataggatcgtgttgcaagagggccgggactacgttattgactataccttcggcactttccaaatgttgcacaccggctacgacggggaagagttcgcgatcgacttccaatactacctcggcggcttcaagggccccgacgacaacacaacagccatcgccatctcccagatccgcaacgccctgaccatgacgccggacgggataggcaaccccaccgccaccttcaccgagtacttcagctcgcttgagggccgccttgggttaaacacgttgcagtccgactcaaacctgcaaacgcgcatattcttaacggagcaatacgagacccagcaagaaagcatttccggagtctcgttagacgaagaaatggccaacctgatccgctaccaacacacctatacggcggcggctaggttgattacgacggtagatcagatgcttgaggtactgctaaacatgtga

SEQ ID NO: 71014 - protein, 686 aa, Unknown
  Obtained from environmental sample
  DOMAIN (7)...(37): Flagella basal body rod protein
  misc_feature (1)..(686): Xaa is any amino acid
MTLMSILSVGTRALQTSQLGIDITGQNVANADVDGYSRKRINQATMYAYDSAYGQMGLGARVVNIERMRNVFLDEQIRKQNSEVGYFAQVNSTFNRMEAILCEPSDLGIMHYLDEFFDSWDNLANNPKDISARTMVRTNAQMMIDNFHKAATELQNLRDQKNEEIPVHVARINQISFQIMNLNQEVATVEAGDQNANDSRDRREVLLKELSQLIDITVVENPMGQVTVTTGGNVLVAPSYMQNLEVITVSREMDDGTIMRDMGIRFADTRLDFIPAGGQLRGLIDSRDIYIPEYQAKLDELAAAIIKAINDVHVQGYNLMGHSGFKFFDDSVFEKKDERTGLSTIPPTYLPKYNKAATIRLAPEILQDVQNIAAASEQQSISRGMPMTVKPSTTKYSSLLTVISTNVGNPQQLFFENNPSAPAHDILPDSVVVIAANGNSLTVGAIGSGMDCEIDYVTGEMVLNNALYADQPLTINYKIRNQVGTDIPSYSYGDPAVQLVREDDSRVPARNIIANSVTVRVVTKNGVPVVPSDRIVLQEGRDYVIDYTFGTFQMLHTGYDGEEFAIDFQYYLGGFKGPDDNTTAIAISQIRNALTMTPDGIGNPTATFTEYFSSLEGRLGLNTLQSDSNLQTRIFLTEQYETQQESISGVSLDEEMANLIRYQHTYTAAARLITTVDQMLEVLLNM

SEQ ID NO: 71015 - DNA, 1161 bp, Unknown
  Obtained from environmental sample
  misc_feature (1)..(1161): n is a, c, g, or t
atgcaaaacctgcgcggcagatcaaacacagcctccggttcgcgccgaaaaagggcgctcggcatccccttgaaaaagcggaagtgcgtctcggcgtacagggcggcggggagcagggtctctatcattagaaaaatatacaatataacctccgccaaaacccctgaaaaattttcctaccccagaaaaaagttccgcctcatccgcccccgacccccgcaaattacctcaaaaaccgcgtttttacacccggccccgcctttggcacacgatttgctgttaataaacgccggagggaagcgcatcatgcaaatcgataatttaaatacggcctataacgcgacacgcggctcggatgctaggggctcctcggcccaaagctcgagagccgcgcaggtcgccaaagagtttgaggccatgttcacctccatgatgtttaaggcgatgcgcggcaccgtgaaggagagctctctcatacccaagaatatgggggagaacatcttcaccgaactgctcgacggcgagtacgctaagatgagttcggagagcggggcgctcgggcttgccgcgcttttagagaaagaaatagctcggtgcgaaggcaggtcgcccgcgttagacggaagcgcgtccgctttgtcggcgggcagacgcggccgcgcctcttggtcatatagttcgtctgacagcgccaacctcatagagaaagtacgcggtaggtgggagtccctgatctccgaagtcagcgagcgctacggcgtggacaaagacctcgttatggcggtcgtcgcccgcgagtcggccggcaaccccaacgcgatctctcccaagggcgctaaggggctcatgcagcttatggacggcaccgccagagatatgggcgtcagaagctcgttctcgcctttagagaatatcaccggcggcgtcaagtatctcaagagcatgcttgattctttcaacggcgacgagagcctcgccctcgcctcgtacaacgcggggccaggcgcggttaaaaaatacaacggcattcccccgtacagggaaactcgggattacgttcgcgcggtgctggctctcaaggcaaaggcggccgagagcgcgctcacggttactgccggcggtgaaaataacgcggttaacacggaaagcggggcgatataa

SEQ ID NO: 71016 - protein, 386 aa, Unknown
  Obtained from environmental sample
  DOMAIN (243)...(353): Transglycosylase SLT domain
  misc_feature (1)..(386): Xaa is any amino acid
MQNLRGRSNTASGSRRKRALGIPLKKRKCVSAYRAAGSRVSIIRKIYNITSAKTPEKFSYPRKKFRLIRPRPPQITSKTAFLHPAPPLAHDLLLINAGGKRIMQIDNLNTAYNATRGSDARGSSAQSSRAAQVAKEFEAMFTSMMFKAMRGTVKESSLIPKNMGENIFTELLDGEYAKMSSESGALGLAALLEKEIARCEGRSPALDGSASALSAGRRGRASWSYSSSDSANLIEKVRGRWESLISEVSERYGVDKDLVMAVVARESAGNPNAISPKGAKGLMQLMDGTARDMGVRSSFSPLENITGGVKYLKSMLDSFNGDESLALASYNAGPGAVKKYNGIPPYRETRDYVRAVLALKAKAAESALTVTAGGENNAVNTESGAI

SEQ ID NO: 71017 - DNA, 4977 bp, Unknown
  Obtained from environmental sample
  misc_feature (1)..(4977): n is a, c, g, or t
atggccgagttggaatgccggcaaaacactgatatgcggctgatgatttccgcaggcgtaagggacgcaaaaaatgaaggaaaaccggcgggaagcaagagcgcgtatgtggaaattcctggcatgactaattatgtccgcgtagacgacatgaattacattacggtgaagaacgacaagcagttatacgacagggtcttggtaatggaaactaggggttccgttgatccggctgaattggcaaaaaacattaccgcgtatatactgccgaaggatctgcccgaattgcccggattaaaaggacagaaaaattaccactgggacagccttaacaaaatagtacccgaagttttagcgttgtcaaaaaaagtaaatcttgaagcgctccccaatgaacttaaatacagcgagatcaacagttggaaatttgaagccgaagccggggaatttctttatttcaagttaaacggaggaacgaagttctacggcggttatgtccttgccgagccttacgaagcgatttttcgaattggaagtttcccaaaagagctttcgatactttcggaagggtctattctttcatttagcggggacaagcggctttccatgatgagccggggaataacagaagtagaatatatcattgggcgtatcaggcccgacgacataaatcatctggtgtcgcagacttccggggatgtcagcaatatcaactttagaaactacagttttaaccagtacaatattaccgaacagtacaccgagagcgcggttgttcctgttgccagtgagcgtgacattggttatttttcttttaacttttcgcggtatctggataacataccgaataaaaatttacggcatggtcttttcatttttaccgtccgcgcaaaatccggctcctacagcgacaagcggctgataatggtgacggatttgggcttctttgtaaaaaccggcgcagattcgggcaaggacatttttgtccaatcaattgcttccgggaatcctgttgcaggggcggctgtcagcgtacttggtcttaacggcaacccgattttctccacctctaccgactcaggcggccgcgctcgaattcccgattttggcgatacctttaaaaacgaccgcgctcccatagtctacacggtcatttccggcgaagacatgtcttttatgtcgtacgaatccagagggcgtaatcttgactactctacttttgacgtggggggtattcgcggggcaagcgatcctaaaacgctcagggcgtttcttttctccgacagggggttataccgacccggagacgaggcgcggataggacttattatcaaaagcggcgattgggccggaaatttgggcggcactccgcttgaatgtcgcataacagacccgcggggcgcggaaattttcaataaacgaatcaagttgtctcccgaaggagttgaagacatccgttttagcacccacgactggtcgccaacggggacttatacaacttcggtctatgttattcaggaataccggcagggcgacgaattaagggaacgccatgtattccttggttctcaaacggtgaaggtagaggaattcctgccggacactttgaatgtttccgccgtttttgatcctgtgccgcaggacggctggattgcgccgggtgaattaaaagcgatggttgcggtacggaatctttttggcacagccgcttccggcaacgaagtaaaagcgcagatcaatttgtcgccgggacatcagtatttccgccaataccgcgattatcaattcagggacccgtttctcgctaaaaacagttttcaggaatttcttggaacaaaaaccacaaattcgaatggaaccgccgagtttaatatgaatctggcaaagtttgaaaaagcgacgtaccgcctttctttttacaccgaagcttttgaaaaaggaagcgggcggaatgtgtcagccgaaacttcggtttatgtaagccccctgccctaccttgtcggctacaaagcggacggcgatttaagatatatttcgcgtaacgcggtaaggaatttgtcttttatcgcgataaatcctaaaacagaaaaaaccagcgtgaatgagcttacccttacgatatctgaattacgctatgtatccgcccttgtaagacaaccaaacggcgtatacaaataccagtcgattcaaaaagagtatcccgtatcctcaaagcagattactatacccgcctcaggtttagagtacagcctgcccacaaacacacccggcgagtataaacttttgatcacaggtcccggcgatttggaatacaattctcttaatttcagcgttgccgggtcggacaatattcagcgcagtcttaatcgcaccgcggaacttgaaattaccatgaacaaaaccgatttcagaaacggcgaggaaatcgagttgatgatcaaagcgccgtacgcgggagcggggcttattacaattgagcgcgacaaagtttacgcgcaccgctggttcaggagcaatggggaaacttccatgcagacaattaccgttccggcagagcttgaggggaacgcgtatgtgaatgttcactatttaagatcgcaggattcacctgaaatttttatgtctccgttaagttacggagcggttccgttttccatcagccgtgagaaccgtaccaaccggatcaagctggatattccgggcgaggcaaaaccgggagaggattttgttataaaatactccaccgcccgccgcggaaagataattgttttcgcggtagacgaaggtatacttcaacttgcgggatatcagacccccgatccgctggcgttctttttcagaaaacgggcgcttgaagtgcggactgcccaaatactcgacatggtattgccgcgttattccattgttcaaaacctcgcggcaatgggcggcggcggcggttctgaagagcttgcgcgtaaccttaatccctttaagcgaaagcaaaatgttccggtggcttattggtcgggtattattgacgcgggaccggaagaaaaagaagtgcgttaccgcgtgccggattattttaacggaacattaagggttatggccgtcgccgtaagcgacagcacaatcggcgcggtagaagacaaatctttagttcgcagtacttttatcatttcacctaacgcgccgatgatggcggctccgggagacgaatttgacgtttcgtttacggtaaccaacaaccagaagggcgcgggagaaaacggcaaggtgcgcgttagggcgattccttcggaacatctttccatttcaggtaacagcgaatttaacctgcaaattcctgaagggaaggatcaaactctgaacattcaggttaaagccgcaggtccgcttggagcggcgcaaatacgctttgttgcgtccaataacggcgaaacatcggaactttccgcttatatgagcgtccgtcccgcgtcgccgtaccgcgtatcactttattcgggagcgataaaaaataaaagcgccgaagtgggaattgaccgtaacctttacgaagaatttaacaccagagatgtttcgctctcttatcttcctatgggaattgcaaaaggtctttcgttctatcttaacaacttcccatacggctgctctgagcaaattaccagcgcggttttccccttcctgtatcctcagcttttcaaggagcttggttatacaagggcgcaggcggacgaaggaattaaccgcgtaatcggcatacttcaggcgcgtatgaaagaaaacggcactatcggcgtgtggacttcccgttcttacgacgacccgctgatcaccgtctacgcggctcatttccttaccgaggcccggggcgcgaactattatgttccttcccagttgatgaacaaactgcttcaggcctgcagaaacatcgcttccggttcgggaacaagcctctatgattttaccaaccgctcttacgcgatttatatcctgaccctgaacgaaattgtcaccacccagctgattgaatcgcttaaaagggacatgaataaatacgatgaagcgcaaacagggcttgccggactctacctcgccggaagttacgcgctattgcagaaaacatcggacgcttccgccattctgggtaaaatcaaacgggcgatgacgaaagacggcagtttccgttacatcgacaatcttatgtatcattcaatatatcttaatattgtctcaaggcatttcccgcagcgtttgcgcgacatatccgagtcattgttagttgacatggcgcagcaaatggaaatacagtcgtataccacgatttccgccagccacgcccttatggcgattgacgcttacctgaaagccgtcccaaccgccgaaacaggcacttttaccgtgcaggaaatttcaaaagacaaccagcgcaaggacttaaagcccgccggaaccgccgtgttcagcgccccattctccgccaacgccgcgaaaatcagcgtggagaacaaggataaccttaacctgttttaccagataacggctgccggttttgaccgcgaactgccgtcaaaggaaataaagaacggcatcgaaatttacagagaattccttgacagcgccggaaaaccggcaagttctttcaaagtcggcgacattgtaacggtaaaactcaatttccgaagcctttccaacaacgaataccgggacgtggctattgtcgatttatgccccgcgggccttgagacggaaattgattcggcgcggcaggctgatgactcatcgtcggcgtggaaagccgactatgtcgacatccgcgaggacaggctggtaatttacggctcggtaagcggcaaggtcgcgagtttcagctaccgcgcgagagcgatcaacgccggcactttcacaactccgccccttttcgccgaagcgttatacgataaatcgatatgggctctgcgtccgcaggcttcgattaagattacgaaatga

SEQ ID NO: 71018 - protein, 1658 aa, Unknown
  Obtained from environmental sample
  DOMAIN (790)...(936): Alpha-2-macroglobulin family N-terminal region
  misc_feature (1)..(1658): Xaa is any amino acid
MAELECRQNTDMRLMISAGVRDAKNEGKPAGSKSAYVEIPGMTNYVRVDDMNYITVKNDKQLYDRVLVMETRGSVDPAELAKNITAYILPKDLPELPGLKGQKNYHWDSLNKIVPEVLALSKKVNLEALPNELKYSEINSWKFEAEAGEFLYFKLNGGTKFYGGYVLAEPYEAIFRIGSFPKELSILSEGSILSFSGDKRLSMMSRGITEVEYIIGRIRPDDINHLVSQTSGDVSNINFRNYSFNQYNITEQYTESAVVPVASERDIGYFSFNFSRYLDNIPNKNLRHGLFIFTVRAKSGSYSDKRLIMVTDLGFFVKTGADSGKDIFVQSIASGNPVAGAAVSVLGLNGNPIFSTSTDSGGRARIPDFGDTFKNDRAPIVYTVISGEDMSFMSYESRGRNLDYSTFDVGGIRGASDPKTLRAFLFSDRGLYRPGDEARIGLIIKSGDWAGNLGGTPLECRITDPRGAEIFNKRIKLSPEGVEDIRFSTHDWSPTGTYTTSVYVIQEYRQGDELRERHVFLGSQTVKVEEFLPDTLNVSAVFDPVPQDGWIAPGELKAMVAVRNLFGTAASGNEVKAQINLSPGHQYFRQYRDYQFRDPFLAKNSFQEFLGTKTTNSNGTAEFNMNLAKFEKATYRLSFYTEAFEKGSGRNVSAETSVYVSPLPYLVGYKADGDLRYISRNAVRNLSFIAINPKTEKTSVNELTLTISELRYVSALVRQPNGVYKYQSIQKEYPVSSKQITIPASGLEYSLPTNTPGEYKLLITGPGDLEYNSLNFSVAGSDNIQRSLNRTAELEITMNKTDFRNGEEIELMIKAPYAGAGLITIERDKVYAHRWFRSNGETSMQTITVPAELEGNAYVNVHYLRSQDSPEIFMSPLSYGAVPFSISRENRTNRIKLDIPGEAKPGEDFVIKYSTARRGKIIVFAVDEGILQLAGYQTPDPLAFFFRKRALEVRTAQILDMVLPRYSIVQNLAAMGGGGGSEELARNLNPFKRKQNVPVAYWSGIIDAGPEEKEVRYRVPDYFNGTLRVMAVAVSDSTIGAVEDKSLVRSTFIISPNAPMMAAPGDEFDVSFTVTNNQKGAGENGKVRVRAIPSEHLSISGNSEFNLQIPEGKDQTLNIQVKAAGPLGAAQIRFVASNNGETSELSAYMSVRPASPYRVSLYSGAIKNKSAEVGIDRNLYEEFNTRDVSLSYLPMGIAKGLSFYLNNFPYGCSEQITSAVFPFLYPQLFKELGYTRAQADEGINRVIGILQARMKENGTIGVWTSRSYDDPLITVYAAHFLTEARGANYYVPSQLMNKLLQACRNIASGSGTSLYDFTNRSYAIYILTLNEIVTTQLIESLKRDMNKYDEAQTGLAGLYLAGSYALLQKTSDASAILGKIKRAMTKDGSFRYIDNLMYHSIYLNIVSRHFPQRLRDISESLLVDMAQQMEIQSYTTISASHALMAIDAYLKAVPTAETGTFTVQEISKDNQRKDLKPAGTAVFSAPFSANAAKISVENKDNLNLFYQITAAGFDRELPSKEIKNGIEIYREFLDSAGKPASSFKVGDIVTVKLNFRSLSNNEYRDVAIVDLCPAGLETEIDSARQADDSSSAWKADYVDIREDRLVIYGSVSGKVASFSYRARAINAGTFTTPPLFAEALYDKSIWALRPQASIKITK

SEQ ID NO: 71019 - DNA, 1185 bp, Unknown
  Obtained from environmental sample
  misc_feature (1)..(1185): n is a, c, g, or t
gtggccgagaatctgaactatccgaccgaaaacgggtcttggtgctacgacggcgacgattccaaatgcgcgcaatacggcagactgtacgattggaagacggcactcgccgtatgcccgtcgggctggcgcttgcccgatacggcggattggaatgatttggcgaaagcggcgggcggctccgaggaagccgggaagaagctgaggtcgaagcgcgattggcgcgataacggatacatcgtcggggacgacacctacggattctcagccttgcccggcggaggtcggaacgccgaaggcgcgttcagcgacgcgctcgaagtcggcaggtggtggacggccacggagggggccgactgcccgacggattacgccgactgcaacgcctttaccgccggcaaagcctactcgcggtacataacgttagactacagcaatttgatggacaacggctccgaccaaaaatacggctactcggtgcgctgcgtcgtcggggaatcgaaagccgccaatatcgaaaccgacgatatttcgatttccgttttcggcgttgacgaggaggacttcaagaaaaagtataagtcatacgaatcattcatccaacacgacgagtacgcgcaaagaatcgcgtttgtgccgaacgtccgcgtcaaagatttcagctggctctccatgggcgtaatggacgaccccgacgccgacgagatagtctatgaaattaaagaggtgctgtatacggtaaaagaactgacccctcaaaaaccgcttgtcgtgtcatgggtggaagtgggaatgatgtcggctttcggctattcctaccgcgacagagacggcaagataaagtatttcatgggacaggcggcgaactacggcggcgaccccgaagaatacgacggccctcccttcacgatatatccgttcaccccgccgctcggcgcggatgacattgattacaagttcgcgacggtaggcggtcaggattggttctccgagaatcttcggcacaaaaacggcaatagttggtgctacgaaaaggacaacgccaactgcgagaaatacggcaggctgtatgattggaactcggcgaagacggcgtgtccgaaagggtctcacctgccgacgaacgaggaatgggcgaaattgatgaagcggcgggcggaaaagagactgcgggcaagaagctga

SEQ ID NO: 71020 - protein, 394 aa, Unknown
  Obtained from environmental sample
  misc_feature (1)..(394): Xaa is any amino acid
MAENLNYPTENGSWCYDGDDSKCAQYGRLYDWKTALAVCPSGWRLPDTADWNDLAKAAGGSEEAGKKLRSKRDWRDNGYIVGDDTYGFSALPGGGRNAEGAFSDALEVGRWWTATEGADCPTDYADCNAFTAGKAYSRYITLDYSNLMDNGSDQKYGYSVRCVVGESKAANIETDDISISVFGVDEEDFKKKYKSYESFIQHDEYAQRIAFVPNVRVKDFSWLSMGVMDDPDADEIVYEIKEVLYTVKELTPQKPLVVSWVEVGMMSAFGYSYRDRDGKIKYFMGQAANYGGDPEEYDGPPFTIYPFTPPLGADDIDYKFATVGGQDWFSENLRHKNGNSWCYEKDNANCEKYGRLYDWNSAKTACPKGSHLPTNEEWAKLMKRRAEKRLRARS

SEQ ID NO: 71021 - DNA, 1173 bp, Unknown
  Obtained from environmental sample
  misc_feature (1)..(1173): n is a, c, g, or t
atggaaaatttcgtgtttcagaacaaaacaaagataattttcggtcgcggtaccgagtctaaggtcggcgaggagaccgccgttttcgccaagaaggtgctcctgcactacggtggtggaagcgtcaagaagagcgggctttacgacaaagtcacggattccctgaaaaaggcgggggtggagtttatagaactcggcggcgcgcaacccaacccgcggctcagccttgtggaagagggtattgaactctgccgcaaacacggcgtcaagttcctgctcgccataggcggcggcagcgtcatagactccgcaaaggcgatggcggtcggcgtcccgtacgccggagacgtgtgggacttctactgcggcaaggcggcgccggccgccgcgctcgacgtgggcacggtgctcactatccctgccgcgggcagcgagtcgagcccaagctcggtcatcacaaacgagaacggcggcctgaaacgcgggcttacctgcgaactcctccgccccgtcttctccatcctaaatccggagctgacctacacgctgcccgcctaccaaacggcctgcggcgcggcggacatcatggcccacatcatggagcgctatttcaccacaacgaagtacgccgacttcaccgaccgcttatgcgaggcgacgcttaagacgataatacacaacgtccccgagtgcctgaaaaatccgcaaaactacgacgcccgcgccgaagttatgtgggcgggctgcgtcgcccacaacgacctgctaggtaccggacgcaaccaagactgggcctcccaccagatagagcacgaactgagcggcatgtacgacgtggcgcacggggcggggctatccgtgatatttccggcgtggatgaagcacgtctacccccacaatgtgaaccgcttcacgcaattcgcatcgcgtgtgtggaacatagagatagacttccacaatcaggaaaaaaccgcgctggccggtatagccgcgcttgaacaattcttcgtctccatcggcctgcccgtcaggttaaaggatatggacatcggggaagataaattgcaggagatggcggacaagtgcaccggaaggaacggggcggcgacggtgggcgggttcgtgccgcttcaccaaaaggatattctggagatactgaggagggcggtataa

SEQ ID NO: 71022 - protein, 390 aa, Unknown
  Obtained from environmental sample
  DOMAIN (10)...(382): Iron-containing alcohol dehydrogenase
  misc_feature (1)..(390): Xaa is any amino acid
MENFVFQNKTKIIFGRGTESKVGEETAVFAKKVLLHYGGGSVKKSGLYDKVTDSLKKAGVEFIELGGAQPNPRLSLVEEGIELCRKHGVKFLLAIGGGSVIDSAKAMAVGVPYAGDVWDFYCGKAAPAAALDVGTVLTIPAAGSESSPSSVITNENGGLKRGLTCELLRPVFSILNPELTYTLPAYQTACGAADIMAHIMERYFTTTKYADFTDRLCEATLKTIIHNVPECLKNPQNYDARAEVMWAGCVAHNDLLGTGRNQDWASHQIEHELSGMYDVAHGAGLSVIFPAWMKHVYPHNVNRFTQFASRVWNIEIDFHNQEKTALAGIAALEQFFVSIGLPVRLKDMDIGEDKLQEMADKCTGRNGAATVGGFVPLHQKDILEILRRAV

SEQ ID NO: 71023 - DNA, 789 bp, Unknown
  Obtained from environmental sample
  misc_feature (1)..(789): n is a, c, g, or t
gtgcaccggaaggaacggggcggcgacggtgggcgggttcgtgccgcttcaccaaaaggatattctggagatactgaggagggcggtataatgctggacctaacaggtaaatgggcgcttatcacaggcgcgagccgcggtatcgggcggcaggtcgcgttggcgatggcggagaaagggtgcaatctcatactgcacagccgccaaaaatccaacaccgacgccatcaaaaacgaactgtcgaaattcaacgtcaaactactgcaagtagaggccgaactctccgacatcgtccgcgtaacttctctcgcggatgaagccgaaaatctatcgggcggccttgacatcctctacaacaacgccgcgataatgacgcagtaccgtcccgaaatctactcggctacggagagcgagtatctccagagcttcacggtcaataccatagccccgataacgctatgcaacgcgattatccccaagatgataaaacgcggcttcggacgggttgtcaacgtaacatccggaataaaagacgaaccgcaacttatgccatacgcggcctcaaaagcggcgcttgacaaatacgtatacgacatggccccgcacctcaaaggcaccggcgtactgatgaacctgatggaccccggctggctgcgcaccgacctcggcggcccgaacgcgcccaatccggtagagtccgtcatcccgggagcgttagtaccggtactgcttgatatcggtgatgaaacgtgcgggaaattctaccacgcgcaggattacaaacgttaa

SEQ ID NO: 71024 - protein, 262 aa, Unknown
  Obtained from environmental sample
  DOMAIN (37)...(204): short chain dehydrogenase
  misc_feature (1)..(262): Xaa is any amino acid
MHRKERGGDGGRVRAASPKGYSGDTEEGGIMLDLTGKWALITGASRGIGRQVALAMAEKGCNLILHSRQKSNTDAIKNELSKFNVKLLQVEAELSDIVRVTSLADEAENLSGGLDILYNNAAIMTQYRPEIYSATESEYLQSFTVNTIAPITLCNAIIPKMIKRGFGRVVNVTSGIKDEPQLMPYAASKAALDKYVYDMAPHLKGTGVLMNLMDPGWLRTDLGGPNAPNPVESVIPGALVPVLLDIGDETCGKFYHAQDYKR

SEQ ID NO: 71025 - DNA, 1668 bp, Unknown
  Obtained from environmental sample
  misc_feature (1)..(1668): n is a, c, g, or t
atgctgcaagtaatcctcaaaaaaatcgacgcctactacactggagcgaaccgcttctggatacctatcgcctgcgggctcctctactcgctctgtctgccgcccttcagcggcatgctgcaccccgtccttacgcccatgccgcttttggcctttgcggcgcttatcccgctattctacatagtgacgaggacgccgcgccgcagggcgctgatccatgcatacctgcactgcgccgctatgactctgggccagtactactggataggctttgacaccgccgaaggatattgggcgctgatactcattggcgtggttcttatatcgctcgcttggggagcgctctattttgccgcggcgctggcttttcgctaccttatgcgccgcctgccgcgtctctacattatagtatatccggccgcgtgggtgcttgtggagtatttcaggacgagaaccgacctggccttcccgtggtcgttcataggctacggcgcggtggggattttgccgctcgctcaactctcgtccgttacaggcgtgtggggtctctcctacatcatcgtggcctgtaacattgcgttgtgggaattgctgcgggcgtacatgtttggcgccgataagcgccggcagttacgcgccgttattgtatgcgcggcgttgacgatagcgatttttgtctggggcgccgtcagaatgggcgggaaagtcccgcaagaacccgtttccaaaatcgcggtcgtgcagagctacatggaccagttccactggggtagcggttcgctcgataccgccgtgacggtgagcgacagcatggtcaaagtcgccgcaaaacacaagcccgatatcatcatattctcggaaagcgcgctgatgtgctatctggacagacgcccggaaataaagcaacaagtattgagttgggctaaaaacgcgggcgccccgattatggtcggcgccttgcattgggatttcatcaacgacgctgagacaagacgagactacgacgtctacaacacggtatttttggccgacgtcgacggagacagcctgcgccgctaccacaagattctactggtgccgttctcggagataatgccgtttgaggcgaagtttcccatcctgtcaagggtcaacctcggtggcgcgagctttaagaggggggacagcgaggcggtattccgcataaacgagaacttggagatcgccccgtacatctgctacgagataatcttccccgactttgtaaggcggcggcttacggattcgacgaatttgctggtcaccgtgacaaacgacggttggttcggacgcacctccggcccgtaccagcacgcggttatggcgcaaacgcggtctatagaaaacgggataacgctggctcggtcggcgaattccggaataagcatgttcgttgacccgtatggaaggataacggaaaaaacggggctttatacacgggatatgatggtgcgggatgtctgtgtttatcgggtgaagacgctgtatagtgaatttggggattggtttgtggaggtgtgcattgggattttgattttggggatggcggtaacggtggttaggagcgtccggcaaattatttcaccgcgccgccgccggctgccggacttactaacgaactcgcctccatgggaatctgttggtaaataa

SEQ ID NO: 71026 - protein, 555 aa, Unknown
  Obtained from environmental sample
  DOMAIN (243)...(431): Carbon-nitrogen hydrolase
  misc_feature (1)..(555): Xaa is any amino acid
MLQVILKKIDAYYTGANRFWIPIACGLLYSLCLPPFSGMLHPVLTPMPLLAFAALIPLFYIVTRTPRRRALIHAYLHCAAMTLGQYYWIGFDTAEGYWALILIGVVLISLAWGALYFAAALAFRYLMRRLPRLYIIVYPAAWVLVEYFRTRTDLAFPWSFIGYGAVGILPLAQLSSVTGVWGLSYIIVACNIALWELLRAYMFGADKRRQLRAVIVCAALTIAIFVWGAVRMGGKVPQEPVSKIAVVQSYMDQFHWGSGSLDTAVTVSDSMVKVAAKHKPDIIIFSESALMCYLDRRPEIKQQVLSWAKNAGAPIMVGALHWDFINDAETRRDYDVYNTVFLADVDGDSLRRYHKILLVPFSEIMPFEAKFPILSRVNLGGASFKRGDSEAVFRINENLEIAPYICYEIIFPDFVRRRLTDSTNLLVTVTNDGWFGRTSGPYQHAVMAQTRSIENGITLARSANSGISMFVDPYGRITEKTGLYTRDMMVRDVCVYRVKTLYSEFGDWFVEVCIGILILGMAVTVVRSVRQIISPRRRRLPDLLTNSPPWESVGK

SEQ ID NO: 71027 - DNA, 2496 bp, Unknown
  Obtained from environmental sample
  misc_feature (1)..(2496): n is a, c, g, or t
atgatgacgggtcgatacaaacaattaaaggcggaggcttttggtaagaggtgtaatatgcaatacggtttttttgatgatgatgcgcgggaatatgtaattacccgccccgatactccttatccgtggatcaactatttgggcagcgaggatttttacggtcttttttccaacacttccggcggctattgtttttaccgcgacgcgcggatgttaaggcttacccgttaccgctacaacaatgtgccgaccgacgcgggaggccgctatttttacctgcgcgaaggcggcgacgcgtggactccctcctggatgccgatgaagtccgcgcttgaccgctacgagtgcagacacggaatgggctattcgcgcatttcctcggcgcgcaacggccttgcgttctctcaggtttcatttgtgccgttacgcgacacctgcgaaatacacaaagtaacgcttaccaacgaatcaaattcggataaacatatcgatatgttttcttttattgaattctgcctgtggaacgccaacgacgacatgaccaacttccagcgcaacttcagcataggggaagttgagattgacggttcgcgcatttatcacaaaaccgagtaccgcgaaaggcgcaaccactacgctgtgtgggcggtcaatgtcccgattgagggctttgacacggacaggcagtcgtttatcggcctttacaacagctttgcccatcctcaggctgttcttgacggagaggcaaaaaattccgtcgcttcaggctgggcgcccatagggtctcaccacatcaaagcgcaccttgcgccgggcgaggcaaaagcttttgtttttgtccttggttactgcgaaaatcccgaggatcaaaagtgggaaagacagggggtgatcaataaaaaccccgcgaatgcgcttttatctaaatacgggtcgtccgaagcggcggacaaggctcttgccgagcttaacgagtactggaaaaatcttctcggccgctttaccgtggacgccgaagacaaaaaaatggcgcgcatggcgggcgtctggaatcaatatcaatgcatggttacgtttaatatgtcgcgaagcgcgtcttattttgaatcgggaatagggcgcggcatgggcttccgcgactcaaatcaggatttgctgggctttgttcatcttgttcccgaacgcgcccgcgcccgcattttggacattgccgcgactcagtttcctgacggcagcgcgtatcatcagtaccagccgcttacaaagcgcggcaataacgagatcggttccggctttaacgacgatccactgtggctaatctgcggggttgcggcgtacatcaaggaaacgggcgactacggcatccttgatgaaagagtgccgtttgacaacaacgaagcgttagccgacaccctctttattcacttgaagcgctcatttgattacacagtaacgcacaccgggccgcacgggcttccgctgattggccgcgccgactggaacgattgtttaaaccttaactgcttttccaaaacgcccggcgaatctttccagacaaccgctaattttgaaagcggcgtcgcggaatccgttttaatcgccgcaatattcgcctttaccggccccgattatgccgaaatctgccgccgcacgggtcgcaatgaagaggcgcagtacgccgaaaaagccatcgcaacgatgatagaagcggttaacaaccacggctgggacggcgactggttcctccgcgcttatgacgcgcacggcaaaaaaatcggcagccgcgagtgtgaagacggaaaaatatttattgaatccaacggtttcgccgtgatggcgggaatcggccttaatgacggacgcgcgcaaaaagcgcttgattccgtaaaagatcatcttgatacaaagtacggcattgtgctgttacagccggcgtacaaggattaccatattgagttaggtgaagtttcttcgtatccgccggggtacaaggaaaacgcagggattttctgccacaacaacccgtgggttacgataggggagaccgtgcttggcagaggaaaccgcgcgtttgaaacttacacaaaaatctgccccgcataccgcgaagacgacagcagccttcgcagattggagccttatgtgtacgcgcagatggtagcgggcaaagacgcggttaatcacggcgaggcgaaaaattcatggcttacggggacagcggcttggacatttgtcagcatttcgcagtacattcttggagtgcgccccgtctttgacggcctcatgctggatccgtgtattccgtcaggcatgaaaggctataccgttacccgacatttccggggcgcggattaccatatcacggtagacaacagcgcgggcgttgaaaagggagttaaatccataacggtggacggaaatccgcatgatggagttgtgttaccggtgtttggtgataatagagtacacaatgttattgttacgatgggaaaataa

SEQ ID NO: 71028 - protein, 831 aa, Unknown
  Obtained from environmental sample
  DOMAIN (20)...(83): Putative carbohydrate binding domain
  misc_feature (1)..(831): Xaa is any amino acid
MMTGRYKQLKAEAFGKRCNMQYGFFDDDAREYVITRPDTPYPWINYLGSEDFYGLFSNTSGGYCFYRDARMLRLTRYRYNNVPTDAGGRYFYLREGGDAWTPSWMPMKSALDRYECRHGMGYSRISSARNGLAFSQVSFVPLRDTCEIHKVTLTNESNSDKHIDMFSFIEFCLWNANDDMTNFQRNFSIGEVEIDGSRIYHKTEYRERRNHYAVWAVNVPIEGFDTDRQSFIGLYNSFAHPQAVLDGEAKNSVASGWAPIGSHHIKAHLAPGEAKAFVFVLGYCENPEDQKWERQGVINKNPANALLSKYGSSEAADKALAELNEYWKNLLGRFTVDAEDKKMARMAGVWNQYQCMVTFNMSRSASYFESGIGRGMGFRDSNQDLLGFVHLVPERARARILDIAATQFPDGSAYHQYQPLTKRGNNEIGSGFNDDPLWLICGVAAYIKETGDYGILDERVPFDNNEALADTLFIHLKRSFDYTVTHTGPHGLPLIGRADWNDCLNLNCFSKTPGESFQTTANFESGVAESVLIAAIFAFTGPDYAEICRRTGRNEEAQYAEKAIATMIEAVNNHGWDGDWFLRAYDAHGKKIGSRECEDGKIFIESNGFAVMAGIGLNDGRAQKALDSVKDHLDTKYGIVLLQPAYKDYHIELGEVSSYPPGYKENAGIFCHNNPWVTIGETVLGRGNRAFETYTKICPAYREDDSSLRRLEPYVYAQMVAGKDAVNHGEAKNSWLTGTAAWTFVSISQYILGVRPVFDGLMLDPCIPSGMKGYTVTRHFRGADYHITVDNSAGVEKGVKSITVDGNPHDGVVLPVFGDNRVHNVIVTMGK

SEQ ID NO: 71029 - DNA, 1686 bp, Unknown
  Obtained from environmental sample
  misc_feature (1)..(1686): n is a, c, g, or t
atgcattacaagaattttttgacggttacatacgcgcccgccggttatttgaatgacaattcgattgagcagataaaagctgacattgaaaaagcgggcaagtacataaaacttgacaagatatatcttgaaacttaccgctcggaagttcttatagagcggggaaaaatggaagccgtaaaagctttgtttatcgaaaaaggatatatggtatccggcgggattacaactacggtgaagcaaactttaatggggagcatgtgttttacagacccggagaaccgcaaaaggcttggagaaattgccgcatacaccgcgcagctttttgatgaaataatccttgacgacttttattttacaaattgccgctgtgaatcctgtataaaggcaaaaggagaccgcgactgggcttctttccgtcttgcgcttatgaacgacatttccgaaaatgtgataatcaaaaacgcgaaagcggcgaatccaaaggtaaattgtataatcaaatatcccaactggtacgacagttttcaggcaaacggctataaccttgaagacgaatcaaaaatgtttgacatgatctacaccggaacagaaacgcgcgatcccaattatacgcatcaaaacctgccgcgctatttaagttttttcctgccccgtctttttgaacatatcaagccgggaaaaaacggcggcggctggtacgatctttttgattgctctctggaagactatgtacagcaggcgtacttaacgctcttttcaaaatgccgcgaacaaatgctgttctgtttccccttactggtatacgcccctctatacaccgccgccgtcggagcgttctttgatgaggcggatcagttcatcggacagataggggagcctgtgggcgtcgcctgttacaagccgtataactcgcacggagagcggcttcttcatgaatttgtcggaatgtgcggcgtcccgcttgatccctatccttattatccggaaaacgcgaagacattgtttcttaccgcagacgccgcgtgggacgatgacattgtcggcaagataaaacaaagtcttttgaaagggagcaaggtttttatcacaagcgggttgtatgaaaaactggcgggcaagggaatagaggacatacttccgcttgaaatcactaacagaaaaataactacggacatatttaccaacagcgcctttggcaggggcaactgcggttatgtaaaagccgcctctcccataaccttgtcccatgtcgcctacaacgagaacgatatatggccgctttcagccgctcttactccccattcaagccacgcgctattgttatgcggcgcttacggcaaaggaagtctctacatacttacaacacccgacaatttcgccgatttgtacaatcttcccgccgagaccctcgcccttctgcgcggacaattcgatttgcccgtaacgcttgaaagcgtaggccgcgtgtctctgttcctgtatgacaacaatacttttattttgcagtcatttcttgacaggccggaaagagtgcgcgtccgcattaacaagccggatgttaagcttgaattattggcaaaaacgaaaattcggccgtttgagatagtacgttccggcgagaacgaaagtatttttgatatttttatgatgccgggacattacatggcgtttaagattgagtag

SEQ ID NO: 71030 - protein, 561 aa, Unknown
  Obtained from environmental sample
  misc_feature (1)..(561): Xaa is any amino acid
MHYKNFLTVTYAPAGYLNDNSIEQIKADIEKAGKYIKLDKIYLETYRSEVLIERGKMEAVKALFIEKGYMVSGGITTTVKQTLMGSMCFTDPENRKRLGEIAAYTAQLFDEIILDDFYFTNCRCESCIKAKGDRDWASFRLALMNDISENVIIKNAKAANPKVNCIIKYPNWYDSFQANGYNLEDESKMFDMIYTGTETRDPNYTHQNLPRYLSFFLPRLFEHIKPGKNGGGWYDLFDCSLEDYVQQAYLTLFSKCREQMLFCFPLLVYAPLYTAAVGAFFDEADQFIGQIGEPVGVACYKPYNSHGERLLHEFVGMCGVPLDPYPYYPENAKTLFLTADAAWDDDIVGKIKQSLLKGSKVFITSGLYEKLAGKGIEDILPLEITNRKITTDIFTNSAFGRGNCGYVKAASPITLSHVAYNENDIWPLSAALTPHSSHALLLCGAYGKGSLYILTTPDNFADLYNLPAETLALLRGQFDLPVTLESVGRVSLFLYDNNTFILQSFLDRPERVRVRINKPDVKLELLAKTKIRPFEIVRSGENESIFDIFMMPGHYMAFKIE

SEQ ID NO: 71031 - DNA, 1128 bp, Unknown
  Obtained from environmental sample
  misc_feature (1)..(1128): n is a, c, g, or t
atgatttataaacctttcggtaaaacaggcgtaaaagtttcggctttgggcttcggcgcgatgcgcctgcccatgaaagaagctgacggaaagaaaattgtagacgaagaccttgccgtccctctcatgcagaaagcgtttgacatgggcataaattatgttgataccgctccgctttactgcgaaaccttaagcgaagtcgcggtgggcaaagcgttgaaaggttaccgcgacaaggtttatctttccacgaagaaccccattgaggacgcggacggcgatcactggatgggaaggttggaaaaatctctaaaacaactggacacggactacatagacttttatcatttttgggggatttcgttaaaaagttttgagtcatggcaggggttaaagttcggtcctattgaagcggcgtataaagccaaagagcagggacttatcaagcacatttctttttcgtatcacgacgcggctgaaaattataaaaagatagttgattcaggacactttgaaacgactcttgttcagtacaatatgctggatcgttctaacgaagaaaacatcgcctatgcaaaatcgaaaggcctgggcgttgtggtaatgggacctgtcggcggcgggcggttaggcgcgccaagcgaacaaattcaaagtttactgaaaagcaaatctacaagcacagcggaaatggctttacgttttgttcttgcgaacgaaaacgtggacatggctctttccggcatgggcaacatggatatgttaaaggaaaattttgagatcgcctcacgcacgggacatttaacagaagaagaaatatgccatgtaaaaaccatgatggaagaaaacaaaaatctcgcaaagttgtactgcacgggttgtaattactgtaaaccatgtccgcagggaatagacattccgtatctttttgaaatcatgaaccgctaccgcgtctacggcttgaaagaacacgcaaaaagcgcgtataaggaaatgatgaacgggtggagctggataaaaagcgcggacgcttcaaagtgcgtcgcttgcggaacatgcgaggaaaagtgcccgcagaagataccgattatcaagcagttgaaggagacgcacgctacgctggcgtga

SEQ ID NO: 71032 - protein, 375 aa, Unknown
  Obtained from environmental sample
  DOMAIN (340)...(363): 4Fe-4S binding domain
  misc_feature (1)..(375): Xaa is any amino acid
MIYKPFGKTGVKVSALGFGAMRLPMKEADGKKIVDEDLAVPLMQKAFDMGINYVDTAPLYCETLSEVAVGKALKGYRDKVYLSTKNPIEDADGDHWMGRLEKSLKQLDTDYIDFYHFWGISLKSFESWQGLKFGPIEAAYKAKEQGLIKHISFSYHDAAENYKKIVDSGHFETTLVQYNMLDRSNEENIAYAKSKGLGVVVMGPVGGGRLGAPSEQIQSLLKSKSTSTAEMALRFVLANENVDMALSGMGNMDMLKENFEIASRTGHLTEEEICHVKTMMEENKNLAKLYCTGCNYCKPCPQGIDIPYLFEIMNRYRVYGLKEHAKSAYKEMMNGWSWIKSADASKCVACGTCEEKCPQKIPIIKQLKETHATLA

SEQ ID NO: 71033 - DNA, 843 bp, Unknown
  Obtained from environmental sample
  misc_feature (1)..(843): n is a, c, g, or t
atggacgaagtgaattccatggaagcccaactggttgaactgcaaaaaaacatctatggcattgccctggaaaaaaacgccaaggagaacgaagtccggctcctgaatgagcagcggggcgaaagcaagatcaaaatcgggcagaatgagggctgggaaaaacaggcggttcagaaaatcggggaattgaacgatgacgccgccgaacaggacgccgttgtccgggacttaaagaaaaaagccgaagacatcacggaaaatatccgctcctttgaggaaaatatccagcttgcctcggcccgcatcagcgacaacgacgaggcggtgcataaggccgaagatgagatacacggtattgaaaaacagcaggccgctttcgagaaagacctggcggtaataaccgatgacattgtggcggaattggacgcgggtttaaaaaaagccggctattctgcggcggaacggcgcagcacggaaaccgcgttgcaggaaacccttggacggctgcggacgattctttcgggcagggaaaccttgatccgcgatctggccgcggcggcaaatgccgcggcaacaggcggcggcgcggggcttgacgcctcggagctcaggcgtatcgccgaaggattggccgcgggcctcgccgacgcggccgccgacgcggacaaggcaatttcgctttttcaaaactaccgcgaacattccccctcatttattgacgagttcctctcaccccagggaatcatcaccaaaaagcggacgctggacgcgcaaatccgcggcgcaaaagacagcattgaacaacggcgcggcactattaaaaatctgcgcggagacatgtaa

SEQ ID NO: 71034 - protein, 280 aa, Unknown
  Obtained from environmental sample
  misc_feature (1)..(280): Xaa is any amino acid
MDEVNSMEAQLVELQKNIYGIALEKNAKENEVRLLNEQRGESKIKIGQNEGWEKQAVQKIGELNDDAAEQDAVVRDLKKKAEDITENIRSFEENIQLASARISDNDEAVHKAEDEIHGIEKQQAAFEKDLAVITDDIVAELDAGLKKAGYSAAERRSTETALQETLGRLRTILSGRETLIRDLAAAANAAATGGGAGLDASELRRIAEGLAAGLADAAADADKAISLFQNYREHSPSFIDEFLSPQGIITKKRTLDAQIRGAKDSIEQRRGTIKNLRGDM

SEQ ID NO: 71035 - DNA, 1263 bp, Unknown
  Obtained from environmental sample
  misc_feature (1)..(1263): n is a, c, g, or t
atgaacgtccaggcccagtccgccgaggaacatgcccggcttatcaggcgagagattgccggacaggaagggcaacttaaaaacatacaggacgagcttttccttgaccgcaagcggctggaggaaattgacgaacgcatcgccgatactcaaacggaaattgccgggatcgggcaaaagggaatcaaacttgccgccgatctggaaacgcttgaaaaagacatacggaaacgaaacgacaatgtagccagtaaaaaggtagtcatcaacaaacggatggcggaactttccagggtacaggaagctctggaaaaaattcatatggaactggtacagtccgaaactgaaatcaaaaacatccaggacaatttccgggaaacccattcccgcgatttaatggagttcgaggagcgtatcttcaccattaccgctgccccagccgatttgcgggaaaaactcgccgcctcccgctctcaaatgaaggacctgggttcgataaacttcatggccccggaagaattcgcggaaacaaaagaacggttcaatttcctcagtaaccagatggcggacattgaaaaagcccgcaatgatcttgagaaactgacttccgaaattcggcaggagtcctcggataagttcctttctacgtacaatcgtataaagaaaaattttcacaatatgtttcgccggttattcggcggtggacgcgctgaactgcggctttcggattctaaccatgtgctggaatcgggcattgaaatttttgcccagccgcccggaaaaaaactggaacatttaagtctgctttcaggcggcgaatgttcaatgacggcggtcgccctgcttttcgcgacatacatggtaaagcccagccccttctgcctgttagacgaaattgacgccgcgttagacgaacagaacgtagggcgttttgtccagctcttgcgtgagttcagcgacacaagccagtttattattattacgcataacaaaaaaactgttacgggcgcgggaacgcttttgggcgtaacaatgcaggaatcgggagtgacaaaacttatcacagtgcgcattgaacacggggaacttgcggtagaagactcggaaccgttccagagcgaattgtgggacgcggacggcaagtttgaggaagaggacgtcgcgcctgaagcgggcaggcagcttcctgtcggcatgaatgatccgaaaaaagtaacgcaggcgcagttaaggccgattaggtcgggtgtgccgaagagttga

SEQ ID NO: 71036 - protein, 420 aa, Unknown
  Obtained from environmental sample
  DOMAIN (178)...(346): ABC transporter
  misc_feature (1)..(420): Xaa is any amino acid
MNVQAQSAEEHARLIRREIAGQEGQLKNIQDELFLDRKRLEEIDERIADTQTEIAGIGQKGIKLAADLETLEKDIRKRNDNVASKKVVINKRMAELSRVQEALEKIHMELVQSETEIKNIQDNFRETHSRDLMEFEERIFTITAAPADLREKLAASRSQMKDLGSINFMAPEEFAETKERFNFLSNQMADIEKARNDLEKLTSEIRQESSDKFLSTYNRIKKNFHNMFRRLFGGGRAELRLSDSNHVLESGIEIFAQPPGKKLEHLSLLSGGECSMTAVALLFATYMVKPSPFCLLDEIDAALDEQNVGRFVQLLREFSDTSQFIIITHNKKTVTGAGTLLGVTMQESGVTKLITVRIEHGELAVEDSEPFQSELWDADGKFEEEDVAPEAGRQLPVGMNDPKKVTQAQLRPIRSGVPKS

SEQ ID NO: 71037 - DNA, 387 bp, Unknown
  Obtained from environmental sample
  misc_feature (1)..(387): n is a, c, g, or t
atgatgaatgaaaatcaaattggaataataatcgtagatactgctgtaaatttacacaaagaacttggtcccggactatttgaaagcgtttatgaagttattttatcaaaactgcttgttcgtaaagggctttatgtccaacggcaagtatcaatacctataaattttcaaggggaacatattgatgaaggctttcgcgcggatttgttcattgacggtaaagttatcattgaacttaaatcagtagaaaagataactgatgtccataaaaaacaattattaacctatttgaaactttcaaatacaaaacttggttttatcctaaatttcggagtgggagtaatgaaagatggcatattcagaataataaatggaactctaaaataa

SEQ ID NO: 71038 - protein, 128 aa, Unknown
  Obtained from environmental sample
  misc_feature (1)..(128): Xaa is any amino acid
MMNENQIGIIIVDTAVNLHKELGPGLFESVYEVILSKLLVRKGLYVQRQVSIPINFQGEHIDEGFRADLFIDGKVIIELKSVEKITDVHKKQLLTYLKLSNTKLGFILNFGVGVMKDGIFRIINGTLK

SEQ ID NO: 71039 - DNA, 456 bp, Unknown
  Obtained from environmental sample
  misc_feature (1)..(456): n is a, c, g, or t
ttgcctacacggcttcttgattggacccagaatcctttagttgcggtatattttgccgttgataaatattttacggatgacgagataaaacaaaaagattttagcagttgtgtttacattcataaagaagaaattgagttagaattatgtgagccttttgaccctttcacaattaaccgcgtcagatattatgtccctaaacatttagataatagaataaccgcgcaaggaggattatttacagttcataataacccatataacccttgggaaataaataatttggaaaaaattcttattaacaaaaatgtacgtgaagagattaagaaagcattaaataaaatgggggttaatgccagtaccctttatcctgatattgatggaatagcaaaacatgttaaatgggcgtactcaagcaaaaaactggtgaacgatcacgctaaaaacacgcaataa

SEQ ID NO: 71040 - protein, 151 aa, Unknown
  Obtained from environmental sample
  misc_feature (1)..(151): Xaa is any amino acid
MPTRLLDWTQNPLVAVYFAVDKYFTDDEIKQKDFSSCVYIHKEEIELELCEPFDPFTINRVRYYVPKHLDNRITAQGGLFTVHNNPYNPWEINNLEKILINKNVREEIKKALNKMGVNASTLYPDIDGIAKHVKWAYSSKKLVNDHAKNTQ

SEQ ID NO: 71041 - DNA, 366 bp, Unknown
  Obtained from environmental sample
  misc_feature (1)..(366): n is a, c, g, or t
atgatgagtgaaaattttattgatcaaaagtacattgaagatttactggagaacgccaaatttgcagacgacgcaagcataaattcgtcgctggacaaagcggagcgcggagagaggctttcccacggcgagattgccgctcttttggcaaacaaaaatcccgaacatcttaagcgtatttttgaagtagccggaaacataaaaaaacggatttacggcaacagaattgttatgttcgctccgttatacgtcagcgatttttgcgtaaaccgctgcgcttattgcagttttaaccacggacacgaatttaaccgccacaagcttacaatggatgaactgcgtgaagaagtaaaaatactgaaatga

SEQ ID NO: 71042 - protein, 121 aa, Unknown
  Obtained from environmental sample
  misc_feature (1)..(121): Xaa is any amino acid
MMSENFIDQKYIEDLLENAKFADDASINSSLDKAERGERLSHGEIAALLANKNPEHLKRIFEVAGNIKKRIYGNRIVMFAPLYVSDFCVNRCAYCSFNHGHEFNRHKLTMDELREEVKILK

SEQ ID NO: 71043 - DNA, 1212 bp, Unknown
  Obtained from environmental sample
  misc_feature (1)..(1212): n is a, c, g, or t
atgagtatgaatgaaaccccgtcctctaaccgcgtccatatcgcctttttcggacgcagaaacgccggaaaatcgagtcttgtaaacgccgttacggggcaaaatttagccattgtaagcgataaaaaggggacgactaccgaccctgtttttaaagctatggaaatactgccccttggacctgtggtaatcatcgacaccccgggttttgacgacgagggcgaactgggcgaaatgagggtaagcagggcgaaacaggtgctgaataagaccgatacggcggttctggttctcgacggggaactggctcccgacaatgccctctcttccattgaagccgagttgatggcgatttttgacgaaaagaagataccctacattcttgctcttaataaatgcgaactttgcaataccgattctttgggaatggcgtcatcgagtgaaattctgcctgtgagcgcaaagacgggttttaacgtcaatctgctgaaagacaaaattgccgctcttgcgcttgaaaaggaaccggaacaaagactggttgcggacattgtaaaaccaaatgattttatagtccttgtaattcccattgataaagccgctcccaagggcaggttgattcttccgcagcagcagatgatacgcgacattttggaagcgggcgcaaacgctatcacggtaagggaaaccgaattacaacagacgcttgccgatatcggcaaaaagccgtcgcttgtaattacggacagtcaggcttttgcgcaggtttccgctatagtgccgaaagacattccgctgacttcgttctcgatcttattcgcccgttacaagggttttctaaaaaccgccgtcaacggagccgccgctcttgacgctttgcaggacggcgataaaattcttatatgcgaaggctgtacccaccaccgtcaatgcgatgacatcggcactgtaaagttgccgcgctggattaaaaaccattccaaaaaagagcctgaattcagtttttgttcgggcggcgattatccgcaggatttgtcggcttataaggttgtcattcactgcggagcgtgtatgctgaatgaacgcgaaatgcactaccgcagaaaacataccgaaaaacaaaatattccgtttacaaattacggcactgctatagcccacatgaatggaattttagagcgatgtatagcgatgattgatattaatcaataa

SEQ ID NO: 71044 - protein, 403 aa, Unknown
  Obtained from environmental sample
  DOMAIN (9)...(198): Elongation factor Tu GTP binding domain
  misc_feature (1)..(403): Xaa is any amino acid
MSMNETPSSNRVHIAFFGRRNAGKSSLVNAVTGQNLAIVSDKKGTTTDPVFKAMEILPLGPVVIIDTPGFDDEGELGEMRVSRAKQVLNKTDTAVLVLDGELAPDNALSSIEAELMAIFDEKKIPYILALNKCELCNTDSLGMASSSEILPVSAKTGFNVNLLKDKIAALALEKEPEQRLVADIVKPNDFIVLVIPIDKAAPKGRLILPQQQMIRDILEAGANAITVRETELQQTLADIGKKPSLVITDSQAFAQVSAIVPKDIPLTSFSILFARYKGFLKTAVNGAAALDALQDGDKILICEGCTHHRQCDDIGTVKLPRWIKNHSKKEPEFSFCSGGDYPQDLSAYKVVIHCGACMLNEREMHYRRKHTEKQNIPFTNYGTAIAHMNGILERCIAMIDINQ

SEQ ID NO: 71045 - DNA, 714 bp, Unknown
  Obtained from environmental sample
  misc_feature (1)..(714): n is a, c, g, or t
gtgaagacatataaattctgcgccatttttttggcgatatttccgcttttttcctgcgcgacgcggattgacggctctcttgcctcaaacggctcgtctcaaatgtcagtaagcaccgctcttatgcccagaataacctcccttgtacggacgctggccacggcgggcggacaggaaaacagtttaatattaaacggtcccgctcttgccaaatcaatgaccgattcttctcaaagcaatgttactgcgtcttttaagaatatttccccgtcagcaatcgaaggcagtttgaatgttaaaaacatcaaccgttttttatcttccctttccggggaagccgaaaggtttatcgaatttgagcagggaaaaaacggcggcaaatgtaaattttacatagacctttcaggcggctatgaaattcttaatcttatatccccggaaatagccgcgtatcttagtgtccttatggctcccgtcgcgaccggcgaagaaatgaccaaagccgaatacctcgctcttgtaagctcagttttcaacaaagcggtcagcgacgaaatctccgccgcaaggatacgcatttccgtcagctttccggggcaagtaacaaccgcaactggaggaaagttttcaggcaaaacggcagagttcgacatcccgcttctggacattttagtactggaaacgcccttaacttacgaggttaactggaaataa

SEQ ID NO: 71046 - protein, 237 aa, Unknown
  Obtained from environmental sample
  SIGNAL (1)...(20)
  misc_feature (1)..(237): Xaa is any amino acid
MKTYKFCAIFLAIFPLFSCATRIDGSLASNGSSQMSVSTALMPRITSLVRTLATAGGQENSLILNGPALAKSMTDSSQSNVTASFKNISPSAIEGSLNVKNINRFLSSLSGEAERFIEFEQGKNGGKCKFYIDLSGGYEILNLISPEIAAYLSVLMAPVATGEEMTKAEYLALVSSVFNKAVSDEISAARIRISVSFPGQVTTATGGKFSGKTAEFDIPLLDILVLETPLTYEVNWK

SEQ ID NO: 71047 - DNA, 1122 bp, Unknown
  Obtained from environmental sample
  misc_feature (1)..(1122): n is a, c, g, or t
atggatgaagtaaattctgttgatatcattctgcttgtcattttatttatattaatgtgtttttccgcctttttttcccttgcggagatggcatattcatcccttaacaaaattaaacttaaaagccttggagagaaaagcaaaaaattgggcaaaagggtcaggcttgcccttaaattacttgaggattatgacaaaattctttctacggtggttataggcaataatattgttaatataggttcgtcggcgctggcgaccgccatattaatcggcattttcggcaataaaggcgtgagtatcgccaccgccgtaatgacggttcttgttttggttttctgcgaaatttccccgaaggttttggcgaaggaatcgcccgaattgaccgccatcagaaccgcgccttttcttcgttttcttgtatggttttttacgcctttaagccatcttgcagccgaatggaaaaaatttataattaaacttttttctgttaaacaggatcgttcaaccacggaggacgaacttcttacgtttgtagaggaggtaaggcaggaaggcggcattaatattaatgaagaaaaaatgatccgtcaggtaattgattttgacgaccttaaagcgtcggaaatatacacgccgcgcatggatgtgcaggcggtgcctgttacaagcgccgtgcaggatgttgatctaaaatttacggaaaccggtttttcaaggcttcctgtttttcaggattcggttgacaatattttggggattatcaattttaaggatttttatcacgatgtaataaaagggcataaagcgcttaatgatataattaaacccgttatttttgtcgccaaaaccataaaaatcggcaaactcctgaggacattgcaggataaacaggcgcatgtggcggtagtaattgacgagcatggcggcactttgggtattatcacgatagaggatattgttgaagagctggtaggcgagatttgggacgaaaatgaaaaagtgatagagcctgtaaagaaaacaagcgacggcggttatcgcgtaatgggaaatgtaaatttttcagatatgctggaatattttgatttaaaagatgacgatgaagatgcggtaccctga

SEQ ID NO: 71048 - protein, 373 aa, Unknown
  Obtained from environmental sample
  DOMAIN (211)...(325): CBS domain pair
  misc_feature (1)..(373): Xaa is any amino acid
MDEVNSVDIILLVILFILMCFSAFFSLAEMAYSSLNKIKLKSLGEKSKKLGKRVRLALKLLEDYDKILSTVVIGNNIVNIGSSALATAILIGIFGNKGVSIATAVMTVLVLVFCEISPKVLAKESPELTAIRTAPFLRFLVWFFTPLSHLAAEWKKFIIKLFSVKQDRSTTEDELLTFVEEVRQEGGININEEKMIRQVIDFDDLKASEIYTPRMDVQAVPVTSAVQDVDLKFTETGFSRLPVFQDSVDNILGIINFKDFYHDVIKGHKALNDIIKPVIFVAKTIKIGKLLRTLQDKQAHVAVVIDEHGGTLGIITIEDIVEELVGEIWDENEKVIEPVKKTSDGGYRVMGNVNFSDMLEYFDLKDDDEDAVP

SEQ ID NO: 71049 - DNA, 1500 bp, Unknown
  Obtained from environmental sample
  misc_feature (1)..(1500): n is a, c, g, or t
atgaaaatattgatggtttccagcgaggcggttccctgggcaaaaacaggcggacttgccgacatggtttccgccctttcaattaatctcgccaagcttggtcatgacgtaagaattgtaatcccgcgttactactctgtcgatcgcggcgccttaaaacagcttcccggcgcgatgggaacgcccatgggcggcatcgaggaatggagcgccgtctactataccgatatgccgggaacgacaaaagccaatccggtaaaagtttattttatcgatcatgaaatatacttcggcagggacggcatttacggaaactccgcggacaccgatttttccgacaacccaaggcgttttatgtttttttgccgcgccgttttccagctttgccgcaaaattaaatggtttcccgacgtgcttcacgcccatgactggccggcggcggtagctcccgtatatcttaaattcgcggaaagggtaaaaggaagcgcgggcggttttgataaaacggtttccattcttacaattcacaatctgggctatcagggaatttacggcaaagataattttaattattcggggcttggctgggacgtattttacaacggcggttttgaagactggaatatgcttaacatgctaaaagccggcctttacagcgccgacaaactcaacacggtctcacccaactatgccgaagaaacaaagacgcaggaaaacggtttcaggctggacggcgtactccgttacagaaacgccgattactgcggtattcttaacgggatagacaccaatgtctggaatccggcgaaagacaaattaataccgcagacctactcgattaaaaacatggaaggcaaagaagccgcaaaaaaagccctgcaaaaagaatttgaactgccgcaaaacgccgatgttcctgttataggcatggttacgcgccttacggatcaaaaaggagtaggcgatttattcggacccacccacggctgcgcgtggtcaatttgcagggacatggacatacagttggtgcttcttggctccggcgagcattggtgcgaaagcgaaatatataatcttacatcccgcctttccaactttaaggcaaaaataggctacagcgaaaaaatgagccaccttgtagaagcgggttcagactttttcctcatgcccagcagatacgaaccgtgcggccttaaccagatgtactcacttatttacgggacacttcccatcgtgcgcgcgacgggcggacttgtagacaccgtggaaaattttaacgaagagacgggagccggaacgggctttatgttcaattacttaagcccgtcgtcaatttacgacaccgtaggatgggccgtatacgcatggtacaacagaaaaaaagacatagaaaaaatgcggaagcgcggaatggcaatggatttttcatgggaactttcggcgaagaaatatattaggctttacgaagatacccgcaaagctcaaaacataattatttaa

SEQ ID NO: 71050 - protein, 499 aa, Unknown
  Obtained from environmental sample
  DOMAIN (2)...(249): Starch synthase catalytic domain
  misc_feature (1)..(499): Xaa is any amino acid
MKILMVSSEAVPWAKTGGLADMVSALSINLAKLGHDVRIVIPRYYSVDRGALKQLPGAMGTPMGGIEEWSAVYYTDMPGTTKANPVKVYFIDHEIYFGRDGIYGNSADTDFSDNPRRFMFFCRAVFQLCRKIKWFPDVLHAHDWPAAVAPVYLKFAERVKGSAGGFDKTVSILTIHNLGYQGIYGKDNFNYSGLGWDVFYNGGFEDWNMLNMLKAGLYSADKLNTVSPNYAEETKTQENGFRLDGVLRYRNADYCGILNGIDTNVWNPAKDKLIPQTYSIKNMEGKEAAKKALQKEFELPQNADVPVIGMVTRLTDQKGVGDLFGPTHGCAWSICRDMDIQLVLLGSGEHWCESEIYNLTSRLSNFKAKIGYSEKMSHLVEAGSDFFLMPSRYEPCGLNQMYSLIYGTLPIVRATGGLVDTVENFNEETGAGTGFMFNYLSPSSIYDTVGWAVYAWYNRKKDIEKMRKRGMAMDFSWELSAKKYIRLYEDTRKAQNIII

SEQ ID NO: 71051 - DNA, 411 bp, Unknown
  Obtained from environmental sample
  misc_feature (1)..(411): n is a, c, g, or t
atgggtatcaaacaaatatcggtttttttgggaaacacaacgggcaggttgggcgatgtgacaaaaaccctcgcagacgcaggcattaaccttagggctatcagtattgccgacaccgcggatttcgggattttacgccttattgtcgacaagactgacaaggcgattgacaccttgaccaatgcgggatttaccacgcgtcttaccgacgtaatcgcggtggaaatagaggacgtgccgggcagtctcgcaaaattgatggaactgttccagcagattaatattgagtatctttacgcttcgcttgagggacaggccggaaaagccgtcgttattttcaaaccgaaagaaatcgaaaagggtcatcaaatattaaaagataagggttttaagctggcggaaaatttctaa

SEQ ID NO: 71052 - protein, 136 aa, Unknown
  Obtained from environmental sample
  DOMAIN (4)...(71): ACT domain
  misc_feature (1)..(136): Xaa is any amino acid
MGIKQISVFLGNTTGRLGDVTKTLADAGINLRAISIADTADFGILRLIVDKTDKAIDTLTNAGFTTRLTDVIAVEIEDVPGSLAKLMELFQQINIEYLYASLEGQAGKAVVIFKPKEIEKGHQILKDKGFKLAENF

SEQ ID NO: 71053 - DNA, 1302 bp, Unknown
  Obtained from environmental sample
  misc_feature (1)..(1302): n is a, c, g, or t
atgatttttaaccctgaacacgaatgtatggatccgcaagcaagaaaaaaacttcaacttgcctcccttaaaaaccttgtggaaaccttatattccaaagtaccgttttaccgtgaaaaactaaacgcggtgggaattacccctcgggatatccacagtattgaggatattgaaaaactgcccttcaccacgaaggatgacttgcgggtaaattatccccacggtcttcgcgcctctcagcaggaaaggatcgtggaagtccacatgagctccggcacaaccggaaaacccgtagtcaatgagtataccattaaagacattgacatttggcgggagtcaatggccagaaccctgtcgggggccggctgtacgcgcgatgacattgttcagaactgctacggttacgggcttttcacaggcggaccgggagcgcattatggcgcgcttactatcggcgcggaagtcctgcccatgtccagcggcaataccgagcggcagcttatggttatgcgcgattttggttcgaccatgcttacctgcactccatcttatgccctctacctcgccgaggaagccgctgaagccggtatagaccttcataaacttcctatcagcaaaggttgttttggcgcggaaacgtggagcgaaaacatgcgcgtagaaattgaggaacgctttaacatgaaagcctacgacatttacggccttactgaaattatcgggccgggagtagcctttgaatgcgaggctcaggagggacttcatgtgaacgaagacctcttctatcccgagataatcgatcccgcgaccggaaaagttctgcctcccggagaaaaaggcgagctggtctttaccaccattacaagggaaggaactcccctgctccgttacaggacgcgcgacattacaagctttattacagaaccctgttcctgcggacgcaccactatcagaatgcgccgtctcttcggcagaaccgacgacatgctgatcatacgcggcgttaacgtgtttccaagccagattgaacaggcgctcatcgagattgaagggacggagcctcagtaccttatcattgtcagcagaggcgaaagccatttggacgaagtggaactgcaagtcgaagtcaagaaggaacttttcacagacgagacgcgcggtcttgagaaccttcgcagccgcatagaacatgtaatgaagagcaaactgcaaatcggcttgaaagtaaaactggttgaaccgaaaaccattgaacgttcaatcggaaaagcaaaaagagttatagacaacaggaaaatataa

SEQ ID NO: 71054 - protein, 433 aa, Unknown
  Obtained from environmental sample
  DOMAIN (14)...(357): AMP-binding enzyme
  misc_feature (1)..(433): Xaa is any amino acid
MIFNPEHECMDPQARKKLQLASLKNLVETLYSKVPFYREKLNAVGITPRDIHSIEDIEKLPFTTKDDLRVNYPHGLRASQQERIVEVHMSSGTTGKPVVNEYTIKDIDIWRESMARTLSGAGCTRDDIVQNCYGYGLFTGGPGAHYGALTIGAEVLPMSSGNTERQLMVMRDFGSTMLTCTPSYALYLAEEAAEAGIDLHKLPISKGCFGAETWSENMRVEIEERFNMKAYDIYGLTEIIGPGVAFECEAQEGLHVNEDLFYPEIIDPATGKVLPPGEKGELVFTTITREGTPLLRYRTRDITSFITEPCSCGRTTIRMRRLFGRTDDMLIIRGVNVFPSQIEQALIEIEGTEPQYLIIVSRGESHLDEVELQVEVKKELFTDETRGLENLRSRIEHVMKSKLQIGLKVKLVEPKTIERSIGKAKRVIDNRKI

SEQ ID NO: 71055 - DNA, 1134 bp, Unknown
  Obtained from environmental sample
  misc_feature (1)..(1134): n is a, c, g, or t
atggaaaaaaatccatctgcattttccgcgcggcttgaaaaagtttataactggatgtctcaggaaggtatatccctcctgatgctggaagacaccgaatcaaggcgcgaccaaaatatccgctggctcaccggacaccccgccgacgctcttctttttctttccgcagataaaaaggcgattctcaccgcgtgggacatcaaccttgccaaactctacgccgcgcaatcgcccgtactaatcgccagttacaatgattttgacagaaagcctgttaaagccatctctcttatcgcgaaaaaattcggcgttcccgccggagcaaaaatagagattccggctgtaacaccctaccctgcttttcttgaatatgtagaagaactttccgactatgacattctttgcagggaaaacggggcagccgcggaattaaacaaatttcgcgccgtaaaagatgaagaagaaatcgctattatccgtaaagccgcgggaattacaaacgatttaattgatcaactggaaaaaaatgtagtttcgggcaagataaaaacggaagccgacgcggcattgtttatcgaggtggaagcgcgcagacgtgattgcgaaggcacaagcttcgggactcttgccgcgggaccggacaggagtttcgctattcacgctttcccaagctggacatgcgcccccttcggcgggcagggactctccattttagattttggcgtaaaattcggcggctacagcaccgatgtaactctcacttttgcccgcgatttaaacgaaaagcaggaaaagattgtcaaccttgtagaaaaagcggctaaacttgccatctcaatggcacataacgactgcccggcaaaagacattgcggcggcggtagacacgcttttttccaaatcaagaaagaaaatgccgcacggtcttggacacggcatagggcttcaggagcatgaattccctttaataagaaactcaagcgacaatgaatgggtactccagccgggaatggtttttacgatagagccgggactttacgatccgctacttggcggctgccggctggagaatgacgtgcttattaccgagggcgggaatgaagtgcttactacgtcgcatattgttagattgtaa

SEQ ID NO: 71056 - protein, 377 aa, Unknown
  Obtained from environmental sample
  DOMAIN (157)...(371): metallopeptidase family M24
  misc_feature (1)..(377): Xaa is any amino acid
MEKNPSAFSARLEKVYNWMSQEGISLLMLEDTESRRDQNIRWLTGHPADALLFLSADKKAILTAWDINLAKLYAAQSPVLIASYNDFDRKPVKAISLIAKKFGVPAGAKIEIPAVTPYPAFLEYVEELSDYDILCRENGAAAELNKFRAVKDEEEIAIIRKAAGITNDLIDQLEKNVVSGKIKTEADAALFIEVEARRRDCEGTSFGTLAAGPDRSFAIHAFPSWTCAPFGGQGLSILDFGVKFGGYSTDVTLTFARDLNEKQEKIVNLVEKAAKLAISMAHNDCPAKDIAAAVDTLFSKSRKKMPHGLGHGIGLQEHEFPLIRNSSDNEWVLQPGMVFTIEPGLYDPLLGGCRLENDVLITEGGNEVLTTSHIVRL

SEQ ID NO: 71057 - DNA, 828 bp, Unknown
  Obtained from environmental sample
  misc_feature (1)..(828): n is a, c, g, or t
ttgctctttggtatgcctctgcgtgaggaatttcttcagttttttatagtgccactcatgcaaaatgcaaatttgtgccctaatacatatatgagcgatatagattattcccgctgtattgcggattttcaggcaatatacatggacacaagaaaacaagccggcaaggggctgcttgatctgcccccggcgcagcggccgcgcgagcgccttatcagcaatggcccggaggcgctttccgacgccgagcttttggccgttcttttgaacaccggaatcaaggggaaaggcgtcgcggaactggccggggagcttttaaccttgcttgacatcagcaaggagatcccttccgttgacaggctgtcaaggctttcaggcatggggatgacgaaagcctgcgcggtggcggccatgctggagtttggcaggcggcgctggggcgcgtccggttccgcgattaggcagccggcggagattcacgccctgatacggcactttttttttaggaagcaggagcgttttatcagcctgtcactcaacggcgcgcatgaggtgttgtccatccgcgtggttaccatcggccttgtcaacaggacaatagtccatccccgggaagttttcgccgacattatccttgatcgcgccgccgcttttatcgtcgcccataaccatccttcgggcaaacttactccttccggggaagacgacgaaataaccgaacggctcgcgaaatctgctgaaattctcggtttgcatttccttgaccacctgatcttctccgaatgcgactggtggagctataggcagaacgagaggattgtcaaatag

SEQ ID NO: 71058 - protein, 275 aa, Unknown
  Obtained from environmental sample
  DOMAIN (150)...(273): RadC, DNA repair protein
  misc_feature (1)..(275): Xaa is any amino acid
MLFGMPLREEFLQFFIVPLMQNANLCPNTYMSDIDYSRCIADFQAIYMDTRKQAGKGLLDLPPAQRPRERLISNGPEALSDAELLAVLLNTGIKGKGVAELAGELLTLLDISKEIPSVDRLSRLSGMGMTKACAVAAMLEFGRRRWGASGSAIRQPAEIHALIRHFFFRKQERFISLSLNGAHEVLSIRVVTIGLVNRTIVHPREVFADIILDRAAAFIVAHNHPSGKLTPSGEDDEITERLAKSAEILGLHFLDHLIFSECDWWSYRQNERIVK

SEQ ID NO: 71059 - DNA, 984 bp, Unknown
  Obtained from environmental sample
  misc_feature (1)..(984): n is a, c, g, or t
atgccggctaattcacctaacgcgtatatctttcttggtcctgagcttggaaaaaagcaggacgaaacagactcaataaaacaaaaattaccggacgctgaaataacaaccttttacgcaggtgaaactcccgtaagtacaattgccgatacgattcaaaataacagtcttttttccgaaaaacttctgataattataaaaaacgcggaaacaatcaaaaagaaggacgagattgaacttcttgtttcctgcatagataaccttgatcccaatacgacaattatcatgctctccgacgaattaaaacttgccgccgctcttgacgacgcggttcccaaaaacaaccgaaagattttttacgaattgtttgaaagggaaaaaaatgaatggataaaacagttttttaagcgggaaggttttaacattgataaagactccatctctgtaattttggaaatggtggaaaataatactgaagcgttaaagagggaatgttcgcgccttgtgcattttttacctcgcggcaaggagcaaggggaaagccaagtaagaacggaagacgttgagaaatggctttcccataacagggaagaatccgcatttacgcttttttcccgcatcgcctcaggcgatttatcaaaggcgcttgaatcgctttccgttatgctagccgcaaaagagagtgcgcaaagtattcttgcgggacttgcgtggtgctttagaaaactaggcgattatttgtccttgctggaaacaggagacgccaacaacagctttgaattaaaaaaaatagggctttcgtcgcccaaagcaaaggacgattacgccgccgccgcccgccgttacaacgcggaaagcgcggaagcctgcctagccctgacagccgaatatgacaatttactgcgttcccctgtcggagtaatggagagagttttaatggataggtatatttataaaattataggaacttataaaaacggataa

SEQ ID NO: 71060 - protein, 327 aa, Unknown
  Obtained from environmental sample
  DOMAIN (9)...(318): DNA polymerase III, delta subunit
  misc_feature (1)..(327): Xaa is any amino acid
MPANSPNAYIFLGPELGKKQDETDSIKQKLPDAEITTFYAGETPVSTIADTIQNNSLFSEKLLIIIKNAETIKKKDEIELLVSCIDNLDPNTTIIMLSDELKLAAALDDAVPKNNRKIFYELFEREKNEWIKQFFKREGFNIDKDSISVILEMVENNTEALKRECSRLVHFLPRGKEQGESQVRTEDVEKWLSHNREESAFTLFSRIASGDLSKALESLSVMLAAKESAQSILAGLAWCFRKLGDYLSLLETGDANNSFELKKIGLSSPKAKDDYAAAARRYNAESAEACLALTAEYDNLLRSPVGVMERVLMDRYIYKIIGTYKNG

SEQ ID NO: 71061 - DNA, 624 bp, Unknown
  Obtained from environmental sample
  misc_feature (1)..(624): n is a, c, g, or t
atgaaagaattgacagatcgtcagaaacaggtgctatcatttatcgctaactatattaaaaagaattcataccctccggcaataagagagatagcggatcattttaagatttcggtaaaaggagcgcatgatcatattaccgctctgcggaaaaaaggacagctaaggcaagccgataaaagaccaaggacgatggggttgacccattcaagaccggaagacgctgatttggtggaagtcccgttacttggaacagtcgccgcgggcactcctcttttagcggaggaaaattttgacggaaatattttgattcaccgttccatgttaaagagaaacaaaaaatattttgcgcttaaagtgaaaggcgattcaatgatcggcgcgggtattttggaaggagatatagcaattatcgagaaacatcatatagttaataacggcgagattgccgtagcagtcgtatttgataaagattcatctgaagaaggcataacaattaaaaagtttcacaaggatagctcaagaattcgattggaaccggcaaatcctgagtacaagccgcgttattacacccatgacataaaagttttaggcagattatccacaataataagatcatattaa

SEQ ID NO: 71062 - protein, 207 aa, Unknown
  Obtained from environmental sample
  DOMAIN (119)...(193): Peptidase S24-like
  misc_feature (1)..(207): Xaa is any amino acid
MKELTDRQKQVLSFIANYIKKNSYPPAIREIADHFKISVKGAHDHITALRKKGQLRQADKRPRTMGLTHSRPEDADLVEVPLLGTVAAGTPLLAEENFDGNILIHRSMLKRNKKYFALKVKGDSMIGAGILEGDIAIIEKHHIVNNGEIAVAVVFDKDSSEEGITIKKFHKDSSRIRLEPANPEYKPRYYTHDIKVLGRLSTIIRSY

SEQ ID NO: 71063 - DNA, 1392 bp, Unknown
  Obtained from environmental sample
  misc_feature (1)..(1392): n is a, c, g, or t
ttgaggaattatatgccgtcaatactaatcattgatgatgaacccggtatcagagtaactctcgcgtcaattcttgaagatgaaaaatataaagtttttacttcggaggacgcgcttgccggcatagaacttttaaaacgcgaagtaatagacatggtttttcttgacgttcttctgccgaaaatgggcggcattaaagctcttgaaacaatacgcaaagaatggcccgtaacggaaatcgtaatgatttcaggtcacgcgaatatcgagatggctgtaagcgccgttaaactgggcgcttttgattttttggaaaagccgctgtcgctggacaaagtattaacggtgtgcagaaacgcgcttgcgataaaaaaacttcgcgaagaaaataaaactcttaaaaaaacatataatttttcaagcgaggatataatcggaacaagcgcgcttgcgagaaacataagagaaacggtaatacaagcggcggcaagcgacgcgcggattttaatcacaggcgaaaacggatcgggcaaagaagtaatagctagggcgattcattcttgttccgcgcgcgccgacagtccgtttgttgacgtaaactgcgcggcaataccggaaacgctgatagaaagcgaactttttggtcatgaaaaaggcgctttcacggacgcggtttccacgcgcaaggggcgttttgaactggcgcacggcggtactctctttcttgacgagatcggcgacatgagtctttccgcgcaggcaaaagttttgcgcgtcattcaggaacagaaaattgagcgcgtcggcggagaaaaaactatagaaaccgacgtgcgcattatagcggcgacaaatcaggacttagaaaaagcgtgcaaagaggggcgtttcaggcaggatttatttttcagattaaatgtaatccctattcattcccctcctttgcgggaaagaaaggaagatattccccatctgctttgccactttttaaaattagcgggaaaagatataactccggaaaccgacgctatagatacccttgccgctcataattggcccggaaatgtcagggaattgaagaatttagcggaaagaatagcggtaatgcacagcggaaatgtcataaatggggaagatatcggtaaactcctcaatataaaggggaaaaaccccgtaaatacagagcaaaaaagcgcggaaaccgcgctgccgccggacattttagaacaaaattacaatgaggcaaaagacgcttttgaaaaatattatttggaattccaacttttaaaaaataatggtataatatcaagagcggctgaggcgattggaatctatccgagcaaccttcacgccaaaataagaaagtacggtattacagcggcaaaaaaatag

SEQ ID NO: 71064 - protein, 463 aa, Unknown
  Obtained from environmental sample
  DOMAIN (416)...(456): Bacterial regulatory protein, Fis family
  misc_feature (1)..(463): Xaa is any amino acid
MRNYMPSILIIDDEPGIRVTLASILEDEKYKVFTSEDALAGIELLKREVIDMVFLDVLLPKMGGIKALETIRKEWPVTEIVMISGHANIEMAVSAVKLGAFDFLEKPLSLDKVLTVCRNALAIKKLREENKTLKKTYNFSSEDIIGTSALARNIRETVIQAAASDARILITGENGSGKEVIARAIHSCSARADSPFVDVNCAAIPETLIESELFGHEKGAFTDAVSTRKGRFELAHGGTLFLDEIGDMSLSAQAKVLRVIQEQKIERVGGEKTIETDVRIIAATNQDLEKACKEGRFRQDLFFRLNVIPIHSPPLRERKEDIPHLLCHFLKLAGKDITPETDAIDTLAAHNWPGNVRELKNLAERIAVMHSGNVINGEDIGKLLNIKGKNPVNTEQKSAETALPPDILEQNYNEAKDAFEKYYLEFQLLKNNGIISRAAEAIGIYPSNLHAKIRKYGITAAKK

SEQ ID NO: 71065 - DNA, 1398 bp, Unknown
  Obtained from environmental sample
  misc_feature (1)..(1398): n is a, c, g, or t
atgacaagcgccgcgttaaatgagattgtccgtttctggaacaatatagattcggacgcttctacaaaagcggctaacagttttatcgccgacagttattccctgcggcttgaactttttgaaaagacgcttaaacaaaattttttgccgggcggagatacgccggaaaaacttccgcatgacatttcttccgttcaggttttccgtttggcaggcgatcaatggacggaagtatcctataccggcgacaaccgctttagactgacgtcccctccttccgccgagacaggttttgtaacaagatcgctgccaagggatcaggagacaattcgttatgtgcaaaaaatgccgcaaaatacactgcgcgttataaattacaaccttggggatgattttgacaaagggaaagccttattggacaatcaggctgaacgttttgagacagttgacttgttaagaaataatatacgcccgttattaatttatttttacgcggcattttttcttccgactcttttaatgacagcgattatagccatctcctttacaaggcgcattacccaccccattgttgagttaacggacgcgacccagcgcgtagcggagggggatttttctttccagattttatcaagccgtaacgacgaacttggcattttaatccgctcttttaattcaatggttcaaaacatggaaaaaacaagacaggcgcttttaagaaacgaaaaaatctcgatttggcagaacatggctcagcagttggcgcacgagataaaaaaccctcttacgccgataaaactttccgccgagcgcgtacttcgcagatggcggaacgagcccgagcaaatcggcgaaatccttgaaagctccatgatggcgattattcaggaaacggaaggactttcggttttattaaacgaattcagaacactgtcaaaaccaatggagccgtctaactcgctgacaaatttaaaagagtccgcagacgaagttataaacgcgtattccggttcatacccgaatgtaaaattcaatattgcgcatattcaggatattcaggtaaaaattgacaaacaccggctttcgcaaattcttacaaaccttgtgataaacgcaattgattcaatgtcgggaaacggagaaattgaattgcgctccgatattgtaaaaaaaagagaagtttgttactgtagaataagcgtcaaggattcgggcaagggtatcggcgaagaggaaggcaaacaaatttttactccctattttacaactaaagcgtcgggcacagggttagggcttcccattgtcgagcgaattgttacggatcatggcggaacaatctggtttgattcggcgctcggtataggatcaacattttatatcgatctgccgtcagcttga

SEQ ID NO: 71066 - protein, 465 aa, Unknown
  Obtained from environmental sample
  DOMAIN (246)...(317): His Kinase A (phosphoacceptor) domain
  misc_feature (1)..(465): Xaa is any amino acid
MTSAALNEIVRFWNNIDSDASTKAANSFIADSYSLRLELFEKTLKQNFLPGGDTPEKLPHDISSVQVFRLAGDQWTEVSYTGDNRFRLTSPPSAETGFVTRSLPRDQETIRYVQKMPQNTLRVINYNLGDDFDKGKALLDNQAERFETVDLLRNNIRPLLIYFYAAFFLPTLLMTAIIAISFTRRITHPIVELTDATQRVAEGDFSFQILSSRNDELGILIRSFNSMVQNMEKTRQALLRNEKISIWQNMAQQLAHEIKNPLTPIKLSAERVLRRWRNEPEQIGEILESSMMAIIQETEGLSVLLNEFRTLSKPMEPSNSLTNLKESADEVINAYSGSYPNVKFNIAHIQDIQVKIDKHRLSQILTNLVINAIDSMSGNGEIELRSDIVKKREVCYCRISVKDSGKGIGEEEGKQIFTPYFTTKASGTGLGLPIVERIVTDHGGTIWFDSALGIGSTFYIDLPSA

SEQ ID NO: 71067 - DNA, 1047 bp, Unknown
  Obtained from environmental sample
  misc_feature (1)..(1047): n is a, c, g, or t
gtgtctgcaggagataaagaagatagcgcaagagatgcgcgccaaaatccaggaggccaagaacacggagacggcggcgtaaatatgagcgaaaaaacgggccgtctgatgcttgaggtgcgcgggcttaataagcgttttgggcaggtgcgcgccgtaagcgatctgagttttgaggtgcgccgaggggaggtcttcggcttcttggggccaaacggcgccgggaagagcacgaccatgcgcataatcacctgcttcatcccgcccacgtccgggtcggtgctcgtagacggattgagcacggcggatcaggaccttgccgtgcgccggaagatcgggtacctgccggagagcacgcctctatacgccgacatgaccgtcaaggagtacttgaccttcgtggggcagattaggggccttaagggggctgcgctcaagtcgcgcatggacgagatgttttccgtttgcgccctcacgaagatggcggatcggcagatcggcaagctctccaaggggtacaggcagcgtgtcggattggcgcaggcgatgatacacgaccccgatttgctgatcttggacgaaccgatgtccgggctcgacccaaaccagatcattgagatccgcaacctcataaagaaattcggcgaggagaagacggtcatatactgttcgcacattctctcggaggtctccgcgacctgcgaccgtatacttataataaaggatgggcgcgtagtggtcaccgggacgcccggcgacttgacctccgggcataggggcggttcacgatacactgtgcgggtcaagggcgacgtggcgacggtccaccggggccttcagtctttggccggggtgtcctgcgtcgacacggagatcatagcgccggaggggtgggtttgcgcccgcataagcaccgaaggcaaggaggacatcggcgaaggtatattcaaatgcatagtggataacggacttagcctatcggaacttaggcgcgaccaaacgagccttgaggaggtatttacggaactgacagggggtaacaaatga

SEQ ID NO: 71068 - protein, 348 aa, Unknown
  Obtained from environmental sample
  DOMAIN (63)...(243): ABC transporter
  misc_feature (1)..(348): Xaa is any amino acid
MSAGDKEDSARDARQNPGGQEHGDGGVNMSEKTGRLMLEVRGLNKRFGQVRAVSDLSFEVRRGEVFGFLGPNGAGKSTTMRIITCFIPPTSGSVLVDGLSTADQDLAVRRKIGYLPESTPLYADMTVKEYLTFVGQIRGLKGAALKSRMDEMFSVCALTKMADRQIGKLSKGYRQRVGLAQAMIHDPDLLILDEPMSGLDPNQIIEIRNLIKKFGEEKTVIYCSHILSEVSATCDRILIIKDGRVVVTGTPGDLTSGHRGGSRYTVRVKGDVATVHRGLQSLAGVSCVDTEIIAPEGWVCARISTEGKEDIGEGIFKCIVDNGLSLSELRRDQTSLEEVFTELTGGNK

SEQ ID NO: 71069 - DNA, 717 bp, Unknown
  Obtained from environmental sample
  misc_feature (1)..(717): n is a, c, g, or t
atgaacaccgtcgcggccatcttcaagaaggagttcgcctcctacttcatatcgccgatcgcctacgtctttatagtagtcttcctgatcggtacgaatttcatgtattttcagccgtttttcctgataaatcaggcggatatgcgcaactacttcggtctgttgccgtgggtcttcctcttcttcgttccggcgataacgatgcgcgggtgggcggaggagagaaagagcaagacgatggaattgctgctcacgtggcccgtgagcgacgcgcaagtggttttggggaagttctttgcgtcgctggcgtttctggcggtggccgtatcgctctccatcaccatacccgttacgctgttcataataggcaaccccgatccgggcccgatcatcggcggctacgccggggcgttgctgatgggagccgcgtatctggccataggtctgtgggtgtcgtcgcacacggagaaccaaatagtcgcgttcatcttggcgtgggtggtgatgttcgtattaatgatcataggccatccggtagtaacgcttaaaacgcccacggcgctggtgccgctgttctcattcttgggtttgttcacgcactttgagagcatagagcgaggtgtgatagataccagagacgtcgtctactatttgtcgatggcgggaatattcttgtttctcaacgcgcagtctttgggaggcagaaagtcagagtga

SEQ ID NO: 71070 - protein, 238 aa, Unknown
  Obtained from environmental sample
  misc_feature (1)..(238): Xaa is any amino acid
MNTVAAIFKKEFASYFISPIAYVFIVVFLIGTNFMYFQPFFLINQADMRNYFGLLPWVFLFFVPAITMRGWAEERKSKTMELLLTWPVSDAQVVLGKFFASLAFLAVAVSLSITIPVTLFIIGNPDPGPIIGGYAGALLMGAAYLAIGLWVSSHTENQIVAFILAWVVMFVLMIIGHPVVTLKTPTALVPLFSFLGLFTHFESIERGVIDTRDVVYYLSMAGIFLFLNAQSLGGRKSE

SEQ ID NO: 71071 - DNA, 1740 bp, Unknown
  Obtained from environmental sample
  misc_feature (1)..(1740): n is a, c, g, or t
gtgatgaaaacgcaaaagataaaatcgaaagcggagatggtagcggtagcttgcgcggtcattgttgcggttgcgctggtcaactatgtttccggcaaatttttttatcgaatcgacctaaccgagaaccgtcagtatacggtctccgacgcgacgaagcggatcctaaaggggttggacgacatagtcgccgtcaaggtgttcttctctaaggagttgccgccggagacgcacgctacggtgaatacggtgcgcgaccttttgaacgagtacaagaacatcgccagaggcaagctgcgcgtaacgtgggaggatccggcggagagcgacactattcgcggcatggccatgagtctcggcgtccccgagatcaggctgcagacctttaaacgcgacaaagcggagacgatgctgggtttcatgggtatcggaatcatgtacgccgacaggaaagaggctatccccgtcgtacagaatttggcgaaccttgagtacgacctgacgcaggccataatgaaggtaaagcgctcctccgtccccaagatcggcgtgctcaaggcgcagtcagccgactttatcccgccggagatcggcgcgcgaatgaacatgggcgacgacaaaaccgagaaacgcttcgccccgatatttgagaatttcaagcgtgactacgaggtcgtcaccgtcgatctgtcggaggggaagccgatagacaaggatatccgcaccctcatcattccgaacggcgaccgctacaccgaccgcacgctctttgagattgaccagtactttatgaacggcgggaaccttatcgcgctcgtcaacgcggtgagcgtctcgttccaatacggcgtacagggtactattcaggagacgaagctttttgatcttctggaatactacggcgtgcgggttgatcgcaacatgataatggacgcctcctgcgggcaggtgcaggtaccgcggaacttgggactgttcacgataaacgagctattcccctacccctacttcgtgaggatcacgcggggcggctttgcggaagacaatcctgtgacctcgtcgcagtcggagttgatgctcggttgggcgagttcgcttacgctcgcgccggatacctccggcaagcaaaataccaagaccgtaacgttggcctcttcctcagagcaaagttgggaggtgaaagagggtttcgacctgtcgcccaaggcaaattacgagttgcccgccaaagagacgatgaggcgccacgcgatggccgtgtacgtgagcggcgctttcggaagctattttgacggaaagcccgttccgccggttaaggaaaaatccgcggacgacggcgaagacgccatcagcaagataaacctagccggcgacaacagagaccgcgccgtcaccccgtcaaacaagaacgggaatcttgtggtaatcggcgacgcgaacttcataagcgcgcaaaacgcgtcggcgccgaacgtgacgtttttatttaatttggtagactggctctcgcttgacgaaaacctaatatcggtgcgcgccagaacgctacgagacaagaccgtcaacgccaacattcttgaggcaggctcggcgaaaccggggataataaggacgataaatttgttgttgatgccgattttggtaataattgcgggcgtgataatatcattaagaagacgtgaaaaagccggaccggcggtagaaggggcggcggcgcagagtgttagtaataaggattaa

SEQ ID NO: 71072 - protein, 579 aa, Unknown
  Obtained from environmental sample
  SIGNAL (1)...(25)
  misc_feature (1)..(579): Xaa is any amino acid
MMKTQKIKSKAEMVAVACAVIVAVALVNYVSGKFFYRIDLTENRQYTVSDATKRILKGLDDIVAVKVFFSKELPPETHATVNTVRDLLNEYKNIARGKLRVTWEDPAESDTIRGMAMSLGVPEIRLQTFKRDKAETMLGFMGIGIMYADRKEAIPVVQNLANLEYDLTQAIMKVKRSSVPKIGVLKAQSADFIPPEIGARMNMGDDKTEKRFAPIFENFKRDYEVVTVDLSEGKPIDKDIRTLIIPNGDRYTDRTLFEIDQYFMNGGNLIALVNAVSVSFQYGVQGTIQETKLFDLLEYYGVRVDRNMIMDASCGQVQVPRNLGLFTINELFPYPYFVRITRGGFAEDNPVTSSQSELMLGWASSLTLAPDTSGKQNTKTVTLASSSEQSWEVKEGFDLSPKANYELPAKETMRRHAMAVYVSGAFGSYFDGKPVPPVKEKSADDGEDAISKINLAGDNRDRAVTPSNKNGNLVVIGDANFISAQNASAPNVTFLFNLVDWLSLDENLISVRARTLRDKTVNANILEAGSAKPGIIRTINLLLMPILVIIAGVIISLRRREKAGPAVEGAAAQSVSNKD

SEQ ID NO: 71073 - DNA, 600 bp, Unknown
  Obtained from environmental sample
  misc_feature (1)..(600): n is a, c, g, or t
atgaagaacaacaaaaagttaatcttggcgttaagcgctatattaatagttacggccatcttcatcgtatccgaaaagatgtcctcaatccgtccgcccgagcaccgcactcggttcttccctacccttgatgagcggcgcataagcggcataacggtgaacgacggtagcggcggcgtgattcggctcaataaacggggcgacggcgattggactgtggagagcggtgattccggcagtttatcacccgccgacagcggtctcgtccaaatcgccttggaaaaaatcgtaacgctcaagaagggcgagccggtctccgtcaatccggaaaaacaggcggcttttgaggtcaacgataccggtaaatcatttgtaaaggtcttcgccggcaaggacgcggcggccggcgttttgcttgtaggcaagagcggaccggactggaacagcaactacgcgcgcttggcgggaagcgacactgtctatcttatccccggcggattgcggcagtcgctcttttttgacattgagaggtggcggaaaaaagaggcggttgcgcctgacagcagcggcgacagcgcggccgcaaacatgggggaataa

SEQ ID NO: 71074 - protein, 199 aa, Unknown
  Obtained from environmental sample
  SIGNAL (1)...(25)
  misc_feature (1)..(199): Xaa is any amino acid
MKNNKKLILALSAILIVTAIFIVSEKMSSIRPPEHRTRFFPTLDERRISGITVNDGSGGVIRLNKRGDGDWTVESGDSGSLSPADSGLVQIALEKIVTLKKGEPVSVNPEKQAAFEVNDTGKSFVKVFAGKDAAAGVLLVGKSGPDWNSNYARLAGSDTVYLIPGGLRQSLFFDIERWRKKEAVAPDSSGDSAAANMGE

SEQ ID NO: 71075 - DNA, 672 bp, Unknown
  Obtained from environmental sample
  misc_feature (1)..(672): n is a, c, g, or t
atggcgtactttgcgcttaattcgctgaaagcaaaaacagcggttgttcttatgaacaaaaataacgacggttttattcatctggttgaagtttttgcggaaacattcaagaagcgcggcggaagcattatggcggtagagacatattcaacatggaacgattttgcgggtattttgcgcaaatacgcgaataatcctcccgatgttattttctgccccgaagattatgttcccgccgcaaaacttgccaataccgcttatgaagcggggcttgttaatactccgatattgggatcggacgcgtgggacggacttttgacgtacatatacaatcctgacacaatgaaaaatgtttattattcggctcctttttcatttgatgatcaggacgcgaatgtggttaagtttgtcagagattattttgactgtttttctcaaatgccgctgtcaggatcggcgacagcttacacctgcgtatacattttaacggaagcgataataaaagcgggaggcgtcgataaggacgcctttgtttccgccattaaggaaaatgaaattgattcaataacaggacatatacggtttgacgaaaacaacaaccctcacactaatgtatatattattcatttaaaaggcggagaatactccacctatgaaaaattaaggttatag

SEQ ID NO: 71076 - protein, 223 aa, Unknown
  Obtained from environmental sample
  misc_feature (1)..(223): Xaa is any amino acid
MAYFALNSLKAKTAVVLMNKNNDGFIHLVEVFAETFKKRGGSIMAVETYSTWNDFAGILRKYANNPPDVIFCPEDYVPAAKLANTAYEAGLVNTPILGSDAWDGLLTYIYNPDTMKNVYYSAPFSFDDQDANVVKFVRDYFDCFSQMPLSGSATAYTCVYILTEAIIKAGGVDKDAFVSAIKENEIDSITGHIRFDENNNPHTNVYIIHLKGGEYSTYEKLRL

SEQ ID NO: 71077 - DNA, 2850 bp, Unknown
  Obtained from environmental sample
  misc_feature (1)..(2850): n is a, c, g, or t
atgctgtacataagcgacagcacgcttatcgattatgttttaaagacaacaaaagaacacgcggatcatttattgatccggttaaaagaatatgtcgcgattcaggatcaattcagcgatgttttttcgccgggtgaaatgcaggacatggcaaatttactggaaatatacacagatgcctatactcctttggctaataatatttttgatcttgtggagcaagggcgaagagaagaagcgctttctgtgtatataaatcggcttactcccatttttaatacatttacttactatctaaacctaggctttttaaaaaatttggaaatttctgatgtaagaatgaaagaaaataatgataaggcttcgtttaacgtatcattaatgctgacgctggttgtaatgtcgttgattgtatccgttctgctggcgctagccgttaccaagtctatcgccgtcccgcttacggaacttgggtcggcggcggaggaattagcaagcgggaaattggacgttcaatttgaagactccaaaagcgatgatgaaatcacccggctttcgctcagattgcgggaaacgctgtaccttcttaatcagattcagcagttaaaactggaagccgtggaagcgcaggcggaaaaagaaaaagccgaagccgcttcaaaatccaaagatgaatttcttgccaagatgagccacgaaatacgcacgcccatgaacgccattatcggcatggctgaactagcgttacgcgaagaaagacgcgagacggctcaggagcatatacttacgattaaacaggcgggcgcgaatcttttatccatcatcaacgacattctggacttctcaaaaattgagagcggcaaactggaaattgttccgattaattatcagctttcatctttaatcaacgacacgataaacattatccgcatgaggcttatggaaaagccgatacgtttctttaccaacatcgacgggaatattcccaacagtcttatcggagacgaagtgcgtatgcgccaaattttccttaaccttcttaccaacgcggtaaaatattcggaaaaaggtcatatcggtttaaccattaccgcggataaacgcgacgataaacaagtctggctaaggatagccgtagccgataccggaaaaggtataaagcaggaggatcaggaaaagcttttcagagagtttgcccaaatagacacaaagaaaaatcagggcattgagggaacggggttaggtcttgtaattaccaaacgtctctgcgtcgctatgggcggggacataagcatggaaagcgaatacggcaagggaagcgtattcactgcggttattccgcaaagcattgaatcagaagaacccttcgcatgggtcgaaaatcctgagaaaaagaaaatacttgtctatgaaggcagatccatttacgccggagcggtatgctggactcttagaaatatgaacgttccccatactttggtaacaaatcaggatgattttgccgccgcgctgtaccgcgaagaatggttttatgtgttttccagttacggtctttatgaaaaaatcaaacccgtcatgggacaaagcgatacggctttttacaacgggaaaaagcctcccatggcgctgatgatagaatggggaacagaagcctacatacccggcgtgcggtttgtgtccatacctgtgcagtctctttcgattgccaatgttcttaacggtaaggcggacagcaaggattatatcaaaaattcaagcgtaatccgctttagtttcccacatgcgcggcttctggtagtagacgacattgcgactaaccttaaagtagtcgaggggcttctttcgccttacaagactacagttgatacctgcacgaatggtttgcaggctatagaactggtaaaacgctcggtttcggaaaagcgcgaatacgacattgtattcatggatcacatgatgcccggaatggacggaatcgaagctacagccgctatccgcgcgtgggaaaaagaacagcaggaaaaaggcagcctgagtaaacaagttccaataatcgccttgacagctaacgcggttgtcggcatgagggaaatgtttatagaaaacaattttaatgattttatttccaagcccatagatgtttccaagttagatgaaattcttaaccactggataccggaagaaaaaaaggaacagagttcccaagagcatcatgaagcttattaccattcatcccatgaacctgtcggaggagctgacagcgcgttatactccatccccggcgttgacgcggtaaaaggcatcccaatgaccggcggaactttaacctcttataagcaagtattgtccgtattctgcaaagacgcgcaggaaagaatgccgttaatgcaaaaaacgccggaagcggacgccctgctctcctttgtaaccaatgtgcacgctttaaaaagcgcgttggcaagtcttggggcgaaagatatttccgagatcgccgcaggacttgaagccgccggcaaagaggcggacatgaattttatccgcgaacatctgcccggctttgcgcagcagcttgcggaactggtaatcaatattgataaagctttggaacaaaagggaccggaaaacacatccgctccccagccgcgcacagattattccccattatttaaagaacttgcctcagcattaaaatcgcaaaacgccgccgacatagaccgtattttggaagaactgaatcaaaaaactcttgactctaaaaccaaaacggcgctggaaaaaatctccgacgatgtactgatgactgaatttgacagcgccgttaaaaccattgaagaattgttaaacggataa

SEQ ID NO: 71078 - protein, 949 aa, Unknown
  Obtained from environmental sample
  DOMAIN (128)...(198): HAMP domain
  misc_feature (1)..(949): Xaa is any amino acid
MLYISDSTLIDYVLKTTKEHADHLLIRLKEYVAIQDQFSDVFSPGEMQDMANLLEIYTDAYTPLANNIFDLVEQGRREEALSVYINRLTPIFNTFTYYLNLGFLKNLEISDVRMKENNDKASFNVSLMLTLVVMSLIVSVLLALAVTKSIAVPLTELGSAAEELASGKLDVQFEDSKSDDEITRLSLRLRETLYLLNQIQQLKLEAVEAQAEKEKAEAASKSKDEFLAKMSHEIRTPMNAIIGMAELALREERRETAQEHILTIKQAGANLLSIINDILDFSKIESGKLEIVPINYQLSSLINDTINIIRMRLMEKPIRFFTNIDGNIPNSLIGDEVRMRQIFLNLLTNAVKYSEKGHIGLTITADKRDDKQVWLRIAVADTGKGIKQEDQEKLFREFAQIDTKKNQGIEGTGLGLVITKRLCVAMGGDISMESEYGKGSVFTAVIPQSIESEEPFAWVENPEKKKILVYEGRSIYAGAVCWTLRNMNVPHTLVTNQDDFAAALYREEWFYVFSSYGLYEKIKPVMGQSDTAFYNGKKPPMALMIEWGTEAYIPGVRFVSIPVQSLSIANVLNGKADSKDYIKNSSVIRFSFPHARLLVVDDIATNLKVVEGLLSPYKTTVDTCTNGLQAIELVKRSVSEKREYDIVFMDHMMPGMDGIEATAAIRAWEKEQQEKGSLSKQVPIIALTANAVVGMREMFIENNFNDFISKPIDVSKLDEILNHWIPEEKKEQSSQEHHEAYYHSSHEPVGGADSALYSIPGVDAVKGIPMTGGTLTSYKQVLSVFCKDAQERMPLMQKTPEADALLSFVTNVHALKSALASLGAKDISEIAAGLEAAGKEADMNFIREHLPGFAQQLAELVINIDKALEQKGPENTSAPQPRTDYSPLFKELASALKSQNAADIDRILEELNQKTLDSKTKTALEKISDDVLMTEFDSAVKTIEELLNG

SEQ ID NO: 71079 - DNA, 1059 bp, Unknown
  Obtained from environmental sample
  misc_feature (1)..(1059): n is a, c, g, or t
atggagaacgaaaaaaagcttgttattttggtagacgataatcccgcgaatctgcggattggaaaaaacgtactggcggaaaaatataccgtcgccacttgtccttcggcggaaaaaatgttcggtcttttggaaaacaacaaccccgcagttattctgcttgacgtagatatgccggaaatgaacggctacgacgcgataaaaattcttaaatccaaaccggaaacaaaagatattccggtaatttttttaaccgcccgcactgaatcggacgatgaacttaccgggctttcacttggagctattgattacatcacaaaaccgtttcagcccccactgcttcttaaacgcatagaagtacacatactggtagaagaccagcgtaaagaacttaaatacttcaacgagaatctgcaaaaaatggtgcaagaaaaaacgcaaagcgtaattgaactgcagaacgcccttttaaaaacaatggcggaattggttgaatgcagggacgacataacaggcggacacatagagcggacacagcggggaataaaaatcctgttagatgaaattgaaaagagcaacctttacagtgaagaaacaaaaggctgggatgtgaatcttctgcttcaatcatgtcagcttcatgatgtaggcaaaatatcaatcagcgacagtatacttaaaaaaccgggaaaacttactgaagaagaatccaaggaaatgaaaaaacacgcaagtttcggcgaacaaataattgaaaagattgaaaaactcgcaaaagaaagcgattttttggattacgcgaaaattttcgccgccagccaccacgaaagatgggacggctccggttacccgcgcggactggaagggaacaaaattcccctcttggggcgcatcatggcgatagccgacgtatacgacgcgcttgtttcggaacgtccgtacaaagaagcgtttagtcacgatgaagcggtgcggattatcaccgaaggaagcggggtccagtttgatcccgagttggtagaagtattcacccgcgcggcggaccgattcaaaaactga

SEQ ID NO: 71080 - protein, 352 aa, Unknown
  Obtained from environmental sample
  DOMAIN (171)...(308): HD domain
  misc_feature (1)..(352): Xaa is any amino acid
MENEKKLVILVDDNPANLRIGKNVLAEKYTVATCPSAEKMFGLLENNNPAVILLDVDMPEMNGYDAIKILKSKPETKDIPVIFLTARTESDDELTGLSLGAIDYITKPFQPPLLLKRIEVHILVEDQRKELKYFNENLQKMVQEKTQSVIELQNALLKTMAELVECRDDITGGHIERTQRGIKILLDEIEKSNLYSEETKGWDVNLLLQSCQLHDVGKISISDSILKKPGKLTEEESKEMKKHASFGEQIIEKIEKLAKESDFLDYAKIFAASHHERWDGSGYPRGLEGNKIPLLGRIMAIADVYDALVSERPYKEAFSHDEAVRIITEGSGVQFDPELVEVFTRAADRFKN

SEQ ID NO: 71081 - DNA, 3246 bp, Unknown
  Obtained from environmental sample
  misc_feature (1)..(3246): n is a, c, g, or t
atgtacgacaaatatacggcggctggcgttaagcttgaaattatcgcgcttggaaccaccggttatggggaacttttgtttgataaagcgttaggcgccgattatcataccgtggaaacagtagctcacgccgcggctgcccaaaaatacattcccgacgtgagcttcatccttgatataggcggccaggacatgaaggcaataggcatttcaaacggtattgtaacgaatataaccgtaaacgaagcctgttcctcgggctgcggctcttttctggaaacattcgctgaaacgctgcatattcctgttaataaaattgcggaaactgcgtttaacgccaaaagtccggcgaagcttggcagccgctgtactgtctttatgaacagcacgattatcaccgagcaaaaaaacgggaaacaggccgacgacattatggccggcctttgccgcgcgattgtggaaaatgtttttacaaaagttgtgcgtatagccaatcccgcccgtcttggcgacaaaattgtcgttcagggcggaacgctcaggaacgacgcggtgcttagggcctttgaacagtatctgggaaaatttgtagtccgcgcccctttccccggggaaatgggcgccataggcatagcccttcttacaaagcgggagatttccgagaacggatattcttcgcctcacggccccagcgaccgcacgcgatttatgggttttgaagcgttaaaaacatttgagtataagcaggaggcgaatttactctgccccttctgcgccaataactgcaaccgtaccctgctgcgtttttcgaacggtcagacatgggttatcggtaaccgttgcgagcgcggagaggtagtaggcgatccgggtgatccggctgtccgcgagcaggtaaaaaatataacagggcttatgaacgccgcccctgacatgataaaagtcaggaacgaactgctttttaaggattacaagtatacgcagcttcttccctcaaaggacattacaatcgggcttccgagggtgctggacttctggaggagcatgcctttctggaaagtgttttggtccgcgcttggttataaaataaaaatttcgaggaagagttccagacagttatacgaaaaaggcctgcagtatatcgcttccgatacggtctgctttccggcgaaactggtccacgggcatatacaggatctgattgaaagcaaagttgacaggattttctttccgcagattaacaggctgccggcggacaaccctgaaaaaaccggtacttttacatgccccgtattgaaaggataccctctttcgatacggtgttcggacaatcctgaagaaaaacacagtatcccgcttgattcgcctgtatgccactggttttcagacagggatatgcggttccaactgtgccgttatatgctggagactttcaatatacccaaaaagaccacccttgccgcgattaagcaggcagaaaaagccatgacggaattttaccagttgatgttagagaaagggaaaaaagtccttgaggatgttgagaaaagcggaaaaatcgccgtggttatcgccggacggtattatcagtacgacgaacagataaatcacaatctgtcccattattttacaagccatgggcatacccgtgcttacgctggattctcttcccaatctggaaagattcctcttgccaaatcgcggattgaaattacaaatgacaaccacgccaggcttctngccggcgccatcttcgccgcgcagcatccttcgctggaatatgttgacatctacagtttcggctgcgggcatgacgccgtttattcggatgaaataatccgcatcatggacgaaatctccggcaaagccccgttaatattaaagctggatgaaagtgatattgccggccccttaaggatcagggttcgttcgttcatcgaaactgtaatgatacgccgcaaacgaaaaacgcataacgcaaagccgctgggagacccctacgcggtcaaatatacaaagaaagagccgaaaaaggttctgcttgttccaaacgtaagccgggcgttctgcatggttttaagcggcgccctcgccaatgaaggctaccttgtagaaccgctgcctatgggcggtcttgaagctatagcgatggggaaaaaatatgtgcataacgacatgtgccttcccgtgcagattgtagtgggggaggcccttctcgcgttaaaaagcggaaaatacgatccggacaagactttggtcggcatggcgaaggtgttatgcgattgccgcctttccaattatatgcccctcgcgagaaaagcccttgacgaagcgggttatccgcaggtgcctattgttaccaccgacatgtcggattccaaaaacgcccatccgggactgcgctttacaaatattacctacactaaagccatgtggagcataatccagacggacgctattgaattcctgcggcgcaggatacggccttacgaactgcagaaaggggaaacagataaagttgttgaaaacgctatcgatgaaatctccgaagggctctccagaagcggcattccgggggcaaacgccgcgttcaagaaagcgataaatgatttgtgcgccgtacgctatgaccgttcaaaactgcgggaacaggttcttattcagggtgagtattatttaacctttcatccgggttcaaattttgaaattgaaaattatcttgaaagaaacggaatggaagtgattcttcccagaatgaacaccgtttaccgccatctgtttttacagcatacccttgccgagatgaaagaattcaaagtgcgtcattctttatatgacagtttatacgcccacgccggcagtaaatttatggatatagccgagaaatacgttgataaaatcgcctcgaagcatccgctgtatgaacctgaaatttcgcttgaagaggcggcaaaatacagcgacgatataatacatcattcgatattgtcgggagaatctttccttattgccgcccatactttgcatcatgccgaaaaagggatacgctcgtttattatacttcagcctttcggctgcctgccgaatcatatctgcgggcgcggggtgattaaaagaatcaaggaaatgcatccggatattcaaatcctgccgcttgattacgagcctgacgtaagttttgccaatatcgaaaacagaatacaaatgctgctgatgaatatgaaaaacctaaaagcggcgggataa

SEQ ID NO: 71082 - protein, 1081 aa, Unknown
  Obtained from environmental sample
  DOMAIN (3)...(215): BadF/BadG/BcrA/BcrD ATPase family
  misc_feature (1)..(1081): Xaa is any amino acid
MYDKYTAAGVKLEIIALGTTGYGELLFDKALGADYHTVETVAHAAAAQKYIPDVSFILDIGGQDMKAIGISNGIVTNITVNEACSSGCGSFLETFAETLHIPVNKIAETAFNAKSPAKLGSRCTVFMNSTIITEQKNGKQADDIMAGLCRAIVENVFTKVVRIANPARLGDKIVVQGGTLRNDAVLRAFEQYLGKFVVRAPFPGEMGAIGIALLTKREISENGYSSPHGPSDRTRFMGFEALKTFEYKQEANLLCPFCANNCNRTLLRFSNGQTWVIGNRCERGEVVGDPGDPAVREQVKNITGLMNAAPDMIKVRNELLFKDYKYTQLLPSKDITIGLPRVLDFWRSMPFWKVFWSALGYKIKISRKSSRQLYEKGLQYIASDTVCFPAKLVHGHIQDLIESKVDRIFFPQINRLPADNPEKTGTFTCPVLKGYPLSIRCSDNPEEKHSIPLDSPVCHWFSDRDMRFQLCRYMLETFNIPKKTTLAAIKQAEKAMTEFYQLMLEKGKKVLEDVEKSGKIAVVIAGRYYQYDEQINHNLSHYFTSHGHTRAYAGFSSQSGKIPLAKSRIEITNDNHARLLAGAIFAAQHPSLEYVDIYSFGCGHDAVYSDEIIRIMDEISGKAPLILKLDESDIAGPLRIRVRSFIETVMIRRKRKTHNAKPLGDPYAVKYTKKEPKKVLLVPNVSRAFCMVLSGALANEGYLVEPLPMGGLEAIAMGKKYVHNDMCLPVQIVVGEALLALKSGKYDPDKTLVGMAKVLCDCRLSNYMPLARKALDEAGYPQVPIVTTDMSDSKNAHPGLRFTNITYTKAMWSIIQTDAIEFLRRRIRPYELQKGETDKVVENAIDEISEGLSRSGIPGANAAFKKAINDLCAVRYDRSKLREQVLIQGEYYLTFHPGSNFEIENYLERNGMEVILPRMNTVYRHLFLQHTLAEMKEFKVRHSLYDSLYAHAGSKFMDIAEKYVDKIASKHPLYEPEISLEEAAKYSDDIIHHSILSGESFLIAAHTLHHAEKGIRSFIILQPFGCLPNHICGRGVIKRIKEMHPDIQILPLDYEPDVSFANIENRIQMLLMNMKNLKAAG

SEQ ID NO: 71083 - DNA, 708 bp, Unknown
  Obtained from environmental sample
  misc_feature (1)..(708): n is a, c, g, or t
ttggccgaggtaccatgtttcaacgcattggggacaattacccctgtcagggaaatgattcaaatcgcacacgcaaacggagcgcgtatccttgttgacggagcgcagtctgtagcgcatacgccgcttaatgtcagcgaacttgacgcggatttttttgtgttctcagggcacaaaatattcggacctacaggtataggcgcgttatacgggaaatcggacgttctggaagaagcccagccctaccagggcggcggcaatatgataaaggacgtaacatttgaacgcacgttatacaatgacgctcctgttaagtttgaagcgggaaccggcaatatcgccgatgccgtcggtcttggcgctgcgctggattatgtttcaggcataggaattgcaaacatcagcgcttatgagcacgaattgcttgattacgcaacccgcgaacttcggcgcataagagggctgcgtcttatcggcacggcggcggaaaaggcgagcgttctgtcttttgtgcttgacggcgcaaacgtggagcaggttggcaaacatcttgccggacgaggcattgccgtgcgcgccggacaccactgcgctcagcctatattgcgccgctttggactggaagcgacagtacgtccgaccattgcgttttacaacactgcggaagaaattgataaactggcgggcgcgatcagggaacttgtgtga

SEQ ID NO: 71084 - protein, 235 aa, Unknown
  Obtained from environmental sample
  DOMAIN (1)...(227): Aminotransferase class-V
  misc_feature (1)..(235): Xaa is any amino acid
MAEVPCFNALGTITPVREMIQIAHANGARILVDGAQSVAHTPLNVSELDADFFVFSGHKIFGPTGIGALYGKSDVLEEAQPYQGGGNMIKDVTFERTLYNDAPVKFEAGTGNIADAVGLGAALDYVSGIGIANISAYEHELLDYATRELRRIRGLRLIGTAAEKASVLSFVLDGANVEQVGKHLAGRGIAVRAGHHCAQPILRRFGLEATVRPTIAFYNTAEEIDKLAGAIRELV

SEQ ID NO: 71085 - DNA, 900 bp, Unknown
  Obtained from environmental sample
  misc_feature (1)..(900): n is a, c, g, or t
gtgataatgaatattttagaaatggtcggtaatacaccggttattgaactgaaaaatattttcaatactgcgaacggagtttccctgtttgccaaagcggagtattttaatccaagcggttccgtaaaagaccgcgccgcaaaagcaatgatgctgcacggcattaactcgggacagcttaccaaagataaaattttattggactctacaagcggtaatacgggtatcgcgtacgccatgttcggcgcagcgcttggttaccgtgtaaaactgttcatgccggcaaatgccagcgaggaaagaaaaaaacttatacgcgcttacggcgcggaaattgcagaaacagacccgctcgaaggctccgacggcgcgtaccgcatagtgatggagttggcaaaaaaagagccggacttgtatttcttccccaaccagtacgacaattttgaaaatccgcgcgcgcattatgaaacaaccggagtcgaactgtataaccaatgcaagccgacgcattttgtcgcaggaaccggcacatcgggaacttttatgggcgtttccaagcgtcttaaggaatttgattcgtccatacaaattgttcttatgcagccggattcgccgttccacggtcttgagggaatgaagcacatggaatcgaccataacgccgaaaatattcgacaaaagtatcgccgatttgcacataacagttaaaacggaagacgcttacaaaacatcgcggaggcttgccgcggaagaaggagtttttgtagggataagctcaggcgcaaatgttttcgccgctatggaaatagcaaaaacactgcccgcaggttcgcgagtcgctacaatgctatgcgataatggcaatcgctatatgtcacagccgttatggaaggatatttaa

SEQ ID NO: 71086 - protein, 299 aa, Unknown
  Obtained from environmental sample
  DOMAIN (5)...(286): Pyridoxal-phosphate dependent enzyme
  misc_feature (1)..(299): Xaa is any amino acid
MIMNILEMVGNTPVIELKNIFNTANGVSLFAKAEYFNPSGSVKDRAAKAMMLHGINSGQLTKDKILLDSTSGNTGIAYAMFGAALGYRVKLFMPANASEERKKLIRAYGAEIAETDPLEGSDGAYRIVMELAKKEPDLYFFPNQYDNFENPRAHYETTGVELYNQCKPTHFVAGTGTSGTFMGVSKRLKEFDSSIQIVLMQPDSPFHGLEGMKHMESTITPKIFDKSIADLHITVKTEDAYKTSRRLAAEEGVFVGISSGANVFAAMEIAKTLPAGSRVATMLCDNGNRYMSQPLWKDI

SEQ ID NO: 71087 - DNA, 438 bp, Unknown
  Obtained from environmental sample
  misc_feature (1)..(438): n is a, c, g, or t
atggaaggatatttaatgctgcggctttcttccgaattggaaaaaaatattagaacggacggcgaagccgcctaccccaacgagtgctgcggcgtcttaatcggtgaagttgacaatgagggaattaaaacagtaaagagtacgctaaccattgataacgcaagagaggatgtggaacaataccaccgttttctgataacgccggaagacatgatgaaagcggagcaaaccgcaagatcgatgaaactcgacgttatcggcttttaccactcgcaccccgaccacccctcaaagccctcaggatacgataaagatcacgccttgcctttttactcgtatgtgattgtgtcggtggataaaggcaaggcgcagattctttacagctgggaacttatcaatgacagaagcgattttgcgcaggaaaaggtaataacttag

SEQ ID NO: 71088 - protein, 145 aa, Unknown
  Obtained from environmental sample
  misc_feature (1)..(145): Xaa is any amino acid
MEGYLMLRLSSELEKNIRTDGEAAYPNECCGVLIGEVDNEGIKTVKSTLTIDNAREDVEQYHRFLITPEDMMKAEQTARSMKLDVIGFYHSHPDHPSKPSGYDKDHALPFYSYVIVSVDKGKAQILYSWELINDRSDFAQEKVIT

SEQ ID NO: 71089 - DNA, 1425 bp, Unknown
  Obtained from environmental sample
  misc_feature (1)..(1425): n is a, c, g, or t
ttgataaaagttcttattccttacgcgcttaggtcatttaccgagcgcaacgcggaggtggaagtaaacggcggcacggcgggcgacgcgattaacgcgcttgcaagcgcctaccccgctcttaaaacccaccttttcacggaagacggtcagcttcgtgattttatcaacttgttcgtaggcggcgcaaacatcaacagcttgcaggggcttaacactcccattgcggataacggcgaattgatgattgttcctgccattgcgggcggcagtggcgaaagcggcgcggagcttaccaacgaagaaatagggcgatacagccgccatttgcttttgccggaaatcggcgttgaggggcagaaaaaattaaaggcggctaaagtcctcattgtcggcacgggggggcttggcgctccccttgccttgtaccttgcggcggcgggcgtgggaacaatcggactggtggattttgacgtggtagatgaatctaatcttcagcggcaaattattcacagcacgcgcgacgtgggcagacccaaagtggcgtccgcaaaagacagaatcaagggaataaatccgctggtaaatgtggtgacgcataacgaaatgcttaccagcaaaaacgcgctggagctttttgccgattacgacattatcgccgacggaacggataatttccaaacacgctatcttgtaaacgacgcctgcgtttttttgggcaaacttaacgcctacggttccgtgtttcagttcgacggacaggcgacagttttcggcgcgaaagacggtccgtgttaccgctgtttgtacccttccccgccgcctccgggacttgttccttcctgtgcggaaggcggagtcatgggcgtactgcccggcattatcggaacaattcaggcggcggagacaattaagctgattgtaggcggggcaaagccgctcatcgggcgactgcttttatttgacgcgtggcgtatgtcgtttcgtgaattaaaattggataaaaaccccgaatgccccgtatgcgggaagaatcccaccattcacgaattaattgactacgaacaattttgcggtttgaaaaaaaataccgacagcaaaccgatagatactataaccgctcttgatttaaaaaaacgacttgataacggggacaaaattcaatttatagatatacgcgaacctcatgaacgagccatcgtaaaattcccggacgcaaaagttattccgcttggtcagcttgaaagacgcatggaagaattagacacgtctatagacgcggtgttcttgtgcaaaataggtcagcgcagtattttgggaatacgcactttgcaggacgcgggctacaaaggcaaactgctgaatctgcaagacgggcttaacgcgtgggcaagagatgtagataaaagtatgcctatttattaa

SEQ ID NO: 71090 - protein, 474 aa, Unknown
  Obtained from environmental sample
  DOMAIN (373)...(466): Rhodanese-like domain
  misc_feature (1)..(474): Xaa is any amino acid
MIKVLIPYALRSFTERNAEVEVNGGTAGDAINALASAYPALKTHLFTEDGQLRDFINLFVGGANINSLQGLNTPIADNGELMIVPAIAGGSGESGAELTNEEIGRYSRHLLLPEIGVEGQKKLKAAKVLIVGTGGLGAPLALYLAAAGVGTIGLVDFDVVDESNLQRQIIHSTRDVGRPKVASAKDRIKGINPLVNVVTHNEMLTSKNALELFADYDIIADGTDNFQTRYLVNDACVFLGKLNAYGSVFQFDGQATVFGAKDGPCYRCLYPSPPPPGLVPSCAEGGVMGVLPGIIGTIQAAETIKLIVGGAKPLIGRLLLFDAWRMSFRELKLDKNPECPVCGKNPTIHELIDYEQFCGLKKNTDSKPIDTITALDLKKRLDNGDKIQFIDIREPHERAIVKFPDAKVIPLGQLERRMEELDTSIDAVFLCKIGQRSILGIRTLQDAGYKGKLLNLQDGLNAWARDVDKSMPIY

SEQ ID NO: 71091 - DNA, 414 bp, Unknown
  Obtained from environmental sample
  misc_feature (1)..(414): n is a, c, g, or t
atgtggattatattcgcgttactatcggcattttttgcggcgttaacttcgatactggcaaaaatcggcattcaaaatgtaaattcaaatttggcgaccgcaataagaaccgtagtcattcttgttatgtcttggattattgttttttctacggggaaacatagcgaacttgcaaatattagtcacaaaaatttgctttttttaattttatcgggaatagcgacggggttatcgtggctttgttatttcagagcgttgcaaatcggagaagcgtcaaaagttattcccatagataaattcagtttagtacttggtatgataatggcatttattgttttaagagaagcaataaccgtaaaaacaattatcggcggcgtattaattaccattggcacttttgttttaatcttttaa

SEQ ID NO: 71092 - protein, 137 aa, Unknown
  Obtained from environmental sample
  SIGNAL (1)...(20)
  DOMAIN (11)...(137): Integral membrane protein DUF6
  misc_feature (1)..(137): Xaa is any amino acid
MWIIFALLSAFFAALTSILAKIGIQNVNSNLATAIRTVVILVMSWIIVFSTGKHSELANISHKNLLFLILSGIATGLSWLCYFRALQIGEASKVIPIDKFSLVLGMIMAFIVLREAITVKTIIGGVLITIGTFVLIF

SEQ ID NO: 71093 - DNA, 534 bp, Unknown
  Obtained from environmental sample
  misc_feature (1)..(534): n is a, c, g, or t
gtgcgtccctttcaaaatcctgttttagcggcaattacaaacagatcaggactgaacaacggtctttggtttacaatagcggctgtcgtaatttattggctcatcatggaaaaaagcgcgtttggtttttctcttaaagcgaccggctttaacaaagaagcggctttatacgcgggtatgcgcgtaaaaacaaatatcacggcggcaatggcaatatcaggcgcttttgcgggtcttgcgggcgctgttgtttctctgggcttgttcagttacggacgaatattaacatcgtttgacaattacggctttgacggcattgccgtcgctcttgcgggcaattgctccgcgctgggaatctcgataatgggactcctttttggaatgttaaaatccgcccaaccgttaacgcagttacgccaaataccaaaagaaatcgcgtcgattattatcagcttggtagtaatttttatcgcattgcgcccgggcgttcaaatgtttgtagattggcgtaagaagaaaagattaaaagattaa

SEQ ID NO: 71094 - protein, 177 aa, Unknown
  Obtained from environmental sample
  misc_feature (1)..(177): Xaa is any amino acid
MRPFQNPVLAAITNRSGLNNGLWFTIAAVVIYWLIMEKSAFGFSLKATGFNKEAALYAGMRVKTNITAAMAISGAFAGLAGAVVSLGLFSYGRILTSFDNYGFDGIAVALAGNCSALGISIMGLLFGMLKSAQPLTQLRQIPKEIASIIISLVVIFIALRPGVQMFVDWRKKKRLKD

SEQ ID NO: 71095 - DNA, 726 bp, Unknown
  Obtained from environmental sample
  misc_feature (1)..(726): n is a, c, g, or t
ttgacgactaaaattaaaagattagaagacaagattcttgatatctttacaggctctaatgccgtaatctctgttttagttgtgctttttggattttttgtcgctacgttactcattctgataatcgggaaaaatccgtctgtcatgtatcaggctatgctgcaggttgtcagcggatttgattcccgccgcggcacttggaacatccgctatgtcggggaatggatagtaatttccatgccgcttattttatgcggtttaagcatggggttttccgtccgcgtgggattgttcaatatcggggcggaaggacagtacatagccggattaacggcggctcaattaatcgccgtaggttttacaaacgccgcaggggagaggttacctgtccatttctcgcttgctgtgttaggtgcaatgtttttcggggcgttgtggggcggcatatcgggctttttcaaggcaaaatacaaagtatcggaagttgtttccacaatcatgatgaactacatcgctttttttctgcacaggtttatatcattaagcattccgggaagcaacactttcagaactcccaatttccccgatagtgcgtccctttcaaaatcctgttttagcggcaattacaaacagatcaggactgaacaacggtctttggtttacaatagcggctgtcgtaatttattggctcatcatggaaaaaagcgcgtttggtttttctcttaa

SEQ ID NO: 71096 - protein, 241 aa, Unknown
  Obtained from environmental sample
  misc_feature (1)..(241): Xaa is any amino acid
MTTKIKRLEDKILDIFTGSNAVISVLVVLFGFFVATLLILIIGKNPSVMYQAMLQVVSGFDSRRGTWNIRYVGEWIVISMPLILCGLSMGFSVRVGLFNIGAEGQYIAGLTAAQLIAVGFTNAAGERLPVHFSLAVLGAMFFGALWGGISGFFKAKYKVSEVVSTIMMNYIAFFLHRFISLSIPGSNTFRTPNFPDSASLSKSCFSGNYKQIRTEQRSLVYNSGCRNLLAHHGKKRVWFFS

SEQ ID NO: 71097 - DNA, 1014 bp, Unknown
  Obtained from environmental sample
  misc_feature (1)..(1014): n is a, c, g, or t
atgggtattactgtccgtcttcttacggacgcttccggcgttgacgataaatcttttaatgccgccgcttggagaggtattcttgatttttacggcgatacggagaaaaaacaaaagcagaaaggaaaagcttacgattgggttactactcaggatcaaagtatgtatatccccaaccttagaatggttaccgatgaaggctacgatttaattatcgtaaatggttatacatgggacgaatctttaactgtggtttccaatgataaccctgctcaaaaatatcttattgtcgatgtcgattgggtcgaggcgggcaatgtaatgcaggcggtttacgcggagcatgaaggctcttatcttgtcggcgtcgccgcggcgttaaaagcgcttgaggacggcataacttccccgcgttttggttttatcggcggagaaccttcttcgactattaccaagtttgaagttggttatgtgcaaggtattctttcaattatccccgatgcggaaattgtggattattatgtaaacagttggaatgaacccggacttgcgaaaactcaggcgatgaactggtatgactcaggcgtctatgcgatattctccgcggcgggaaacagcggcaacggaactatcgctcaggctaaggaataccgcgtcgcgggaaaaaatgtctgggcaataggagtggattccgatcaatatgaagacggactttacaataaaaaagattccgccgttcttacatcgatgattaaacgcgtggagaacagcgttatttttgcgcttaacgcggttaaaaataatacttttgctccaagcgttatagtttttgatttaaaagccgacggcgttggatattccgataagaattccgcgttaagcaaaaatataatcgaaagactggaacttgtaaaaaaacaaattgcaagcggaaacattaaagtagaggcgactcttgcggattctctgcgtctgccggggttccccaaaaatttaagggcgattgacgactaa

SEQ ID NO: 71098 - protein, 337 aa, Unknown
  Obtained from environmental sample
  DOMAIN (1)...(319): Basic membrane protein
  misc_feature (1)..(337): Xaa is any amino acid
MGITVRLLTDASGVDDKSFNAAAWRGILDFYGDTEKKQKQKGKAYDWVTTQDQSMYIPNLRMVTDEGYDLIIVNGYTWDESLTVVSNDNPAQKYLIVDVDWVEAGNVMQAVYAEHEGSYLVGVAAALKALEDGITSPRFGFIGGEPSSTITKFEVGYVQGILSIIPDAEIVDYYVNSWNEPGLAKTQAMNWYDSGVYAIFSAAGNSGNGTIAQAKEYRVAGKNVWAIGVDSDQYEDGLYNKKDSAVLTSMIKRVENSVIFALNAVKNNTFAPSVIVFDLKADGVGYSDKNSALSKNIIERLELVKKQIASGNIKVEATLADSLRLPGFPKNLRAIDD

SEQ ID NO: 71099 - DNA, 3051 bp, Unknown
  Obtained from environmental sample
  misc_feature (1)..(3051): n is a, c, g, or t
atgaaaagtattatcactctttttgtccgaagacctgtaacggtcattatgatactggcggctttaattttcgcggctgttttttctctttttactctgcctgtcaacagactgccctcgttttcaacgccgagagtaacggtagagacgctgtatcagggcatggcggctaacgaagtcagaagcatggttactattccgctggaagacggtctttccccgattaaaggactggaaagaatcaggagcgtatctcgagataacaggtcgcttatcagccttgatttccgctgggggacagatacgatgtccgcttctgttcttgtgcgcgaggcaattgacgctgtttatccgggacttcccgaaggggtaaacaagccgacagtaacgtccgcggacatggggaacgaagctcacgcagtaatagcggttagttcacataacggaaacggcgaatttgcgagaaaactcgctgagtacgaaatgcaggctcgtctgcgaagaatcgacggggtcggctctgtagttcttatcggcggtgaaataaaagaagagcgtctttctctcgacgtgcggcgtctttccgctctcggcatcgctccttccgacttcgctaaccttgtcgcgcgggaaaccgctgatattcccgccggaaacgcgcgggagggaaacatggaattggttgtcgtaagctccggaaaaccggattcagtttcttcgctttcacagattattcttccggcaagcggcggcggctcttttaagattgaagatacggcggaaattaccaattccacagcgcggcgggaaagcatatttattcacaacggaaaagaagccgcaggcttggagatttaccgcagacccggctccgacccgctgcggctgtcaagagaaataaaaaaaacgcttgatgaggctaattctctcttttcccgtgacgcaaaaattgaacttgttacggattcatcgtcatcgctcataagcggcgtaacaggtttattaatatccgccgctctcggcgtaacggcggtagtaacggttcttttactttttatccgccgcattaaatacagcttgctcgcggcgctttcaattcccgtttcagccgcagcgggcatttgcgttctctccgttatgggaaaatctttaaacggcatgagtctcggcggacttgcgatggggatagggttggtttccgacatcagcgtaataattattgatctgcttcatcaggcttttggggaaagagaaatcgcgcctataccggaagaaatcggaaacaaagcggcgtctatatcggggtcaaatattgcctctaccattacaactgcgcttgtgtttattccgattattatgctgccgggaccgttaggcggtcttttcggcgacatagctatcgcccttgttacatctgtcgcggcgggctggctttacgctcaattttttcttccttctctttattctatgttctttggcgatccattaaaaacagcaaataaaaatagattgataaaaattaattcagtttttacaaatggcagtcttgaaaataaatattatttccttctttcaaatgttcttcgtaattcgggaaaatttttagccgttacggcggggttaagcgttttagggttttttacgcttttaacccgcccggctgtattcattaatcccgatgaagccgaagaagtacaagtttccatattgtacccccaaggaactttgttagaaacaataaatgaaaatgtcctctccaaaaaagtaagttcaagactgccgtttgtaaaaactgtttatggaattgcgggcgcggaagaagcggatgttatcagaagggcagatattgattataaaaaagaagaacttattttgcactgtattttagaaaagggatataaacctcaaaaagcgttagatgaaatcaaaaaagttttggaaaacagcaatgaatattcttgcacggcgtattttccgaaagacaggattgaggttcttttggggttatcggcggagcggacttttgtaattaaagggaaggatagggaggaactgcttgaacgggttaatcttacacaaaatgaatttgactccgtgtctactgcggtaaatttccgtcctaagggaaaaagaccggaaatacgggtttatccaaacagggaagccgccgcatatctttcgatacccgcatcgcaaatagcggaaactctttttgttcttaacgaaggagttgtaacaacaaaactggaaattgacgggaaaccgttaaatgttcgcgtaacaggagagaggaatacccgcaatgatcccgttcaaagacttgaacaaataccgttaaagacaggtcagggaaaaaccgtataccttggctctgttgtaaaaatagagcaaaaagaagcggaagcgtctcttgcgcggctggacagagccgatgtaatctatgcggacatttccgccgaaaaagaaattccgtctgttgtcaaaaaactagccgcgcgattttcttggtttacgggagccgatgaatcggtattcagccgctacaaaaattctttgcttttttacgttatcctcgtgcttgttctgctgtatatgacaatgggcgctcaatttgaatcttttttacttccccttgttttaatgttaagcattcctttctcgcttgcgggagccggacccgctcttataatcagcggctcaaaaattgattcgggagccgtgcttggattaaccgctttattcggacttgttgtaaataacagccttattctctttgaaatcagcgaacaaaaaattcaagccggatttcccgtaacggacgccgtttgcagaggagcgtcggaacggttacaggcgattttgatcacaacgacaacgactgtcttcgctcttttgccgctaatcttcagtcctttaggaaattcgcaaaaatcaatggcggcggcaatgttaggcggacttacggtatcaacattgctcagtttgttcgcaattccttccgtattaattctgtattttaaatggaaaattcgcaacgaggaagatatatga

SEQ ID NO: 71100 - protein, 1016 aa, Unknown
  Obtained from environmental sample
  SIGNAL (1)...(25)
  DOMAIN (822)...(1008): Protein export membrane protein
  misc_feature (1)..(1016): Xaa is any amino acid
MKSIITLFVRRPVTVIMILAALIFAAVFSLFTLPVNRLPSFSTPRVTVETLYQGMAANEVRSMVTIPLEDGLSPIKGLERIRSVSRDNRSLISLDFRWGTDTMSASVLVREAIDAVYPGLPEGVNKPTVTSADMGNEAHAVIAVSSHNGNGEFARKLAEYEMQARLRRIDGVGSVVLIGGEIKEERLSLDVRRLSALGIAPSDFANLVARETADIPAGNAREGNMELVVVSSGKPDSVSSLSQIILPASGGGSFKIEDTAEITNSTARRESIFIHNGKEAAGLEIYRRPGSDPLRLSREIKKTLDEANSLFSRDAKIELVTDSSSSLISGVTGLLISAALGVTAVVTVLLLFIRRIKYSLLAALSIPVSAAAGICVLSVMGKSLNGMSLGGLAMGIGLVSDISVIIIDLLHQAFGEREIAPIPEEIGNKAASISGSNIASTITTALVFIPIIMLPGPLGGLFGDIAIALVTSVAAGWLYAQFFLPSLYSMFFGDPLKTANKNRLIKINSVFTNGSLENKYYFLLSNVLRNSGKFLAVTAGLSVLGFFTLLTRPAVFINPDEAEEVQVSILYPQGTLLETINENVLSKKVSSRLPFVKTVYGIAGAEEADVIRRADIDYKKEELILHCILEKGYKPQKALDEIKKVLENSNEYSCTAYFPKDRIEVLLGLSAERTFVIKGKDREELLERVNLTQNEFDSVSTAVNFRPKGKRPEIRVYPNREAAAYLSIPASQIAETLFVLNEGVVTTKLEIDGKPLNVRVTGERNTRNDPVQRLEQIPLKTGQGKTVYLGSVVKIEQKEAEASLARLDRADVIYADISAEKEIPSVVKKLAARFSWFTGADESVFSRYKNSLLFYVILVLVLLYMTMGAQFESFLLPLVLMLSIPFSLAGAGPALIISGSKIDSGAVLGLTALFGLVVNNSLILFEISEQKIQAGFPVTDAVCRGASERLQAILITTTTTVFALLPLIFSPLGNSQKSMAAAMLGGLTVSTLLSLFAIPSVLILYFKWKIRNEEDI

SEQ ID NO: 71101 - DNA, 321 bp, Unknown
  Obtained from environmental sample
  misc_feature (1)..(321): n is a, c, g, or t
atgaataaaagcttgaatatgggaacaattataggcgtatttggcgctattgccatgatcctcgcgtctatcatattgtccggcaacagtataatggccttcgttgatatcccgtcattagcgctcgttcttatcggttcatattttgcccttttaattgcttattcattatccgacggtttaggagtttttgccgctatcggacttaccttcaagcagcctgtattaaatttacagggaattattcagaagatggtttcattctccgagaaagcgaggcgcgaagggcttttggctcttgaagacgaactgaagacctga

SEQ ID NO: 71102 - protein, 106 aa, Unknown
  Obtained from environmental sample
  SIGNAL (1)...(27)
  misc_feature (1)..(106): Xaa is any amino acid
MNKSLNMGTIIGVFGAIAMILASIILSGNSIMAFVDIPSLALVLIGSYFALLIAYSLSDGLGVFAAIGLTFKQPVLNLQGIIQKMVSFSEKARREGLLALEDELKT

SEQ ID NO: 71103 - DNA, 1401 bp, Unknown
  Obtained from environmental sample
  misc_feature (1)..(1401): n is a, c, g, or t
atgatgcgatcattgttttccggcgtttccggacttcagaatcaccaaacaagaatggatgttattggtaataacatttccaatattaacacgacaggttttaaacgcaaccgtgtcggttttcaggacattatctaccagcagttgcagggagcggcgcgcccgaccgaagatctgggcggcgtaaaccccaaagaagtcggtcttggaatgtcaattgcctctatcgacacactgcatattcagggttctttgcagaccacaggcgtcggcacagaccttgctattacgggaaacggattttttattcttgacgactcgggcaaggaactttatacaagagcgggcgctttctcgcttgactcggacggcgttatggtaaatcccgcgaacggcatgaaggttcagggttggatggcaagggatgtaaacggttataccgtacttgacgtttcaagtcccgttgaacagcttgtaattcctgtcggcggcaaagaccccgccaaagcgaccaccatggtcgattttgcgtgtaaccttgacaaacgcattcccgaacttccggaaaatcctaccggggatcaggtgctcaaatcaacatggtcaacgactattaaagtctatgacactttcggcgatgtgcatgatttacaggttcaatttacccgcgtaccgggaactccgaacagctggaacgcgagggtaaatgtcgatcctcagaacgaaaaccccacaaacgctacaataggtttcggagcggaagctcccgcggccggcggccccacaacctttgtcgtaaatttctcaaataacggaactttgctttccgccgaagacggcgcgggcaatgtgtcgggcgcttccggccaagtgcagatgaatttagcctttgacgtgcagaacgccacaccaaacgcggacggcactcccacaaggcagcaatttgtccttaacctgggcgaagtaggcggatttacccgctcgattacccagtacgcggaatccagttccaccaaagcggtagagcaggacggccgcacaatgggctatcttgacgactttaagattgactcttcgggcataattaccggcgttttttcaaacggcagtacgcgtgttttgggacaggttgccatggctaccttccccaaccagggcggccttgaaaaagcgggcgacaatactttccgccagtccaacaactctggaatggcgaatataggcccttcgggaattgccggaaagggaaagattatagccggtactttggaaatgtccaatgttgacatggctgatcagtttgtggacatgatagtcacgcaaagaggtttccaggccaactcaagaaccatacaaacggcggatcaattattgcaggaacttttatcgctaaagcggtaa

SEQ ID NO: 71104 - protein, 466 aa, Unknown
  Obtained from environmental sample
  DOMAIN (5)...(35): Flagella basal body rod protein
  misc_feature (1)..(466): Xaa is any amino acid
MMRSLFSGVSGLQNHQTRMDVIGNNISNINTTGFKRNRVGFQDIIYQQLQGAARPTEDLGGVNPKEVGLGMSIASIDTLHIQGSLQTTGVGTDLAITGNGFFILDDSGKELYTRAGAFSLDSDGVMVNPANGMKVQGWMARDVNGYTVLDVSSPVEQLVIPVGGKDPAKATTMVDFACNLDKRIPELPENPTGDQVLKSTWSTTIKVYDTFGDVHDLQVQFTRVPGTPNSWNARVNVDPQNENPTNATIGFGAEAPAAGGPTTFVVNFSNNGTLLSAEDGAGNVSGASGQVQMNLAFDVQNATPNADGTPTRQQFVLNLGEVGGFTRSITQYAESSSTKAVEQDGRTMGYLDDFKIDSSGIITGVFSNGSTRVLGQVAMATFPNQGGLEKAGDNTFRQSNNSGMANIGPSGIAGKGKIIAGTLEMSNVDMADQFVDMIVTQRGFQANSRTIQTADQLLQELLSLKR

SEQ ID NO: 71105 - DNA, 465 bp, Unknown
  Obtained from environmental sample
  misc_feature (1)..(465): n is a, c, g, or t
atggaaatagatgcgaacaacatgaccagaacggttttgaattcgactgaaaaaaacgaacttgaaaaaatggttcgcgattttaatcttaagacaaacccggtgcggcagccgcagcagaatttgggcagagacgattttcttaaaatcttgattacccagctttcataccaggacccgacagctccaatgcaggacaaggaatttattgcgcagatggcgcaattttcgtctttggagcagatgacggcgatggcgaaagattttgcgaagcttaccgcgatgattggttcaaatgaagcgtctacttcacttggaaaaaatgttgaggttgtagaaggagagcgcgttgttcaaggcgttgttcaggcggtaacaagaggggaaacaccgcaggtactggtaaatgggactttttataattgggataaagtagtcaaagtatttgcagatgaaaaggaatag

SEQ ID NO: 71106 - protein, 154 aa, Unknown
  Obtained from environmental sample
  DOMAIN (10)...(152): Flagellar hook capping protein
  misc_feature (1)..(154): Xaa is any amino acid
MEIDANNMTRTVLNSTEKNELEKMVRDFNLKTNPVRQPQQNLGRDDFLKILITQLSYQDPTAPMQDKEFIAQMAQFSSLEQMTAMAKDFAKLTAMIGSNEASTSLGKNVEVVEGERVVQGVVQAVTRGETPQVLVNGTFYNWDKVVKVFADEKE

SEQ ID NO: 71107 - DNA, 1407 bp, Unknown
  Obtained from environmental sample
  misc_feature (1)..(1407): n is a, c, g, or t
gtggtgataaccttatccgcctacacacaaccgccgccgattgatactaaagttgctttcagcgaacttccgcaaacgcaaatccgcgaaacgaatgaaatccatgaatacgaaaatgatcaggattcttttgcggaaattttcgcgggcaaactgcgtgaaaccggcgaagaagaacaaagaacggtaaaagaaacatccgaatcttcatcggaagattcgtacgaaaaatcgtacgaagtttcgtctgaagattctgataaggattttacagaccttcaaattgaagcggcggcttttgccggcgagggaattacttttgttaacaagccggaagccgtaatttccgcgcaggaagaaatccccgcaatcatgctgtatgaaacgggaatttatgaaatagaaatctttgaaaatcatcccgatatccttgcggacatggaagatatgcaggtttacgagaaggcaattcccggcgaggatgccgaattgccgcagaactttttcgatacggaaacacctgaacagttggcggatttctcggaagaagccttaaccgcttcggcagtccccgttcaggaaacggactttgccggcgcaagcggcaaagaagttaaaaaagacggcgatttatttcaatcggaaaaaactgaagtctctcttttgaacagcgccggcaaagaagccgctcctttgcagaaagagactgaaaaagacagccgcgtaaaaccgggagaagcgcaaagcaagagccgccgcgacaaactatcttttgaagtgcgcgacatgcgctcaggtccggacaatcaaaacaacgtgtcgcagattaaagcaggcgctcagattgaacgtacgcagaacattcctgtaagggaattaactcttgaactgcgtctgcctggcagcgcgcaaagtacggcgcagacggcgtgggaagcaaaagcggggggcgccgccatcgagaacatgctcgcgagggaactgcaccagaactttaacggcgacattgtgcgccatgcttccatggcgcttcatgacggaggggagggggttattaaacttgcccttaagccggacagtcttggaaatgtaaagatacacttgaaaatgtccgaaaacaagataacggggcatattgtcgtggaaagcgaggaagccctgaacgctttcaggaaggaaattacttctttggaacaggctttcagggattcaggctttgaaaacgcccagcttgatctgtcgttaaccgccgatcagcggaatacggaccggcaggaacaaaaagcgccttcctctttacaggggattgcggcttcccgttacgatgaatcttacgcaggggattcattgcccgtagtcaatgtctttttcggacagaggcatgggtcggttaatatgcttgcgtaa

SEQ ID NO: 71108 - protein, 468 aa, Unknown
  Obtained from environmental sample
  DOMAIN (276)...(417): Flagellar hook-length control protein
  misc_feature (1)..(468): Xaa is any amino acid
MVITLSAYTQPPPIDTKVAFSELPQTQIRETNEIHEYENDQDSFAEIFAGKLRETGEEEQRTVKETSESSSEDSYEKSYEVSSEDSDKDFTDLQIEAAAFAGEGITFVNKPEAVISAQEEIPAIMLYETGIYEIEIFENHPDILADMEDMQVYEKAIPGEDAELPQNFFDTETPEQLADFSEEALTASAVPVQETDFAGASGKEVKKDGDLFQSEKTEVSLLNSAGKEAAPLQKETEKDSRVKPGEAQSKSRRDKLSFEVRDMRSGPDNQNNVSQIKAGAQIERTQNIPVRELTLELRLPGSAQSTAQTAWEAKAGGAAIENMLARELHQNFNGDIVRHASMALHDGGEGVIKLALKPDSLGNVKIHLKMSENKITGHIVVESEEALNAFRKEITSLEQAFRDSGFENAQLDLSLTADQRNTDRQEQKAPSSLQGIAASRYDESYAGDSLPVVNVFFGQRHGSVNMLA

SEQ ID NO: 71109 - DNA, 633 bp, Unknown
  Obtained from environmental sample
  misc_feature (1)..(633): n is a, c, g, or t
atgataggcaggtcaatagttctaataatactcatagctatattgtctgtgggcgggcttatttggtttgattttttaaatgttatagacgctaaaggcattcttgcgcctatttacgcgcgcgttccctttatacccaaaatactcaaaatacccggaatgagcagaactcagccgaaaacaaaaaccgatgaaatactcgatctaaacaacgaaaggcttgcggtaaggctggaagctcttgattacctgagacaggaaatggaaacacaaaagcgggatttggagaaccagaacggggaaattgagcagaaggctcaggagcttgaggagcgtcaaaaagcgcttgacgagcaggaaaattccctcagagtgaaggcgcaggatgccgaaaataaggataagaatgtcgagcagaatgcccggtatctgactggtatgcctccgcaaaacgcggttggcataattgccaagctggatgatcaggacgcgatagacgttctccgaaagaccgaggaaatagcgaaggccgaaggtacggtttcaatcgtatccttctggttctcactgatggaaccgggtagggcggctgaactgcaaagaaaaatggcaagcaggcctccccaactgtaa

SEQ ID NO: 71110 - protein, 210 aa, Unknown
  Obtained from environmental sample
  misc_feature (1)..(210): Xaa is any amino acid
MIGRSIVLIILIAILSVGGLIWFDFLNVIDAKGILAPIYARVPFIPKILKIPGMSRTQPKTKTDEILDLNNERLAVRLEALDYLRQEMETQKRDLENQNGEIEQKAQELEERQKALDEQENSLRVKAQDAENKDKNVEQNARYLTGMPPQNAVGIIAKLDDQDAIDVLRKTEEIAKAEGTVSIVSFWFSLMEPGRAAELQRKMASRPPQL

SEQ ID NO: 71111 - DNA, 633 bp, Unknown
  Obtained from environmental sample
  misc_feature (1)..(633): n is a, c, g, or t
ttgactacttacttaaacaaaatctgcgccgccataacagttaattctccgcaacctgatatttataacggttatcatgtagcaatgctgaacacccctgaaattaacgcctttgcgacttccgggggtcatatttttgtcacacgcggaattattagtgccgctgacaccgaagatgggcttgccggaataatcgcgcatgaagtcgcccatattcagttaaagcatggtattaatgccatcaaaaacagccgaaaaacacaggcttggttagtcacaagcactgcgatggccggtgttgccggtggaacggatgtcaaacaattgaccgatgctttgaacgattcatttatggagtttgtgcaaacgcttgtaagtaacggttattcaaagaatcaggaatttgatgctgataataaagcagttgcactcatggccgctgccggatataatccggaaggtttaggtagagtgctcatgaaattagacggtctccaagaacctggctcaggttttggtaaaacgcatccaagtccccaagagcgtgtagctaatattaataagtcagttaaaaaacacaaagcaacatataaagatgtgagaaagaagcggtttactagggaaacaaaatag

SEQ ID NO: 71112 - protein, 210 aa, Unknown
  Obtained from environmental sample
  DOMAIN (8)...(191): Peptidase family M48
  misc_feature (1)..(210): Xaa is any amino acid
MTTYLNKICAAITVNSPQPDIYNGYHVAMLNTPEINAFATSGGHIFVTRGIISAADTEDGLAGIIAHEVAHIQLKHGINAIKNSRKTQAWLVTSTAMAGVAGGTDVKQLTDALNDSFMEFVQTLVSNGYSKNQEFDADNKAVALMAAAGYNPEGLGRVLMKLDGLQEPGSGFGKTHPSPQERVANINKSVKKHKATYKDVRKKRFTRETK

SEQ ID NO: 71113 - DNA, 423 bp, Unknown
  Obtained from environmental sample
  misc_feature (1)..(423): n is a, c, g, or t
atggctgaagaaaaatacaaggtgcttattgttgatgatgagcatgtgaaccttagcatattaactcatatattggaaaatgattataaaatctataccgaggctgacggggatggcgctattaataaagcaaaagaaattttacccgatcttattttgttggatattgttatgccgggaacagacgggtacgcgactcttattgaactgaaaaaaattgaggaaaccaaagatatacccgtaatatttattacaggattaagccatccggaagaagaagaaaaaggattggcgcttggagctgccgactatatattaaaaccgttcagcgcgaaggtaataaagctaagggttgagcatcagattcaaaattataatatgaggaagacaatcaagaaattaaacagctcaatcgcgtcttag

SEQ ID NO: 71114 - protein, 140 aa, Unknown
  Obtained from environmental sample
  DOMAIN (6)...(119): Response regulator receiver domain
  misc_feature (1)..(140): Xaa is any amino acid
MAEEKYKVLIVDDEHVNLSILTHILENDYKIYTEADGDGAINKAKEILPDLILLDIVMPGTDGYATLIELKKIEETKDIPVIFITGLSHPEEEEKGLALGAADYILKPFSAKVIKLRVEHQIQNYNMRKTIKKLNSSIAS

SEQ ID NO: 71115 - DNA, 492 bp, Unknown
  Obtained from environmental sample
  misc_feature (1)..(492): n is a, c, g, or t
atgaaaaaagttgccgttttaatgggaagcgacagcgatttgcctgtgttggagccgctttttaagcggcttaaagattttaacattccttttgaggcgcatgtgatgagcgcgcaccgcactccggcgcttgcgtccgattttgctttaagcgcgcgaaaaaacgggtttggggtaattatcgcggcggcgggaaaggcggcgcatcttgcgggcgttgtcgcggcgcatactacgcttcccgttatcggtatccctgtaaaatcttccgctcttgacggccttgacgcgttattttctaccgtgcagatgccgtcgggaattcccgtcgcaacggtggcaatagacggcgcggataacgccgggatccttgccgcccagattttatcgctggaagataacgcgttaactgaaaaacttataaaaatgaaaaaagacatgacggaacaggtaattgagaaagacaaaaaaatacaggagaaaattaaatga

SEQ ID NO: 71116 - protein, 163 aa, Unknown
  Obtained from environmental sample
  DOMAIN (2)...(158): AIR carboxylase
  misc_feature (1)..(163): Xaa is any amino acid
MKKVAVLMGSDSDLPVLEPLFKRLKDFNIPFEAHVMSAHRTPALASDFALSARKNGFGVIIAAAGKAAHLAGVVAAHTTLPVIGIPVKSSALDGLDALFSTVQMPSGIPVATVAIDGADNAGILAAQILSLEDNALTEKLIKMKKDMTEQVIEKDKKIQEKIK

SEQ ID NO: 71117 - DNA, 690 bp, Unknown
  Obtained from environmental sample
  misc_feature (1)..(690): n is a, c, g, or t
atgaaaaagcttgaacaaatttatgaaggaaaggcaaaaaaagttttcaagacggacaacccggaacttcttattgttgattacaaagacgacgctacggcgtttaacggcgaaaagaaaggaacaatcgcggggaaaggagttattaataaccgtgttaccaaccatcttatgaaactcctggaatcaaaaggtataccgactcattttgttgaggaaatatccgagcgcgagactgtcgtaaaaaaagtgcaaattgtaatgctggaagttattgtacgaaatatagcggcaggctccctttcaaagagattaggacttgccgaaggcacaaagatggcgtccacagttcttgaatactgctacaaggacgacgcgttaggcgatccaatggtaaacgattatcatattgccgcgttaaaccttgccacaaaagcggaacttgaaaaaatctcggattattcatttaagataaataaaatactgtcggaatatcttaaggatttaggtcttgaattaattgattttaaacttgagttcgggcgcacaagcgacggaacaattgttcttgcggatgaaatatctccggacaccctgcgtttctgggacagcaaaacgcatgaaaaactggacaaagaccgttccgccgcgatttgggcggagtggaggacgcgtacaaggaaatattga

SEQ ID NO: 71118 - protein, 229 aa, Unknown
  Obtained from environmental sample
  DOMAIN (3)...(229): SAICAR synthetase
  misc_feature (1)..(229): Xaa is any amino acid
MKKLEQIYEGKAKKVFKTDNPELLIVDYKDDATAFNGEKKGTIAGKGVINNRVTNHLMKLLESKGIPTHFVEEISERETVVKKVQIVMLEVIVRNIAAGSLSKRLGLAEGTKMASTVLEYCYKDDALGDPMVNDYHIAALNLATKAELEKISDYSFKINKILSEYLKDLGLELIDFKLEFGRTSDGTIVLADEISPDTLRFWDSKTHEKLDKDRSAAIWAEWRTRTRKY

SEQ ID NO: 71119 - DNA, 1431 bp, Unknown
  Obtained from environmental sample
  misc_feature (1)..(1431): n is a, c, g, or t
atgcttgaaagcctgcaggaaaagtgcggagtcttcggaatatactccaataacggaaacaccgatgttacgacaatggcgtatctttcacttttcgcgcttcagcaccgcgggcaggaaagctgcggcattgcggtttgtaatgaaggggtaatgcaataccataccgacatagggcttgttccggatgttttttcaagagaaacgcttgaaaaactgggaaatggaaacatggccgtagggcacgtccgctattcaacaacggggcagaaaagcagggtaaacgcccagccgcttgtcgtaatgcacataaaaggcagcatggccattgcgcataacggaaatataacaaacgcggctgaactccgcgagaaacttgaattggacggcgcgctttttcattccaccaacgacacggaaataatcctgcatataattacaaagaagaggatacagtcgccgtctatagaaaccgccattgaacaggctatgtacgagatacagggcgcttactcgcttgtgataatgtcgccaagcaagctgatagcggtgcgcgacccctgcggattccgccctttgagcatggggtctttgggcggcgacattatattcgcgtctgaatcctgcgcttttgacagcataggggctgaatttatacgcgatatagaacccggagaaatagtaatagttgacaatgacgggccgcgcagcattaaaacacattgcggaaagcccggcggaatgtgcgtttttgagtttatttacttcgcccgccccgattcaattattgctggggcgagcgttcatacagccagacagagagcgggcgcgtttcttgctcttgaacatcccgttcaggcggacgttgtcattggggtgccggattcaggccttgacgccgctttaggatattcgcgccagtcgggcatcccatacggggttggctttataaaaaaccgttacataggccgcacgtttatccagccttctcaggaagagcgcgaccgttccgtgcgtataaaactgaacacaatagaggctacaattaaaggaatgcgcgttgtcttaatagacgactctatcgtgcgaggcaccacaatgagaaggatagtgaaccttgtgcgggaatccggagcgaaagaagtccacttgcgcatttcatctcctccgtttgtaaacccctgctatttcggcactgatatagacagccgtgaaaaccttatcgcgtgcaagatgagcatacccgaaatccgcgattatcttggagcggacagtttaggttatcttcccgtggacaatgttacaaaaatagcgcagaacgcaaaatgtaatttttgcagcggatgtttcagcgggaaatatcctgtgcctgaacctcagcctttcgcgaaaaataaatttgagaataaaatcggcagggttgttaattaa

SEQ ID NO: 71120 - protein, 476 aa, Unknown
  Obtained from environmental sample
  DOMAIN (260)...(402): Phosphoribosyl transferase domain
  misc_feature (1)..(476): Xaa is any amino acid
MLESLQEKCGVFGIYSNNGNTDVTTMAYLSLFALQHRGQESCGIAVCNEGVMQYHTDIGLVPDVFSRETLEKLGNGNMAVGHVRYSTTGQKSRVNAQPLVVMHIKGSMAIAHNGNITNAAELREKLELDGALFHSTNDTEIILHIITKKRIQSPSIETAIEQAMYEIQGAYSLVIMSPSKLIAVRDPCGFRPLSMGSLGGDIIFASESCAFDSIGAEFIRDIEPGEIVIVDNDGPRSIKTHCGKPGGMCVFEFIYFARPDSIIAGASVHTARQRAGAFLALEHPVQADVVIGVPDSGLDAALGYSRQSGIPYGVGFIKNRYIGRTFIQPSQEERDRSVRIKLNTIEATIKGMRVVLIDDSIVRGTTMRRIVNLVRESGAKEVHLRISSPPFVNPCYFGTDIDSRENLIACKMSIPEIRDYLGADSLGYLPVDNVTKIAQNAKCNFCSGCFSGKYPVPEPQPFAKNKFENKIGRVVN

SEQ ID NO: 71121 - DNA, 348 bp, Unknown
  Obtained from environmental sample
  misc_feature (1)..(348): n is a, c, g, or t
ttgtttgagctgggcagggaaaagcgacgctccgggctcccctgggcgatgatcattatttcccaccgcgtctcggccctgagccgtgcggatgaggttattgttttggagaaaggcagaatcacagaaagggggacaccggctgagcttgcgtcgggaaacggtttctatgcccacacagcagccctgcaaagcctggggggctctgtgcaacatcatcaacttaagcctaaaatgaaggtttttggttgcacttgtacttgttcaaacgcttccacttgcgaggggagcttttcagtttccgcaccggtacaatgtactgttccatgtcagcaatcaactgtttga

SEQ ID NO: 71122 - protein, 115 aa, Unknown
  Obtained from environmental sample
  misc_feature (1)..(115): Xaa is any amino acid
MFELGREKRRSGLPWAMIIISHRVSALSRADEVIVLEKGRITERGTPAELASGNGFYAHTAALQSLGGSVQHHQLKPKMKVFGCTCTCSNASTCEGSFSVSAPVQCTVPCQQSTV

SEQ ID NO: 71123 - DNA, 1323 bp, Unknown
  Obtained from environmental sample
  misc_feature (1)..(1323): n is a, c, g, or t
atgagtggaaaggcagtttatgcacggattaagcaattatttgaggaaattcgcagtgaaagaataaaaaaggcagcccgcaagtccggcgagttgcgcagctggacacggaaacgaattatgccgctttatgatatgctcatttgtatacttgccaagaaaggcttgagcgcggcgatggaaatacgaaagttctttgaggcggcggggaaaacggaacggagcgtcagcaagcaaggctatctgaaacaacgcaagaaattaaatccggaagtattcaaactgctcaaccgcgactacctaaaacagttttacggagggcaggaagccaagggatggagagggtatctgctactggcggaagacggcagccgtgcagaaataccggacagcgcggagaaccggaaaacctatggggagaacgggaaccagcacggggaaaccgttagccgggctaatatcaacattctttacgatgtagagaaccgtttcatactggacgttgggatacaccgggtcggcagcagcgagctggcagaagccaaagagcagattgaatgccttaaggaaacgataggggaaaggaaagcgctggcgatcttcgatcggaactacggatcgctggaattcatcaattttttggaagagcaagggataaaatacattatccggctgcaggcagggaaatataaagcagaagtatccggaatgcgaggcaaggacgagtgggttgcattggaacataccagcaatcggctaaggaacagtagcgcaaagcgaaagcaggagcttgccgaaaaggggcatacgtcggtgcggatggtacggacgggatttgcggacgaggaacagggaatgctgctgacaaacctgaaggaagggagttctagcgagatacaaaagctgtaccgcaggcggtggaagattgagcagaaattccacaccctgaaaaacaagatgaagtttgagagcgtaacgggaaaagcgagcgtctatgtacagcaggatttctgggcgcagatgctggcattcaacattgtgcaggatctgataacggcagcgcagcggcgtgcggccagggaagcaaagaaaaagaagtatatttatgagatgagaataaatgagaatatagccataggactgtttaaagaacagtttataaagctgatgataactgaagatgaccaaatgaaaggtgcgctgttcaaacagttgattgctgacatggaacagtacattgtaccggtgcggaaactgaaaagctcccctcgcaagtggaagcgtttgaacaagtacaagtgcaaccaaaaaccttcattttag

SEQ ID NO: 71124 - protein, 440 aa, Unknown
  Obtained from environmental sample
  DOMAIN (118)...(346): Transposase DDE domain
  misc_feature (1)..(440): Xaa is any amino acid
MSGKAVYARIKQLFEEIRSERIKKAARKSGELRSWTRKRIMPLYDMLICILAKKGLSAAMEIRKFFEAAGKTERSVSKQGYLKQRKKLNPEVFKLLNRDYLKQFYGGQEAKGWRGYLLLAEDGSRAEIPDSAENRKTYGENGNQHGETVSRANINILYDVENRFILDVGIHRVGSSELAEAKEQIECLKETIGERKALAIFDRNYGSLEFINFLEEQGIKYIIRLQAGKYKAEVSGMRGKDEWVALEHTSNRLRNSSAKRKQELAEKGHTSVRMVRTGFADEEQGMLLTNLKEGSSSEIQKLYRRRWKIEQKFHTLKNKMKFESVTGKASVYVQQDFWAQMLAFNIVQDLITAAQRRAAREAKKKKYIYEMRINENIAIGLFKEQFIKLMITEDDQMKGALFKQLIADMEQYIVPVRKLKSSPRKWKRLNKYKCNQKPSF

SEQ ID NO: 71125 - DNA, 345 bp, Unknown
  Obtained from environmental sample
  misc_feature (1)..(345): n is a, c, g, or t
ttgaatttgccgaaggcagaagcagtttcaatccacgcacccgcacggggtgcgacgaattataacgatcaatgccccagatcaagtcgagtttcaatccacgcacccgcacggggtgcgacccgcaagccgacagtagcggacggagagtgttatgcgtttcaatccacgcacccgcacggggtgcgacaagctcccctatgtggacaaggccctggagaatcacgtttcaatccacgcacccgcacggggtgcgactcaataatctgcttgatgtttttttcgtcgggcttgtttcaatccacgcacccgcacggggtgcgacttggttcaatttggaggtaa

SEQ ID NO: 71126 - protein, 114 aa, Unknown
  Obtained from environmental sample
  misc_feature (1)..(114): Xaa is any amino acid
MNLPKAEAVSIHAPARGATNYNDQCPRSSRVSIHAPARGATRKPTVADGECYAFQSTHPHGVRQAPLCGQGPGESRFNPRTRTGCDSIICLMFFSSGLFQSTHPHGVRLGSIWR

SEQ ID NO: 71127 - DNA, 345 bp, Unknown
  Obtained from environmental sample
  misc_feature (1)..(345): n is a, c, g, or t
gtgcgacataccgccatttcaataaatatattctgctccggtttcaatccacgcacccgcacggggtgcgacctaattggatgtcgctttctacttcgtacattaaggtttcaatccacgcacccgcacggggtgcgacacgttaaaggcttaataagcaggcgccttagcgcagtttcaatccacgcacccgcacggggtgcgacaccaccatctcctacaataggatctgaattccctggtttcaatccacgcacccgcacggggtgcgacccggtaaaaatagcgataaaagcaagtaccttttctgtttcaatccacgcacccgcacggggtgcgacttaa

SEQ ID NO: 71128 - protein, 114 aa, Unknown
  Obtained from environmental sample
  misc_feature (1)..(114): Xaa is any amino acid
MRHTAISINIFCSGFNPRTRTGCDLIGCRFLLRTLRFQSTHPHGVRHVKGLISRRLSAVSIHAPARGATPPSPTIGSEFPGFNPRTRTGCDPVKIAIKASTFSVSIHAPARGAT

SEQ ID NO: 71129 - DNA, 315 bp, Unknown
  Obtained from environmental sample
  misc_feature (1)..(315): n is a, c, g, or t
atgtgtagtgtttcaatccacgcacccgcacggggtgcgacctacaaagcagtcatggacgcgatagcctttatgaagtttcaatccacgcacccgcacggggtgcgacttttctctcttaggtcaggagggtcttcatcatctgtttcaatccacgcacccgcacggggtgcgacataccgccatttcaataaatatattctgctccggtttcaatccacgcacccgcacggggtgcgacctaattggatgtcgctttctacttcgtacattaaggtttcaatccacgcacccgcacggggtgcgacacgttaa

SEQ ID NO: 71130 - protein, 104 aa, Unknown
  Obtained from environmental sample
  misc_feature (1)..(104): Xaa is any amino acid
MCSVSIHAPARGATYKAVMDAIAFMKFQSTHPHGVRLFSLRSGGSSSSVSIHAPARGATYRHFNKYILLRFQSTHPHGVRPNWMSLSTSYIKVSIHAPARGATR

SEQ ID NO: 71131 - DNA, 336 bp, Unknown
  Obtained from environmental sample
  misc_feature (1)..(336): n is a, c, g, or t
atggcttatggcgttgaaattggcggggcgtcgcaccccgtgcgggtgcgtggattgaaacccgtgtccaattatggtagtacaaccaacaatagcaagtcgcaccccgtgcgggtgcgtggattgaaaccggctggtattatcggtattttccattgtgaagtagtcgcaccccgtgcgggtgcgtggattgaaacaaggagatattggcttaatccctctgcctggcgagtcgcaccccgtgcgggtgcgtggattgaaacaggaaagggcctgaattggtggcaggtggcggttgtcgcaccccgtgcgggtgcgtggattgaaacttcatag

SEQ ID NO: 71132 - protein, 111 aa, Unknown
  Obtained from environmental sample
  misc_feature (1)..(111): Xaa is any amino acid
MAYGVEIGGASHPVRVRGLKPVSNYGSTTNNSKSHPVRVRGLKPAGIIGIFHCEVVAPRAGAWIETRRYWLNPSAWRVAPRAGAWIETGKGLNWWQVAVVAPRAGAWIETS

SEQ ID NO: 71133 - DNA, 330 bp, Unknown
  Obtained from environmental sample
  misc_feature (1)..(330): n is a, c, g, or t
ttgttttttgttcgtttgtttcaatccacgcacccgcacggggtgcgacgctgtttctggtttcggctccgtcaagggcacaggggtttcaatccacgcacccgcacggggtgcgaccttccagtaaccgcaaattcttccttttcttttgtttcaatccacgcacccgcacggggtgcgacccgttcctttagcgtgtccgcacctagagcctatagtttcaatccacgcacccgcacggggtgcgacgcgccgcgcccggtcaatacatttattgcgtttaatgtttcaatccacgcacccgcacggggtgcgacatcgcagagatag

SEQ ID NO: 71134 - protein, 109 aa, Unknown
  Obtained from environmental sample
  misc_feature (1)..(109): Xaa is any amino acid
MFFVRLFQSTHPHGVRRCFWFRLRQGHRGFNPRTRTGCDLPVTANSSFSFVSIHAPARGATRSFSVSAPRAYSFNPRTRTGCDAPRPVNTFIAFNVSIHAPARGATSQR

SEQ ID NO: 71135 - DNA, 363 bp, Unknown
  Obtained from environmental sample
  misc_feature (1)..(363): n is a, c, g, or t
gtgcccttgacggagccgaaaccagaaacagcgtcgcaccccgtgcgggtgcgtggattgaaacaaacgaacaaaaaacaatcatacacccggcggccgtcgcaccccgtgcgggtgcgtggattgaaacaattcaactgttattacattgtaaccactaccaaagtcgcaccccgtgcgggtgcgtggattgaaacgtgtaaattgcatcctcttgtaatcgctggcttggtcgcaccccgtgcgggtgcgtggattgaaacaatgctttcaaatagggctataagcccttttatggtcgcaccccgtgcgggtgcgtggattgaaacaagaaaaaagtgggagcggacggcgaagtcatga

SEQ ID NO: 71136 - protein, 120 aa, Unknown
  Obtained from environmental sample
  misc_feature (1)..(120): Xaa is any amino acid
MPLTEPKPETASHPVRVRGLKQTNKKQSYTRRPSHPVRVRGLKQFNCYYIVTTTKVAPRAGAWIETCKLHPLVIAGLVAPRAGAWIETMLSNRAISPFMVAPRAGAWIETRKKWERTAKS

SEQ ID NO: 71137 - DNA, 618 bp, Unknown
  Obtained from environmental sample
  misc_feature (1)..(618): n is a, c, g, or t
atgttcgcttccctggcaatacacgacatcttgtttcaatccacgcacccgcacggggtgcgacaacggacaaaagaggcccttgccaggtgcaaggcggtttcaatccacgcacccgcacggggtgcgacttcagccttgactatgccgcttccgacaacgcaaaagtttcaatccacgcacccgcacggggtgcgactggctatatcttcggcaaggatttttatttccccggtttcaatccacgcacccgcacggggtgcgacattgccgacgaggattgtcagcgacctgggtttgtttcaatccacgcacccgcacggggtgcgaccttctctgttcataaatccagctcgggctcatgtgtttcaatccacgcacccgcacggggtgcgacctcatgacttcgccgtccgctcccacttttttcttgtttcaatccacgcacccgcacggggtgcgaccataaaagggcttatagccctatttgaaagcattgtttcaatccacgcacccgcacggggtgcgaccaagccagcgattacaagaggatgcaatttacacgtttcaatccacgcacccgcacggggtgcgactttggtagtggttacaatgtaa

SEQ ID NO: 71138 - protein, 205 aa, Unknown
  Obtained from environmental sample
  misc_feature (1)..(205): Xaa is any amino acid
MFASLAIHDILFQSTHPHGVRQRTKEALARCKAVSIHAPARGATSALTMPLPTTQKFQSTHPHGVRLAISSARIFISPVSIHAPARGATLPTRIVSDLGLFQSTHPHGVRPSLFINPARAHVFQSTHPHGVRPHDFAVRSHFFLVSIHAPARGATIKGLIALFESIVSIHAPARGATKPAITRGCNLHVSIHAPARGATLVVVTM

SEQ ID NO: 71139 - DNA, 507 bp, Unknown
  Obtained from environmental sample
  misc_feature (1)..(507): n is a, c, g, or t
ttgtttcaatccacgcacccgcacggggtgcgacttcttttgcccgaagaggcggatctgccaaaactgtttcaatccacgcacccgcacggggtgcgacgatatgttcgcttccctggcaatacacgacatcttgtttcaatccacgcacccgcacggggtgcgacaacggacaaaagaggcccttgccaggtgcaaggcggtttcaatccacgcacccgcacggggtgcgacttcagccttgactatgccgcttccgacaacgcaaaagtttcaatccacgcacccgcacggggtgcgactggctatatcttcggcaaggatttttatttccccggtttcaatccacgcacccgcacggggtgcgacattgccgacgaggattgtcagcgacctgggtttgtttcaatccacgcacccgcacggggtgcgaccttctctgttcataaatccagctcgggctcatgtgtttcaatccacgcacccgcacggggtgcgacctcatga

SEQ ID NO: 71140 - protein, 168 aa, Unknown
  Obtained from environmental sample
  misc_feature (1)..(168): Xaa is any amino acid
MFQSTHPHGVRLLLPEEADLPKLFQSTHPHGVRRYVRFPGNTRHLVSIHAPARGATTDKRGPCQVQGGFNPRTRTGCDFSLDYAASDNAKVSIHAPARGATGYIFGKDFYFPGFNPRTRTGCDIADEDCQRPGFVSIHAPARGATFSVHKSSSGSCVSIHAPARGATS

SEQ ID NO: 71141 - DNA, 306 bp, Unknown
  Obtained from environmental sample
  misc_feature (1)..(306): n is a, c, g, or t
ttgtttcaatccacgcacccgcacggggtgcgaccagtaaccataaccggggacggcatagtaaagcggggtttcaatccacgcacccgcacggggtgcgacgggttaaaagcaaccgcgtcttgcccaggttttaggtttcaatccacgcacccgcacggggtgcgactccccattatttcccaaatgcagggcgctgttgttgtttcaatccacgcacccgcacggggtgcgacgtttcaagtcggcgttaatacacagcgtttcaatgtttcaatccacgcacccgcacggggtgcgacttaa

SEQ ID NO: 71142 - protein, 101 aa, Unknown
  Obtained from environmental sample
  misc_feature (1)..(101): Xaa is any amino acid
MFQSTHPHGVRPVTITGDGIVKRGFNPRTRTGCDGLKATASCPGFRFQSTHPHGVRLPIISQMQGAVVVSIHAPARGATFQVGVNTQRFNVSIHAPARGAT

SEQ ID NO: 71143 - DNA, 525 bp, Unknown
  Obtained from environmental sample
  misc_feature (1)..(525): n is a, c, g, or t
atgttgtttcaatccacgcacccgcacggggtgcgacaaagcttcagtaagcggcccgattgcgccgcctatgtttcaatccacgcacccgcacggggtgcgacccttgccatcgacatttgcatcggtatcccaattgtttcaatccacgcacccgcacggggtgcgactaaacctagtctatatgccctacgtcgagggcttgtttcaatccacgcacccgcacggggtgcgacgtcgcaccgtggccttggcaacattcggcctaccagtttcaatccacgcacccgcacggggtgcgacatgttgaatccgtcctgggttccgcattgcagaacggtttcaatccacgcacccgcacggggtgcgactccggacgatgttgtagaggaatacggcatatcgtttcaatccacgcacccgcacggggtgcgaccggccatgatcatgttctccgctccgggtactgcgtttcaatccacgcacccgcacggggtgcgacataaggccgcccgttgtgaataa

SEQ ID NO: 71144 - protein, 174 aa, Unknown
  Obtained from environmental sample
  misc_feature (1)..(174): Xaa is any amino acid
MLFQSTHPHGVRQSFSKRPDCAAYVSIHAPARGATLAIDICIGIPIVSIHAPARGATKPSLYALRRGLVSIHAPARGATSHRGLGNIRPTSFNPRTRTGCDMLNPSWVPHCRTVSIHAPARGATPDDVVEEYGISFQSTHPHGVRPAMIMFSAPGTAFQSTHPHGVRHKAARCE

SEQ ID NO: 71145 - DNA, 333 bp, Unknown
  Obtained from environmental sample
  misc_feature (1)..(333): n is a, c, g, or t
atgccgtattcctctacaacatcgtccggagtcgcaccccgtgcgggtgcgtggattgaaaccgttctgcaatgcggaacccaggacggattcaacatgtcgcaccccgtgcgggtgcgtggattgaaactggtaggccgaatgttgccaaggccacggtgcgacgtcgcaccccgtgcgggtgcgtggattgaaacaagccctcgacgtagggcatatagactaggtttagtcgcaccccgtgcgggtgcgtggattgaaacaattgggataccgatgcaaatgtcgatggcaagggtcgcaccccgtgcgggtgcgtggattgaaacatag

SEQ ID NO: 71146 - protein, 110 aa, Unknown
  Obtained from environmental sample
  misc_feature (1)..(110): Xaa is any amino acid
MPYSSTTSSGVAPRAGAWIETVLQCGTQDGFNMSHPVRVRGLKLVGRMLPRPRCDVAPRAGAWIETSPRRRAYRLGLVAPRAGAWIETIGIPMQMSMARVAPRAGAWIET

SEQ ID NO: 71147 - DNA, 618 bp, Unknown
  Obtained from environmental sample
  misc_feature (1)..(618): n is a, c, g, or t
ttgccgtcgcaaagcccattgtttcaatccacgcacccgcacggggtgcgaccggtccaggccaattccaaaaacgacaagtacgatgtttcaatccacgcacccgcacggggtgcgacctttaagacaacggtaaaagagcttaccgatttagtttcaatccacgcacccgcacggggtgcgacaagagcgacgcagtttatacccgctatggagagacgtttcaatccacgcacccgcacggggtgcgactttttaaatcataccaattatatttataatctaaagtttcaatccacgcacccgcacggggtgcgaccggcattccagcaaggcgcgaagggaaacggaagagtttcaatccacgcacccgcacggggtgcgacgtctgaaccccagctttgctggcaggtggcaattggtttcaatccacgcacccgcacggggtgcgacaaagcatatcttcaacatgatcaacgtattgccgtgtttcaatccacgcacccgcacggggtgcgaccgtaccggaaattcgtagccgtccagatttttaatgtttcaatccacgcacccgcacggggtgcgactgcctttttcagtttcatgcctgccccctaa

SEQ ID NO: 71148 - protein, 205 aa, Unknown
  Obtained from environmental sample
  misc_feature (1)..(205): Xaa is any amino acid
MPSQSPLFQSTHPHGVRPVQANSKNDKYDVSIHAPARGATFKTTVKELTDLVSIHAPARGATRATQFIPAMERRFNPRTRTGCDFLNHTNYIYNLKFQSTHPHGVRPAFQQGAKGNGRVSIHAPARGATSEPQLCWQVAIGFNPRTRTGCDKAYLQHDQRIAVFQSTHPHGVRPYRKFVAVQIFNVSIHAPARGATAFFSFMPAP

SEQ ID NO: 71149 - DNA, 747 bp, Unknown
  Obtained from environmental sample
  misc_feature (1)..(747): n is a, c, g, or t
atgtttatggtcatgtctcccagttttgtttcaatccacgcacccgcacggggtgcgaccccaggccaagaccgctttatcagcggcatacactggtttcaatccacgcacccgcacggggtgcgacgggatattgaatgccaaaaaaaacacagcaccggtgtttcaatccacgcacccgcacggggtgcgaccccagactatgcaatcccctgttacctgcttctccgtttcaatccacgcacccgcacggggtgcgacattattgccggtcgcgttgaatttcagcgtgccacgtttcaatccacgcacccgcacggggtgcgactcagaatcaattgtagcaggttgatttacaacaagtttcaatccacgcacccgcacggggtgcgacccacgccctcatactttggggctttgaggttctggtttcaatccacgcacccgcacggggtgcgacacgccgccgaaaagggggaaactaatcacccctaccgtttcaatccacgcacccgcacggggtgcgacatgctgataccgaggggtttcaatcatcgccgttttgtttcaatccacgcacccgcacggggtgcgacccgatgtagcctggcttgccgtcgcaaagcccattgtttcaatccacgcacccgcacggggtgcgaccggtccaggccaattccaaaaacgacaagtacgatgtttcaatccacgcacccgcacggggtgcgacctttaagacaacggtaa

SEQ ID NO: 71150 - protein, 248 aa, Unknown
  Obtained from environmental sample
  SIGNAL (1)...(18)
  misc_feature (1)..(248): Xaa is any amino acid
MFMVMSPSFVSIHAPARGATPGQDRFISGIHWFQSTHPHGVRRDIECQKKHSTGVSIHAPARGATPDYAIPCYLLLRFNPRTRTGCDIIAGRVEFQRATFQSTHPHGVRLRINCSRLIYNKFQSTHPHGVRPTPSYFGALRFWFQSTHPHGVRHAAEKGETNHPYRFNPRTRTGCDMLIPRGFNHRRFVSIHAPARGATRCSLACRRKAHCFNPRTRTGCDRSRPIPKTTSTMFQSTHPHGVRPLRQR

SEQ ID NO: 71151 - DNA, 504 bp, Unknown
  Obtained from environmental sample
  misc_feature (1)..(504): n is a, c, g, or t
gtgcgactggaagccccgatgaagttctgggagccggttttggtttcaatccacgcacccgcacggggtgcgacgcttaaacaattcctcgtttgtcgctttgatgtccgggtttcaatccacgcacccgcacggggtgcgacttcttctttatgtttatggtcatgtctcccagttttgtttcaatccacgcacccgcacggggtgcgaccccaggccaagaccgctttatcagcggcatacactggtttcaatccacgcacccgcacggggtgcgacgggatattgaatgccaaaaaaaacacagcaccggtgtttcaatccacgcacccgcacggggtgcgaccccagactatgcaatcccctgttacctgcttctccgtttcaatccacgcacccgcacggggtgcgacattattgccggtcgcgttgaatttcagcgtgccacgtttcaatccacgcacccgcacggggtgcgactcagaatcaattgtagcaggttga

SEQ ID NO: 71152 - protein, 167 aa, Unknown
  Obtained from environmental sample
  misc_feature (1)..(167): Xaa is any amino acid
MRLEAPMKFWEPVLVSIHAPARGATLKQFLVCRFDVRVSIHAPARGATSSLCLWSCLPVLFQSTHPHGVRPQAKTALSAAYTGFNPRTRTGCDGILNAKKNTAPVFQSTHPHGVRPQTMQSPVTCFSVSIHAPARGATLLPVALNFSVPRFNPRTRTGCDSESIVAG

SEQ ID NO: 71153 - DNA, 390 bp, Unknown
  Obtained from environmental sample
  misc_feature (1)..(390): n is a, c, g, or t
ttgcatgtttcaatccacgcacccgcacggggtgcgactaatctcgccgtcaactatttccgtcgtttcaaagtttcaatccacgcacccgcacggggtgcgacagaacgttccgccaaccacatcgcctattgccttgtttcaatccacgcacccgcacggggtgcgaccaaagtcacttccctcttcgctcatcatttgaccagtttcaatccacgcacccgcacggggtgcgacttgataatctcgccgtcaactatttccgtcgtttcaaagtttcaatccacgcacccgcacggggtgcgacgttacgttttcatattgcgtaaggataaaagcngcagtttcaatccacgcacccgcacggggtgcgactggaagccccgatga

SEQ ID NO: 71154 - protein, 129 aa, Unknown
  Obtained from environmental sample
  misc_feature (1)..(129): Xaa is any amino acid
MHVSIHAPARGATNLAVNYFRRFKVSIHAPARGATERSANHIAYCLVSIHAPARGATKVTSLFAHHLTSFNPRTRTGCDLIISPSTISVVSKFQSTHPHGVRRYVFILRKDKSXSFNPRTRTGCDWKPR

SEQ ID NO: 71155 - DNA, 501 bp, Unknown
  Obtained from environmental sample
  misc_feature (1)..(501): n is a, c, g, or t
gtgcgacaccgcgtcaacagcgccctggaacacgtttttgaagtttcaatccacgcacccgcacggggtgcgacccaaatacaaccagcaataatccgcaaaactttcagtttcaatccacgcacccgcacggggtgcgacctcaaatatgatgacgacaaactgctcattaaaatgtttcaatccacgcacccgcacggggtgcgacttgatatttctaattcgtcaaggcctgggccaagtttcaatccacgcacccgcacggggtgcgacataaagttttttccgtccttgcttaccatcaggagtttcaatccacgcacccgcacggggtgcgacaatatccaaaaacaggcactgcttccatggcacagtttcaatccacgcacccgcacggggtgcgaccaattgtccattcgcagatgctgtattttcagacgtttcaatccacgcacccgcacggggtgcgactgtctccgtaccgcaacaggaattcattga

SEQ ID NO: 71156 - protein, 166 aa, Unknown
  Obtained from environmental sample
  misc_feature (1)..(166): Xaa is any amino acid
MRHRVNSALEHVFEVSIHAPARGATQIQPAIIRKTFSFNPRTRTGCDLKYDDDKLLIKMFQSTHPHGVRLDISNSSRPGPSFNPRTRTGCDIKFFPSLLTIRSFNPRTRTGCDNIQKQALLPWHSFNPRTRTGCDQLSIRRCCIFRRFNPRTRTGCDCLRTATGIH

SEQ ID NO: 71157 - DNA, 402 bp, Unknown
  Obtained from environmental sample
  misc_feature (1)..(402): n is a, c, g, or t
atgcttcgtttcaatccacgcacccgcacggggtgcgactttctttttttcttataccgctgtccgttctatagtttcaatccacgcacccgcacggggtgcgacaatatttgtgtctacgttcccaccaatgtctgtagtttcaatccacgcacccgcacggggtgcgacaaggtggtcaaggacgctttgcgattcattttcaagtttcaatccacgcacccgcacggggtgcgaccagggaatgacagaactttatgccaaaggtttagccgtttcaatccacgcacccgcacggggtgcgaccgctcttctcaagccaggcatcgaggtcttctatatgtttcaatccacgcacccgcacggggtgcgaccatcttccagcaggtcaaacgcgcatag

SEQ ID NO: 71158 - protein, 133 aa, Unknown
  Obtained from environmental sample
  misc_feature (1)..(133): Xaa is any amino acid
MLRFNPRTRTGCDFLFFLYRCPFYSFNPRTRTGCDNICVYVPTNVCSFNPRTRTGCDKVVKDALRFIFKFQSTHPHGVRPGNDRTLCQRFSRFNPRTRTGCDRSSQARHRGLLYVSIHAPARGATIFQQVKRA

SEQ ID NO: 71159 - DNA, 702 bp, Unknown
  Obtained from environmental sample
  misc_feature (1)..(702): n is a, c, g, or t
gtgggcgtaggtaatagggaaggaggttttaaaatgtcattttcaagagatctgaaagaaaaagcgtcaaaggtttgggaagaaggttacaatcatccgtttgtgcaggaacttggcaagggtacattggacaaggaaaaatttaaattttatttgctgcaggactacctgtatttaatacagtacgcgaaagttttcgccatagccgccgtaaagtccgatacggaagaactgatgacaaatttttcaacaagccagtatttaatcctcgcgaaggaaatggatgtacaccgcgaatatatggccggctttggcgtaacgagggaagagatgctttccgtaaagccctcgctgtttaacagcgcctacacagccaatatgctcgccttcggccagacaggcgggcttgcggaacttctcgccgccgtctttccctgcgcctggacatactccgattacgccaaacggcttaaagagcagtactcagaccgcctggaaggcagcttctataaaacatggatcgaaaattattcaggcgatgagtttctggaatcttttgaatggttcttcgacgcgcttgataatcttgtttcaaatatgtcagacaaacagcgtgaaaggataacggaaatttttatctccagcgttgaatttgagtatctgttttgggatatggcgtataacaggcggatgtcttattaa

SEQ ID NO: 71160 - protein, 233 aa, Unknown
  Obtained from environmental sample
  DOMAIN (19)...(229): TENA/THI-4/PQQC family
  misc_feature (1)..(233): Xaa is any amino acid
MGVGNREGGFKMSFSRDLKEKASKVWEEGYNHPFVQELGKGTLDKEKFKFYLLQDYLYLIQYAKVFAIAAVKSDTEELMTNFSTSQYLILAKEMDVHREYMAGFGVTREEMLSVKPSLFNSAYTANMLAFGQTGGLAELLAAVFPCAWTYSDYAKRLKEQYSDRLEGSFYKTWIENYSGDEFLESFEWFFDALDNLVSNMSDKQRERITEIFISSVEFEYLFWDMAYNRRMSY

SEQ ID NO: 71161 - DNA, 381 bp, Unknown
  Obtained from environmental sample
  misc_feature (1)..(381): n is a, c, g, or t
ttgcggaaaatgattcaagtagagagcttcctgaatgtggcggataattcaggcgccaagctggtccagtgcatcaaggttctgggcggtacccgccgccgttatgcgggtattggcgatataattgtggtggcggtaaaagaggctctgcccacatcggctataaagaaaggcacggtggaaaaagcggtggtggtgcgtacccacaaggagtaccgccgcccggacggaacctatatacggtttgacgacaacgcctgcgttattatcgacgcggcgctgaatcccaaggggaagcgtatcttcggcccggtagcccgcgagctgcgggaaaaggccgaatatatgaaaatcgtgtcccttgcccccgaggttttgtag

SEQ ID NO: 71162 - protein, 126 aa, Unknown
  Obtained from environmental sample
  DOMAIN (4)...(126): Ribosomal protein L14p/L23e
  misc_feature (1)..(126): Xaa is any amino acid
MRKMIQVESFLNVADNSGAKLVQCIKVLGGTRRRYAGIGDIIVVAVKEALPTSAIKKGTVEKAVVVRTHKEYRRPDGTYIRFDDNACVIIDAALNPKGKRIFGPVARELREKAEYMKIVSLAPEVL

SEQ ID NO: 71163 - DNA, 429 bp, Unknown
  Obtained from environmental sample
  misc_feature (1)..(429): n is a, c, g, or t
atgcagagtccaaaacgtgtaaagcgccgaaaggtgcagaggggcaatatgcccggaaacgccacaagatgcaactctgtcgtattcggcgactacgcacttgtcgctttggacagaatgtggatcacaaacaggcaggtggaagccgcccgtattgcgattaaccgtcatgtgaaacgcggcggaaaaatgtggatacgcattttctgcgacaagccgttctcaaagaaaccggctgaaactcgcatgggtaaaggaaaaggcgctcccgaatactgggtagcggtagtaaaaccgggaacggttatgtttgaactcggcggcggtattaaccgcgctcttgcggaagaagcgatgactttggcgggatcaaaactcccgataaaaacaaaatttgtcgcccgcgcggacatggaactgggagcttag

SEQ ID NO: 71164 - protein, 142 aa, Unknown
  Obtained from environmental sample
  DOMAIN (1)...(133): Ribosomal protein L16
  misc_feature (1)..(142): Xaa is any amino acid
MQSPKRVKRRKVQRGNMPGNATRCNSVVFGDYALVALDRMWITNRQVEAARIAINRHVKRGGKMWIRIFCDKPFSKKPAETRMGKGKGAPEYWVAVVKPGTVMFELGGGINRALAEEAMTLAGSKLPIKTKFVARADMELGA

SEQ ID NO: 71165 - DNA, 705 bp, Unknown
  Obtained from environmental sample
  misc_feature (1)..(705): n is a, c, g, or t
atgggacagaaagtaaacccgacaggacttagactcggtattaataaaacttggggttcccgctggtatgtcgatcctaaagaatatgtcgacgctcttcacgaggatttgtatcttcgtaagctcattatggatatgccggaaacaaaaggcgctgatatcgccgaactggaaattatccgtcacccgcagagaattacaattactattcatacggcgcgccccggtgtaatcatcggcgttaaaggcgctaacatcgaaaagatcggcaacgatttacagaaaaaaataaacaaaaaagtacagataaagattaaagaagtgcgcaacgccgacaacaacgcgcagattatcgcgcagaatatcgcgcgccagcttttggcaagatcgtctttcagacgcacaatgaagcaggcgattacaaacgctattaaaaaaggcaacgcgcagggcgtaaaagtgcgtctttccggccgtcttggcggcgctgaaatgtcgcgcactgaagaagcaaaagagggacgcattccgcttcacacattaagagcggatattgattatggttttaccgaagcgcatactccgtttggatcaatcggcgtaaaggtttgggtttataacggcatgaaatacggcaaagaacagaaagaagacgcaggcgctcttgtccgcaaacgacgggacagggcccctgccaggagttaa

SEQ ID NO: 71166 - protein, 234 aa, Unknown
  Obtained from environmental sample
  DOMAIN (65)...(119): KH domain
  misc_feature (1)..(234): Xaa is any amino acid
MGQKVNPTGLRLGINKTWGSRWYVDPKEYVDALHEDLYLRKLIMDMPETKGADIAELEIIRHPQRITITIHTARPGVIIGVKGANIEKIGNDLQKKINKKVQIKIKEVRNADNNAQIIAQNIARQLLARSSFRRTMKQAITNAIKKGNAQGVKVRLSGRLGGAEMSRTEEAKEGRIPLHTLRADIDYGFTEAHTPFGSIGVKVWVYNGMKYGKEQKEDAGALVRKRRDRAPARS

SEQ ID NO: 71167 - DNA, 423 bp, Unknown
  Obtained from environmental sample
  misc_feature (1)..(423): n is a, c, g, or t
atgaaagaagaaaaaggttataaagcaattagcagatttcttatcgggtcgccttacaagatcagacctgtagccgaccttgttcgccgcaggacatatcccgaggcgatttccattttggaaaatatgcctcataagggagcgaagctgattcgcaagactgtaaagtctgcggcttccaacgcgttagctgataataaaaaacttgacgaggatatgctttatgttaaggaaatttatattgacgacggaccaaggcttaaaagagtttggttcagaggcagaggaagagcggatatgcaggtaaagcgaatgtgccatgtaaccgtagtggttgatgaaacttcggcttcagctaacgatgcggctgcaaagggcggcgcggcaaaagaaggtaaaccttcaaaaaaggcggctaaataa

SEQ ID NO: 71168 - protein, 140 aa, Unknown
  Obtained from environmental sample
  DOMAIN (9)...(114): Ribosomal protein L22p/L17e
  misc_feature (1)..(140): Xaa is any amino acid
MKEEKGYKAISRFLIGSPYKIRPVADLVRRRTYPEAISILENMPHKGAKLIRKTVKSAASNALADNKKLDEDMLYVKEIYIDDGPRLKRVWFRGRGRADMQVKRMCHVTVVVDETSASANDAAAKGGAAKEGKPSKKAAK

SEQ ID NO: 71169 - DNA, 831 bp, Unknown
  Obtained from environmental sample
  misc_feature (1)..(831): n is a, c, g, or t
atgggtattaagaaatataaaccaataacgccgggaatgaggcaatggacaagtttagataactcagaccttaccaaaggcgcgaagcctgaaaaaaccctcacaagcggaagaaaagaaagagccggacgcgattcattcggacgcatcagtgtgcgccacaagggcggcggacacaaacgcaaataccgcgacatcgattttaaaagagacaaaatcggtattccgggaaaagtcgccacgcttgaatacgatccaaaccgcagcgcgaacatcgctcttatcaattacaaagacggcgagaagcgctacattatcgcccccaaagaacttaaaatgggcgcggtaattttaagcggtcccgacgccccgattgaaccgggcaacgctcttccgctggaaaatattccgttaggatttaatgtttacaatattgaattaacgctcggcaagggcggacagatggctcgttccgccggaacaggcgctcttatcgccgccaaagagggcgattatgttacgctcaaactgccgtcgggcgaaatgcgcatggtgtttaaaaaatgttatgcgacaatcggcagcgtcggcaacgaagaccacatgaatacaacattgggcaaagccggacgcaaacgctggcttggcgtgcgccccacagtgcgcggtatgtcaatgaaccccgtggatcacccgcacggcggcggtgaaggaagaagcaagggtattcaccctgttaccccgtggggtcagcccactaagggttacaagacccgtaaaaaacataaaccttcttcaaggtttatagtcagcaggggaaagaagaaataa

SEQ ID NO: 71170 - protein, 276 aa, Unknown
  Obtained from environmental sample
  DOMAIN (43)...(119): Ribosomal Proteins L2, RNA binding domain
  misc_feature (1)..(276): Xaa is any amino acid
MGIKKYKPITPGMRQWTSLDNSDLTKGAKPEKTLTSGRKERAGRDSFGRISVRHKGGGHKRKYRDIDFKRDKIGIPGKVATLEYDPNRSANIALINYKDGEKRYIIAPKELKMGAVILSGPDAPIEPGNALPLENIPLGFNVYNIELTLGKGGQMARSAGTGALIAAKEGDYVTLKLPSGEMRMVFKKCYATIGSVGNEDHMNTTLGKAGRKRWLGVRPTVRGMSMNPVDHPHGGGEGRSKGIHPVTPWGQPTKGYKTRKKHKPSSRFIVSRGKKK

SEQ ID NO: 71171 - DNA, 639 bp, Unknown
  Obtained from environmental sample
  misc_feature (1)..(639): n is a, c, g, or t
atgaactgtaaagtgtattcaaaagaaggcaaagaaattcgtaccattgccttaaacgataatgtttttggtctccctgttaacgaagatttaatttggtacgcgattaataacgagcttgccaacaaaagacagggtaatgccagcacaaagggacgcgccgaagttcacggctcaaacgcgaagccgtataaccaaaaaggaacgggacgcgcgcgcagaggcgataaaaaatcgcctgttcttgtcggcggaggcgtaatcttcggtccgaaaccgagagatttttcctattcaatacctaagaaagcaaaaaggctcgcccttaaaaccattcttagtttgaaagcgcagagcgatacattaaaaatagtagaagatttttcggttgaatcgggcaaaacaaaagatttggcaaaactccttgataattttgaacccggacttcgcacagtaataattcttaaagacgacgatccaaaaattaaaagagcagccgcgaatattccgtgggttaaatatctttcttacaacagattggaagcgcatgagttgttttacggacgccaggtattaatgctggaaactgccgcgaaaaatcttaatgatttttacagtgaaaaggaggcggttaaatga

SEQ ID NO: 71172 - protein, 212 aa, Unknown
  Obtained from environmental sample
  DOMAIN (15)...(204): Ribosomal protein L4/L1 family
  misc_feature (1)..(212): Xaa is any amino acid
MNCKVYSKEGKEIRTIALNDNVFGLPVNEDLIWYAINNELANKRQGNASTKGRAEVHGSNAKPYNQKGTGRARRGDKKSPVLVGGGVIFGPKPRDFSYSIPKKAKRLALKTILSLKAQSDTLKIVEDFSVESGKTKDLAKLLDNFEPGLRTVIILKDDDPKIKRAAANIPWVKYLSYNRLEAHELFYGRQVLMLETAAKNLNDFYSEKEAVK

SEQ ID NO: 71173 - DNA, 627 bp, Unknown
  Obtained from environmental sample
  misc_feature (1)..(627): n is a, c, g, or t
atgttagggctttatgccagaaaagttggaatgactcaagtatttgacgaggcgggaaatcttatgccggtatcggtgttaaggatagacccgaatgttgtcatttccaaaaaaacaaaagaagcggacggttacgccgctgttgtcgtcggtatagacgaagctaagaaaaatcgcgtaacaaaagcccgcgcgggacaatttccccaaaacattacgccaaagaaaaagatttgcgagctgcgtgattttgaaaaagaagtcgccgtaggggactcccttggaattgaagtgttaaaagacgtcagatttgttgatgtttcaggcgtttccaaaggtaagggttttcagggcgttgttaaacgctacaagttcggcggcggacgcaagacgcacggatcgaaattccaccgcgaacccggttcaacagggcagagcacatatcccgcaaaaacttttaagaatgtaaaattacccggacgcatgggacgggaaaaagtaacggttttaagccttaaggttgtaaaaacagatcctgaaaaacagctcattttggttcggggcgcggttcccggaattaacaaagggcttgtgtttgtccgctccgcggtcaagaagggacggtaa

SEQ ID NO: 71174 - protein, 208 aa, Unknown
  Obtained from environmental sample
  DOMAIN (8)...(201): Ribosomal protein L3
  misc_feature (1)..(208): Xaa is any amino acid
MLGLYARKVGMTQVFDEAGNLMPVSVLRIDPNVVISKKTKEADGYAAVVVGIDEAKKNRVTKARAGQFPQNITPKKKICELRDFEKEVAVGDSLGIEVLKDVRFVDVSGVSKGKGFQGVVKRYKFGGGRKTHGSKFHREPGSTGQSTYPAKTFKNVKLPGRMGREKVTVLSLKVVKTDPEKQLILVRGAVPGINKGLVFVRSAVKKGR

SEQ ID NO: 71175 - DNA, 330 bp, Unknown
  Obtained from environmental sample
  misc_feature (1)..(330): n is a, c, g, or t
atggcaagacttggaggaacaatggctaaggaaggaattcgcgtaaggctgcgcggttttgacgtagaattaattgatcagagcgctaaatctatcgccgcggctgtaagaaaagccggggcgaaagtgacgggacctatccctctgccgacgcgaattaataaggtgaccgttttacgttcaccccatgtaaataagaagagccgcgaacaatttgaaatgcggactcataagagattgattgatattgttaatccttctgcggaagttatggattcattaatgaaacttgaactccccgcaggcgttgatgttgagattaaacagtaa

SEQ ID NO: 71176 - protein, 109 aa, Unknown
  Obtained from environmental sample
  DOMAIN (12)...(107): Ribosomal protein S10p/S20e
  misc_feature (1)..(109): Xaa is any amino acid
MARLGGTMAKEGIRVRLRGFDVELIDQSAKSIAAAVRKAGAKVTGPIPLPTRINKVTVLRSPHVNKKSREQFEMRTHKRLIDIVNPSAEVMDSLMKLELPAGVDVEIKQ

SEQ ID NO: 71177 - DNA, 423 bp, Unknown
  Obtained from environmental sample
  misc_feature (1)..(423): n is a, c, g, or t
ttgactgttagatcaaatggcagatgctccttattcgattatctcgacaacctgaccggaagcgactgtcttaccgccttcgcggatagcgaagcgaagacctttttccatggcgattgggtggatcaattcaccgataacttcggcgttatcgccgggcattaccatttctttgccttcaggaagttttacagtaccggtaatatcggttgtgcggaaatagaactgcggtctgtaacctgtaaagaacgggctgtggcgtccgccttcatctttggacagacaataaatctgacctttgaatgttttgtgaggtgtaatggttcccggtttcgcgagtacctgtccgcgctctacgtcttttttatcaataccgcgaagaagagtaccgacgttatcgcccgcctgagcttcatcgagtaa

SEQ ID NO: 71178 - protein, 140 aa, Unknown
  Obtained from environmental sample
  misc_feature (1)..(140): Xaa is any amino acid
MTVRSNGRCSLFDYLDNLTGSDCLTAFADSEAKTFFHGDWVDQFTDNFGVIAGHYHFFAFRKFYSTGNIGCAEIELRSVTCKERAVASAFIFGQTINLTFECFVRCNGSRFREYLSALYVFFINTAKKSTDVIARLSFIE

SEQ ID NO: 71179 - DNA, 1212 bp, Unknown
  Obtained from environmental sample
  misc_feature (1)..(1212): n is a, c, g, or t
gtgttcataaggaggacacaaatggcaaaggataaatttaataggactaaggtccacatgaacgtcggaacgattggtcacgttgatcatggaaagaccacgctttctgccgccattaccatgcattgcgcaaggaaattcggcgacaaggaaatgaaatttgatgatattgataacgctccggaagagaaagcgcgcggtattacaattaatacccgccatcttgagtatcagtcagacaaacgccattacgcgcacattgactgtcccggacacgcggactatatcaaaaacatgatcacaggcgcggcgcagatggacggagctattctcgtcgtatcagcgcccgactcggttatgccccagacacgcgagcatatcattctcgcccgtcaggtaggcgtacctaacatgatcgtcttccttaacaaaatcgatcaggtagaagacgatgaacttatcgcgttagtcgaagaagaaattaaagacgttctttcagctaacggtttccccggcgacaagattcctatcatcaaaggctcggcgttcaaagccatgtccgaaccggacaatgccgattcaacaaaatgtatcgatgaacttcttgcggcgatggactcttatttccccgatcctatccgcgattccgataaacccttcatcatgccgattgaagacgtgttcacaattcagggacgcggtactgtcgttacgggaaaagtggaacgcggtatactcaaactcaacgaagaagttgaaattatcggtattaaacccacaaagaaaacggttattaccggtattgaaatgttcaataaattactcgatgaagctcaggcgggcgataacgtcggtactcttcttcgcggtattgataaaaaagacgtagagcgcggacaggtactcgcgaaaccgggaaccattacacctcacaaaacattcaaaggtcagatttattgtctgtccaaagatgaaggcggacgccacagcccgttctttacaggttacagaccgcagttctatttccgcacaaccgatattaccggtactgtaaaacttcctgaaggcaaagaaatggtaatgcccggcgataacgccgaagttatcggtgaattgatccacccaatcgccatggaaaaaggtcttcgcttcgctatccgcgaaggcggtaagacagtcgcttccggtcaggttgtcgagataatcgaataa

SEQ ID NO: 71180 - protein, 403 aa, Unknown
  Obtained from environmental sample
  DOMAIN (20)...(146): GTPase of unknown function
  misc_feature (1)..(403): Xaa is any amino acid
MFIRRTQMAKDKFNRTKVHMNVGTIGHVDHGKTTLSAAITMHCARKFGDKEMKFDDIDNAPEEKARGITINTRHLEYQSDKRHYAHIDCPGHADYIKNMITGAAQMDGAILVVSAPDSVMPQTREHIILARQVGVPNMIVFLNKIDQVEDDELIALVEEEIKDVLSANGFPGDKIPIIKGSAFKAMSEPDNADSTKCIDELLAAMDSYFPDPIRDSDKPFIMPIEDVFTIQGRGTVVTGKVERGILKLNEEVEIIGIKPTKKTVITGIEMFNKLLDEAQAGDNVGTLLRGIDKKDVERGQVLAKPGTITPHKTFKGQIYCLSKDEGGRHSPFFTGYRPQFYFRTTDITGTVKLPEGKEMVMPGDNAEVIGELIHPIAMEKGLRFAIREGGKTVASGQVVEIIE

SEQ ID NO: 71181 - DNA, 1281 bp, Unknown
  Obtained from environmental sample
  misc_feature (1)..(1281): n is a, c, g, or t
gtggcacagcggcgcctgttaagacggcggttagaccggaaaaggccccatcggcctcttccgggcgaaaaaaaaaggcggacgaagcaggaaccccgcgcacggacgtcagacctctggccggagtcaggattaaaaagagcgctcccgcaaagaaaggcggcaagcgcgccaagccgaagccttgaggcggaggcggcgcgtactatggcttcacggataagagcggtacgaaagatcattgccgagcgggagtgtacgcacgctctcgttacggacgccgccgacgttttttacatcagcgggttccgttcgtcgggggcgacgctgcttgtggcgccgaggcagcttgacctcttcgccgactttcgttacaagggggcggcggaggagttctgcagggggagcaagtggcggttcacgttgatcgagtccgggggcttcgggtatctgaccaagaggatccgtccgctttcggtggtggggatacagtccgacgcggtgacggtggatcagtacggcgagttgaagagggcgctgccgggggtgaagctcatgccgctctccggcgacgtggcggacgtggcggtgcggaagctgccgagcgagattgagagcatgaaggcggcggcccgtatcggcgacagggcattaaaggcgcttttgacgcacatcaggaggccggtaacggaggcggctttggcgcatacgctggacactatctgcgccgagttcggctcggagaggccggctttcgacacgatagtcctcttcggggagcgtagcgccctgccccacggccgtccgggggagcggaagctcaaggagggcgacttggtgctgatagacttcgggtgcacggtcgacgggttctgttccgacatgacgcgcacgtttgtatacggcgtggccaacgaggagcagcgtcaggtgtacaacgcggtgctgagggcgcagcgttgcgcgagtttggccgcccgcgccgggatgaagtgttgcgagctggacggcgtggcgaggagttccatcgccgacagcggttacggggagcttttcggtcacgggacgggtcacggcgtgggtctgcggatacacgagaggccgcgcgtggccaagggcgtggaggcggccctgccggaaaacagcgtggtgaccatcgagccgggcgtctacgtgccgggtctcggcggcgtgcgcatagaggatatggccgttttgcataagggcggttcgacggccctcacacactcgcccagaaagcttatggagctgccgttatga

SEQ ID NO: 71182 - protein, 426 aa, Unknown
  Obtained from environmental sample
  DOMAIN (205)...(416): metallopeptidase family M24
  misc_feature (1)..(426): Xaa is any amino acid
MAQRRLLRRRLDRKRPHRPLPGEKKRRTKQEPRARTSDLWPESGLKRALPQRKAASAPSRSLEAEAARTMASRIRAVRKIIAERECTHALVTDAADVFYISGFRSSGATLLVAPRQLDLFADFRYKGAAEEFCRGSKWRFTLIESGGFGYLTKRIRPLSVVGIQSDAVTVDQYGELKRALPGVKLMPLSGDVADVAVRKLPSEIESMKAAARIGDRALKALLTHIRRPVTEAALAHTLDTICAEFGSERPAFDTIVLFGERSALPHGRPGERKLKEGDLVLIDFGCTVDGFCSDMTRTFVYGVANEEQRQVYNAVLRAQRCASLAARAGMKCCELDGVARSSIADSGYGELFGHGTGHGVGLRIHERPRVAKGVEAALPENSVVTIEPGVYVPGLGGVRIEDMAVLHKGGSTALTHSPRKLMELPL

SEQ ID NO: 71183 - DNA, 1098 bp, Unknown
  Obtained from environmental sample
  misc_feature (1)..(1098): n is a, c, g, or t
atgataaacatccacgcgcttcttaaagcgatgatcgatcagaacgcctccgacctgcacatgcgctgcggcgtcgttccgattatgcgtctgaacggggacctcttcaagatgggctccgaggcgatctctttcgagaacatggacgccatgctccgtacgctgctcacgcccgagcagtacaacaagtttcaacgcgactcggagatagatttcgccgcaaaattgccgggcgtcgggcgcttcaggataaacgctttccgccagcgcggcaccccggccatggccgtccgctcgatcaaggtggagatacccaacttctcggagctggccctgccgagcgtcatcatggacatagcgatgaagaaacgcgggatgattctcgtcacggggacgacgggaagcggcaagtcgacgcttctagcctcgatgatcgatcacataaacgccaacacgtcggtcaacatcgtcacgatagaggatcccatagagtttctgcaccgcgacaagcgcagcataatagcgcagagggagataggctccgacgccccctcgttcaacaacgcgctgagggcgtgtttccgtcaggatccggacatcattctcataggcgagatgcgcgactgcgagaccatagagaccgccatgagcgccgccgacacgggtcacttggtgatgagcaccctgcacacgatgaacaccacggagaccatcacccgcataatctcgttcttcccgccgcaccagcacgaccagatacgcctggtgctgtctaacgttctggtggctataatatcgctgcgcctgctaccaagaaaggacggcaggggccgcataccggcctgtgaaatcctgataaaccacgccgccgtggccgaatacatattgaacccggaaaagagccacttgattctccccgccataagcgagggccgcacgcagtacggctcccaatcgttcgaccagtcgctgctgcagatgtatcaggacgaactgataacgctagacatcgccaagcagagcgcgtccaatccggacgacttcgagttggcggtgaagggggtgtcggggacgtcggacagaaggtggatgacgtag

SEQ ID NO: 71184 - protein, 365 aa, Unknown
  Obtained from environmental sample
  DOMAIN (3)...(273): Type II/IV secretion system protein
  misc_feature (1)..(365): Xaa is any amino acid
MINIHALLKAMIDQNASDLHMRCGVVPIMRLNGDLFKMGSEAISFENMDAMLRTLLTPEQYNKFQRDSEIDFAAKLPGVGRFRINAFRQRGTPAMAVRSIKVEIPNFSELALPSVIMDIAMKKRGMILVTGTTGSGKSTLLASMIDHINANTSVNIVTIEDPIEFLHRDKRSIIAQREIGSDAPSFNNALRACFRQDPDIILIGEMRDCETIETAMSAADTGHLVMSTLHTMNTTETITRIISFFPPHQHDQIRLVLSNVLVAIISLRLLPRKDGRGRIPACEILINHAAVAEYILNPEKSHLILPAISEGRTQYGSQSFDQSLLQMYQDELITLDIAKQSASNPDDFELAVKGVSGTSDRRWMT

SEQ ID NO: 71185 - DNA, 486 bp, Unknown
  Obtained from environmental sample
  misc_feature (1)..(486): n is a, c, g, or t
atgccaaccgcaccaaccataaaatggaacaacctcgtcgctcaagagcgcgttaaggagttgctctctcacgcctttgaggccggcacgctcgggcacgcttatcttttttgcggggagcgggggacgggcaagttcgcggcggcggttgatttggctatggctgttttgtgccgttgcgcggataacgcgaaagcgcggccctgcggggagtgtccggcttgcaggaaggcggcggcttactcgcatccggatttgcatgtgataatgccgctttgtttggacaacgagcacaaggggggggagggcggcgcgttgtcggaggcggggtgggcgttcgcggcggagagcgcgaaggcccgtatagacgatccgtacaggcttccgaagtacgacggcatcccgtatattccngtggactgggtgagggaagccgacacgccgttatgcgncgcgccctggaggggggcggcagcgtggttataa

SEQ ID NO: 71186 - protein, 161 aa, Unknown
  Obtained from environmental sample
  misc_feature (1)..(161): Xaa is any amino acid
MPTAPTIKWNNLVAQERVKELLSHAFEAGTLGHAYLFCGERGTGKFAAAVDLAMAVLCRCADNAKARPCGECPACRKAAAYSHPDLHVIMPLCLDNEHKGGEGGALSEAGWAFAAESAKARIDDPYRLPKYDGIPYIPVDWVREADTPLCXAPWRGAAAWL

SEQ ID NO: 71187 - DNA, 1584 bp, Unknown
  Obtained from environmental sample
  misc_feature (1)..(1584): n is a, c, g, or t
atgcaatataataatttcgataaaaccgcggcttacaaacagcttgcggattacgccgcgggatggaaaggttttgatttcagggcttgtcttgacgccgcgcgcgtggggcagtgcaaggcgcaaatggccgggggcttaagctactcattcgcggcgaaagccgtggacgataaagtgttgaagctgcttcagtcgctcgccgacgagcaggagctaatcggcaaatacaaggctcttctggacggcgaaatgatcaataccggcgaaaagcgcaaggttctgcatcagcttacgcggggagagcaggggaagccggttatcgagaacggcaagaacatcggggaattttaccggaaggaattgcagcgtttctgcgattttgccacggccgtgcataacggcaagtacaagggaagcacgggcaaggctttcaatacggttgtgcagataggcattggcggctctgaccttggtccaagggcgctgtatctggcgctggataactgggcggaaactgaaggcaagaaaaagcttaacgcgaaatttatctccaacgttgatcctgacgacgcctccgcagttattgcctcgtcgccgctggaacagagcctttttgtgctggtttcaaaaagcggaacgacacaggagaccctttccaacgagctttttgtgaaggacaagctgcaaaaagccggccttgacagctcaaagcacatggtcgccgtcacgagcgagaccagcccccttgcccgcaacccggcgtacctcgattccttctatattgacgattatatcggcgggcgttattcgtcatcatcggcggttggcggatgcattctttcccttgcctttggccctgaggtattcagggaattcctttccggcgcggcggaagcggacaggctggcgcttgagtcggatattttgaaaaacgccgcccttcttgacgcccttatcggcgtatgggaacgcaacttccttaactaccccagcaccgcggtactgccctacagtcaggctctttcccgcttccccgcccatctgcagcaactcgacatggaatccaacggcaagcaggcgaaccgcgacggccagccgattaattcgtataacacggggcctgcggtgttcggcgaaccgggaaccaacgggcagcattcgttctaccagcttctgcaccaagggacaagcgtcatccccctgcaatttgtcggctttaccgaaagccagcggggcgatgatgtcagcgttgacggttccgtcagccagaccaagctcaaagcgaacctcgccgcgcagatagtcgcctttgccaaaggccagagcgattctaaccttaacaaaaattttccaggtggccgcccgtccagccttatttacgggaagcggcttagccccgcggccctcggcagccttttggcccattttgaaaacaaggtgatgttccagggctttgtatggaacgttaacagctttgatcaggaaggcgtacagctcggcaagatacttaccaaaaaagtccttgccggtaattccggcgattccgccctggaagcgtacagcaaaatactcggagtgtga

SEQ ID NO: 71188 - protein, 527 aa, Unknown
  Obtained from environmental sample
  DOMAIN (51)...(526): Phosphoglucose isomerase
  misc_feature (1)..(527): Xaa is any amino acid
MQYNNFDKTAAYKQLADYAAGWKGFDFRACLDAARVGQCKAQMAGGLSYSFAAKAVDDKVLKLLQSLADEQELIGKYKALLDGEMINTGEKRKVLHQLTRGEQGKPVIENGKNIGEFYRKELQRFCDFATAVHNGKYKGSTGKAFNTVVQIGIGGSDLGPRALYLALDNWAETEGKKKLNAKFISNVDPDDASAVIASSPLEQSLFVLVSKSGTTQETLSNELFVKDKLQKAGLDSSKHMVAVTSETSPLARNPAYLDSFYIDDYIGGRYSSSSAVGGCILSLAFGPEVFREFLSGAAEADRLALESDILKNAALLDALIGVWERNFLNYPSTAVLPYSQALSRFPAHLQQLDMESNGKQANRDGQPINSYNTGPAVFGEPGTNGQHSFYQLLHQGTSVIPLQFVGFTESQRGDDVSVDGSVSQTKLKANLAAQIVAFAKGQSDSNLNKNFPGGRPSSLIYGKRLSPAALGSLLAHFENKVMFQGFVWNVNSFDQEGVQLGKILTKKVLAGNSGDSALEAYSKILGV

SEQ ID NO: 71189 - DNA, 2196 bp, Unknown
  Obtained from environmental sample
  misc_feature (1)..(2196): n is a, c, g, or t
ttggcggaggcattgtcatccaatggattgccaacattttattctggttgccattgtaaaatgctgcttcgttccataaacgcgccgttagccgcgctccatggcatcgacaaagtaatgaaagctgccgcgccaaaattcacccgtctgggcatacagaatgtagccggacttttatgccattacccgcgcgactgggaagatcgcagattcaccgtcccaatagctgaatttttgcgcgcaaatgtatgcacagatgtcaccgtactcgcccatgactggattggttttggctacaaacggactcccaaagtgtatatcgaagatgaaagcggcagggccgttctggtggggtataaccagccctggcttgcaaaaaatatgccgatcggcggacgctacagggtttggggcatttttaaatataaacgcggcgaattacaatccagcaattttgaatttgaagacgtttccaaagcggagaattttaatataatgatgccggtttatcccctgtgcgccggactcaaacaggctgtactccgccgttttacagccagagccgttgaacaatacgccgcccggctggagaacgagcttcccgatgaaatcatcgcaaagtacaatctgcttccaaaagccgcggctatcagggcgtaccattatccgtcttcacccgaggagctggaactggcaaaaaaaacgcttatttacgaagaattgttttatcttgagataatggtgagcaagagagcgctggaaagaaagggaacaatgtcttcacaaaccgctctccccactccccactccccactccccactccccattctcctttacagcagcgcttgattgaacgtttgcccttttcacttacccccggacagcaaaaagccattgcagaaattaatgttgatatggcttgcaatgattcgcaatattccatggcgcggctcttgcagggtgatgtcggttcaggcaaaacgcttgtttcgttcatggccgccttgcgggcactagacaatggcggccagaccgcgctattggccccgaccgaactgctcgcccgccagcacgcggaaaacgccgcccgcctccttgaacccctgggcctgcgtataagttttctgaccggaaatataaaggccgcgggcagaaaggagctgttaaaacatttggcggagggggagatagatattatagtgggaacccacgcgcttttctcaaaagacgttatctatagaaatttgcagttggtaattatagacgagcagcaccgttttggcgtaacgcagagggcgctcatcatggcaaagggcgtcagcggtcaggccgcgccccatctgctgatgatgagcgctacgccgattccccgcacccttgccatgacggttttcggcgacatggacgtctcggtaataagcgatatgccgccgggaagaaaaccaataattacccaccttgcaagggaatccaacgagcaaaaagtgtatgactttgtgcgcgataaactgaaagccggctcacaggcttacttcgtatatccattaatcgaaaacggcgacgaaaaagaaacgctcctaaaagacgccgtctttcttaaagacgccgtctcaatggcggaccgtctggcgacagaagtcttccccggtttcgccacggccctgatccattcaaaactcgacgaagaggaaaaacgccaaactatggagcgtttccgcaaaggcgaaacaagggtgttagtcgccaccagcgtcgtcgaggtgggcgtggacgtgccgaacgcgaactgcattgtgatagaacacgccgagcgtttcggcctttccgccctgcaccagctcaggggcagagtcggccgcggacaggatcaggcgtactgtttcctggtttactcggacaaatacaccgatgacggcaaggcgaggttacacgtaatgcatgaaaacaccgacggctttgtcattgccgaggaggacttaaagctgcgcgggcccggtcagatcgccggaacagaacagtccggctacctgaacttgggaatcgccaaccccgtcatcgacatagacgccctgacaaaagcccgcgaagacgccttctccattctggaaaacgaccccggccttgtgctggatgaccaccgtatcatagcccgcgtcctggaagaagcgccgccgtttacgggagtggggctgtag

SEQ ID NO: 71190 - protein, 731 aa, Unknown
  Obtained from environmental sample
  DOMAIN (288)...(457): Type III restriction enzyme, res subunit
  misc_feature (1)..(731): Xaa is any amino acid
MAEALSSNGLPTFYSGCHCKMLLRSINAPLAALHGIDKVMKAAAPKFTRLGIQNVAGLLCHYPRDWEDRRFTVPIAEFLRANVCTDVTVLAHDWIGFGYKRTPKVYIEDESGRAVLVGYNQPWLAKNMPIGGRYRVWGIFKYKRGELQSSNFEFEDVSKAENFNIMMPVYPLCAGLKQAVLRRFTARAVEQYAARLENELPDEIIAKYNLLPKAAAIRAYHYPSSPEELELAKKTLIYEELFYLEIMVSKRALERKGTMSSQTALPTPHSPLPTPHSPLQQRLIERLPFSLTPGQQKAIAEINVDMACNDSQYSMARLLQGDVGSGKTLVSFMAALRALDNGGQTALLAPTELLARQHAENAARLLEPLGLRISFLTGNIKAAGRKELLKHLAEGEIDIIVGTHALFSKDVIYRNLQLVIIDEQHRFGVTQRALIMAKGVSGQAAPHLLMMSATPIPRTLAMTVFGDMDVSVISDMPPGRKPIITHLARESNEQKVYDFVRDKLKAGSQAYFVYPLIENGDEKETLLKDAVFLKDAVSMADRLATEVFPGFATALIHSKLDEEEKRQTMERFRKGETRVLVATSVVEVGVDVPNANCIVIEHAERFGLSALHQLRGRVGRGQDQAYCFLVYSDKYTDDGKARLHVMHENTDGFVIAEEDLKLRGPGQIAGTEQSGYLNLGIANPVIDIDALTKAREDAFSILENDPGLVLDDHRIIARVLEEAPPFTGVGL

SEQ ID NO: 71191 - DNA, 600 bp, Unknown
  Obtained from environmental sample
  misc_feature (1)..(600): n is a, c, g, or t
atggaaggaacaatgcaaataatatttggaattttagccggtctgatgggattttactctctcctgataattatcaggattatacttacctggtttagcggtggggacttcggcaggccgatggagattttggcgcgtattaccgatccctatcttgactggtggcggcaaaggctcaacctgagggcgggttatcttgacctttcccctattgccgctatggcggctctctctgtcgcgcagactgcctgttacaccattgcccaaacagggagaatcactattggtcttttgcttgccgtatgtctttccgcgttgtggtcggcagtttcttttatactgggcttctgcctcgtcgtgcttatcctccgtctgattggctatcttatcaacgccaatatgttcggcgtattctggcgggtcatagattccatatcaaaccctatccagtaccgcctcagcaggatcatttttagcaggcggctggttcgttttacaacaagtatcatcacctcgattctcgttctgaccgccctttggattggcggaggcattgtcatccaatggattgccaacattttattctggttgccattgtaa

SEQ ID NO: 71192 - protein, 199 aa, Unknown
  Obtained from environmental sample
  DOMAIN (5)...(87): YGGT family
  misc_feature (1)..(199): Xaa is any amino acid
MEGTMQIIFGILAGLMGFYSLLIIIRIILTWFSGGDFGRPMEILARITDPYLDWWRQRLNLRAGYLDLSPIAAMAALSVAQTACYTIAQTGRITIGLLLAVCLSALWSAVSFILGFCLVVLILRLIGYLINANMFGVFWRVIDSISNPIQYRLSRIIFSRRLVRFTTSIITSILVLTALWIGGGIVIQWIANILFWLPL

SEQ ID NO: 71193 - DNA, 2904 bp, Unknown
  Obtained from environmental sample
  misc_feature (1)..(2904): n is a, c, g, or t
atgggttatacgggatattttttgattgtttgggattttattaagtacgcaaaggagaacaatattcccgtaggaccgggccgcggttcgggagcgggttctattgtcgcatactctctgcgcattaccgatattgatcccttaaaatacggccttatatttgaacgttttttaaaccccgatcgtatttccatgcccgatttcgacattgatttcgcgaatgaagggcgcgaagaagtaataaattatgttacgcgcacttatgggaaggaaagggtagcgcagatcatcacattcggaacattgggcgcaaaagcggttatcaaggacgtggcaagagtattgggaatatcaattcctgaatctgaaatgataacaaaacttatttcatttgatcctgaaatgactttggataaagcaaagaaagaggaaccccgccttcgtgaactggaaagcgatccgcgttttacggaattatttgccatcgcgcataaattagaggggcttaaccgccattcaagcatacacgcggcgggtattgtaatcgggaaaaaaccgctgattgaattagtgcctctttttcaggaaagagaggaaaagggcggcaatattgccacacagtacagcatgaattttcttgaagattgcggtcttgttaaaatggattttctcggccttaaaaaccttgatatccttaaacattcgcaggaattaatccgccggcgcgggggcaagtattcaaattttaatatggaagatattcccgaagatgacaaaaaaacttttaagatgttaggtgaaggaaaaagccacgccgtttttcaattcgcctcagagggcatgcaggatattttaagacagacaaaacccgcctctatagaagacttaacagctttaaacgcgatgtaccgtccgggacccatgcagtttattccccgctttgtggattgtaaaaacggaaaagcgccaataacgtatcccgatccaagccttgaaggcgttcttaaagaaacttacggcgttattgtctatcaggaacaggttatggaagtggcaagaataatagcgggttacagcatgggaaaagcggatcttcttcgaagagcaatgggaaaaaagaagaaagaaattattgacggggaaaaaattccgtttctggaaggcgcggtaaaacagggatactccaggcagaaggccggggaaatttacgatatccttgttcctttcgcaggttacggatttaataaaagccacgccgccgcttattcggtattagcgtaccagaccgcttaccttaaagcgaatttccccgcggaatatatggcggctacattgatagtcgaaataaaaagcaccgacaggcttttatacagcatagtcgaaacacgtaaaatgggaataagcgtcgatcctcccaatataaattattccgataaactttttaccgtagtggacggcagaatagtatacggttttctgggaataaaaggcgtgggcgacgctccggcggaggaaattgtacggggcagacagaacggccattataaaagttttatggattttctggacagagtagacataaaagccgtaagcaaaaaagttatagaactgcttattcacaccggcgcatttgatgattttaaagtatcacgcgaaacgcttgcgggtaatatggaaaaggcgatagagtacgcgcaaaaaatgaaagaagacaaacagcttggacagtcaagcctgtttggagattcaaatgaatccggtatgcccgattttaaatttacggaatttccgcctgtaagcagaacagaacgattgaatcttgaaaaaaaattaataggtttttatttttcggggcatcccctggatgaatacagacaattatgggaaaaagccgtgaaggctgatctggcgcaccatgaaaccataaagccgggaaactatatcctgattggaattatcaaaaatattaaaacaattatttccaaaagcggaaaaatggcttacgctaccctcgaagactacaacggggaaattgaagttacatttttttcaaggacatgggaagcctgcgagggcaaggtccaggatgacaaagttgccatattaaggggaaaaattgaatatcagagaaacaaagacaagtacggtttcattgtcgacagtttgattgatgtccgtgaagcgcaaacggcgatagaagaggaagaagccttgcaaaaaaagcgggaaaaattccgtaatgtctggttttatatggcggacctgaaaagcggcggactttccaaagcggaaaagggcagttacacggtgattgggcagcttagcgggctgaggcagacgcaggataagaacggcgatgacatggcgttcggaaccttacaggactttgaagggaatatcgatctggttttctgggcaaaaacatggaaagaaagccgcgaattactaaacatgggagagtttgtcgcccttaaagggagccttgatcccgaaagagaccgcaaccgacagcagccaagcctgaaagtgagcaaagttgacgaccttgcggctctaacccgttcagcggcgcggaaagcggaagccggggaacagccaaaagttccgcccctggaaatgcaggttgtaaaaaaagaaaattctcctgacacggcgcagtctaccgcagtgttaaacgaaatccatatccggctgcaagacggcgccgccgacagagacgaaggcatacagcctctgcggaattatcttagcggtaatcagggcccctgtccggtgtttatccatattggagaaaaaattatcaggactaataaaggcttaagccttgaagctgagaaggaggcgctgggcgtgctggaaggctgtatcggtgttgctcagtcatggaaggaacaatgcaaataa

SEQ ID NO: 71194 - protein, 967 aa, Unknown
  Obtained from environmental sample
  DOMAIN (647)...(725): OB-fold nucleic acid binding domain
  misc_feature (1)..(967): Xaa is any amino acid
MGYTGYFLIVWDFIKYAKENNIPVGPGRGSGAGSIVAYSLRITDIDPLKYGLIFERFLNPDRISMPDFDIDFANEGREEVINYVTRTYGKERVAQIITFGTLGAKAVIKDVARVLGISIPESEMITKLISFDPEMTLDKAKKEEPRLRELESDPRFTELFAIAHKLEGLNRHSSIHAAGIVIGKKPLIELVPLFQEREEKGGNIATQYSMNFLEDCGLVKMDFLGLKNLDILKHSQELIRRRGGKYSNFNMEDIPEDDKKTFKMLGEGKSHAVFQFASEGMQDILRQTKPASIEDLTALNAMYRPGPMQFIPRFVDCKNGKAPITYPDPSLEGVLKETYGVIVYQEQVMEVARIIAGYSMGKADLLRRAMGKKKKEIIDGEKIPFLEGAVKQGYSRQKAGEIYDILVPFAGYGFNKSHAAAYSVLAYQTAYLKANFPAEYMAATLIVEIKSTDRLLYSIVETRKMGISVDPPNINYSDKLFTVVDGRIVYGFLGIKGVGDAPAEEIVRGRQNGHYKSFMDFLDRVDIKAVSKKVIELLIHTGAFDDFKVSRETLAGNMEKAIEYAQKMKEDKQLGQSSLFGDSNESGMPDFKFTEFPPVSRTERLNLEKKLIGFYFSGHPLDEYRQLWEKAVKADLAHHETIKPGNYILIGIIKNIKTIISKSGKMAYATLEDYNGEIEVTFFSRTWEACEGKVQDDKVAILRGKIEYQRNKDKYGFIVDSLIDVREAQTAIEEEEALQKKREKFRNVWFYMADLKSGGLSKAEKGSYTVIGQLSGLRQTQDKNGDDMAFGTLQDFEGNIDLVFWAKTWKESRELLNMGEFVALKGSLDPERDRNRQQPSLKVSKVDDLAALTRSAARKAEAGEQPKVPPLEMQVVKKENSPDTAQSTAVLNEIHIRLQDGAADRDEGIQPLRNYLSGNQGPCPVFIHIGEKIIRTNKGLSLEAEKEALGVLEGCIGVAQSWKEQCK

SEQ ID NO: 71195 - DNA, 642 bp, Unknown
  Obtained from environmental sample
  misc_feature (1)..(642): n is a, c, g, or t
atgcgaatagccctcgctaaagttcttctggaacagcctgacattcttctgctggacgagccgacaaactaccttgatattgaggcaaggacatggcttgaaaaatggctggaaactttttgcggcggttatcttcttgtttcgcacgacaggtattttcttgatgtctgcgttaacgaagttttcgagctgtttcagggaaacctgaaacgctatgcgggaaattataccgcttacgaaaaagtacgcaaaaccgagcttgcatcccttgttaaacgttacgaggaacagcaggaagaaattattaaaaccgaagcgcttatccgccgtttccgttacaaggcaagcaaggcggctttcgcgcaggaacttatcaagcgtcttgaaaaaatggagcgcgtagaaattcctgaatcgttaaaaaaaataaatatcagttttccgccgacgccccattcggggaatatcgcgctgacgctggaaggcatcgggaaaagttacggggatcacagagtgctttccggcgtggatctttgccttgaaacgggagaaaggcttgttgtcgcgggtccaaacggggccggcaaaagcacgctcttgcgtattatagcaggccttgacaaaactttgaaggaaatgtaa

SEQ ID NO: 71196 - protein, 213 aa, Unknown
  Obtained from environmental sample
  misc_feature (1)..(213): Xaa is any amino acid
MRIALAKVLLEQPDILLLDEPTNYLDIEARTWLEKWLETFCGGYLLVSHDRYFLDVCVNEVFELFQGNLKRYAGNYTAYEKVRKTELASLVKRYEEQQEEIIKTEALIRRFRYKASKAAFAQELIKRLEKMERVEIPESLKKINISFPPTPHSGNIALTLEGIGKSYGDHRVLSGVDLCLETGERLVVAGPNGAGKSTLLRIIAGLDKTLKEM

SEQ ID NO: 71197 - DNA, 747 bp, Unknown
  Obtained from environmental sample
  misc_feature (1)..(747): n is a, c, g, or t
atgcaggttttggattttatggaagcgggagcccccgtttctcttattcccaagttacgcgacatgcttggcgcgtttttgttccgcggggacgatgtttacaaaagcatttccgttttaagcggaggagaacgaagccgacttgcgcttcttaaaatgctgttaaagccgcttaatcttcttatccttgacgaaccgacaaaccaccttgatcttaactcgaaggacatactgctggacgccctttccaatttcggcggaacaataatttttgtatcgcatgaccggtcttttatggagacgctttccacaaaaaccctggaacttgcttccggaaatcccccgcgcgcccggctgttctacggcaattacgcttactatttagacaggatagcctcggaaacggaaagcgcggaacacacgacagcggtaaaaacggcgcgcgcggaaaaaccgccctcagccgaacctcaactgacttcggcggacaggcgcgcggctgacaaacagagacaggccgccgtccgcaggctggaaagacaggaagcggaacttttaaaaacattggaagaacttgaaaaaaccaaggcttctcttgaggcggaactttccctgccggaagtatactcaaacggacagagagcgaaggaagtaaaaaacaaacttgacgattgtacggcggcaattgaagttaaaaccgccgaatgggaaaaagccgcgtccgcgctggcgaatgttcccgcttga

SEQ ID NO: 71198 - protein, 248 aa, Unknown
  Obtained from environmental sample
  DOMAIN (1)...(112): ABC transporter
  misc_feature (1)..(248): Xaa is any amino acid
MQVLDFMEAGAPVSLIPKLRDMLGAFLFRGDDVYKSISVLSGGERSRLALLKMLLKPLNLLILDEPTNHLDLNSKDILLDALSNFGGTIIFVSHDRSFMETLSTKTLELASGNPPRARLFYGNYAYYLDRIASETESAEHTTAVKTARAEKPPSAEPQLTSADRRAADKQRQAAVRRLERQEAELLKTLEELEKTKASLEAELSLPEVYSNGQRAKEVKNKLDDCTAAIEVKTAEWEKAASALANVPA

SEQ ID NO: 71199 - DNA, 975 bp, Unknown
  Obtained from environmental sample
  misc_feature (1)..(975): n is a, c, g, or t
atgaacatcttaataataggcggcgccggctatatcggaagccatgtaacaagggaatttctggacaatgggcataaatgcgccgtttttgacaacctttcaagcggactgcgtgaaaatctttttgaacaggcaggttttattcacggggacattcacgactaccccctccttcttgaaaccatgaaaaacggcgattatcaggctgtcattcatcttgcggcgttcaaagcggccggagaatccatgttaaaaccggaaaaatattcgcataacaatatatcaggaaccataaacatattaaacgccgcaagcgaggtggaaattaaaaacatggtcttttcttccagcgccgccgtttacggcagtcctcagtatcttcctattgatgaaaagcaccctaccctgccggaaaattactacggctttaccaaactggaaattgagcgttttttgtactggtacgaaaaacttaaaggcataaattacgcctgcctccgctattttaacgccgcgggttacgacacaaagggacgcataaaagggcttgaacaaaatcccgcgaatttaatccccgttataatggaaaccgcctgcacaaagagagaggaaatgcaaatattcgggaacgattacgacactcccgacggaacctgcatacgcggttatgtgcatgtaagcgatcttgccgccggccatgttatggcgttagactacatcagcaaaaacaacaagagcctgactgtaaatcttggaagcgaaacaggtttttccgttttagaagtggttgaagcggcgcgaaaagttacgggcaaaactataccggcgaaaatcacgggaagaaggcagggcgaccccgcggctctatacgattcgtcgtctctcgcgtttgaaacgcttggctggaaagcgcgttactctgacatggaaacaatacttaaaacaagctgggaagcgtataaaaatgaaagataa

SEQ ID NO: 71200 - protein, 324 aa, Unknown
  Obtained from environmental sample
  DOMAIN (2)...(322): RmlD substrate binding domain
  misc_feature (1)..(324): Xaa is any amino acid
MNILIIGGAGYIGSHVTREFLDNGHKCAVFDNLSSGLRENLFEQAGFIHGDIHDYPLLLETMKNGDYQAVIHLAAFKAAGESMLKPEKYSHNNISGTINILNAASEVEIKNMVFSSSAAVYGSPQYLPIDEKHPTLPENYYGFTKLEIERFLYWYEKLKGINYACLRYFNAAGYDTKGRIKGLEQNPANLIPVIMETACTKREEMQIFGNDYDTPDGTCIRGYVHVSDLAAGHVMALDYISKNNKSLTVNLGSETGFSVLEVVEAARKVTGKTIPAKITGRRQGDPAALYDSSSLAFETLGWKARYSDMETILKTSWEAYKNER

SEQ ID NO: 71201 - DNA, 1410 bp, Unknown
  Obtained from environmental sample
  misc_feature (1)..(1410): n is a, c, g, or t
ttgaagcggcgcgaaaagttacgggcaaaactataccggcgaaaatcacgggaagaaggcagggcgaccccgcggctctatacgattcgtcgtctctcgcgtttgaaacgcttggctggaaagcgcgttactctgacatggaaacaatacttaaaacaagctgggaagcgtataaaaatgaaagataaattattctcgtggatagacgccgccctgcctttggctgtagagcttgaaacagggctcacaaaacaccccgcaatctcacctgaatccggcggcgagggagaactggacaagtgcatctttcttgaaaactggctgaaagcgcagggtattacaaaccttgaacgctgcgacgctcccgacggaaacgcgaagggcggaatacgccccaatctaatcgcgacaattcacggaaacagcgaaaaacaactgtggatcatgagccatcttgacgtagtccctcccggagaggaaaaactctgggaaagcgacccgtggactgttatacgcaaggatgatcctccgggggcgcgccttgtcggacgcgggacggaagacaaccagcagggaatcacggcgtccgttcttgcgagcttaagttttacaaaacagggaataaagcccaaccttacaataaagctgctgtttgccgcggacgaagaagtcggctccgcctacgggattgtatggcttgtaaaaaatcacggcggtttatttaaaaaagacgacatggttctggttcccgacggcggagacagaaaaggagagtttatggaaatcgccgaaaaaaacataatgtggatgcgctttgccacaaggggaaagcaggcgcacggctcaaggccggatttgggcaataacgccttccttgccggctccgatctagtcctgcgcctgcattcggaactttccgccaaattttccgatcgcgaccctttgtttgaccccgactactccactttccagcccacaaaaaaagaagccaacgtgccgaatgtcaacaccatccccggcgaggacgtattttacgtggacatgcgcgtcctccccagatatccggcggacatggtgttagctgaaattgagcgaatcaagtcggaagttgaggcaaagtacggcgtatccgtcacatacagccccgtacagatgactcagtccgtccccaccgccgccgacgcgccaatcgtaaaaaaattgagcgccgccgcaagcgaagtctactctgttacgccgcgacccgtcggcataggcggcggcacaatggcggcgtaccttcgcaacataggcattgactgcgccgtctggacaaagacggacgaaactcttcaccagcctaacgagtacgccctcctggagaacatcctcggggacgcgaaggtaatggccctgttggcgataaattaa

SEQ ID NO: 71202 - protein, 469 aa, Unknown
  Obtained from environmental sample
  DOMAIN (262)...(375): Peptidase dimerisation domain
  misc_feature (1)..(469): Xaa is any amino acid
MKRREKLRAKLYRRKSREEGRATPRLYTIRRLSRLKRLAGKRVTLTWKQYLKQAGKRIKMKDKLFSWIDAALPLAVELETGLTKHPAISPESGGEGELDKCIFLENWLKAQGITNLERCDAPDGNAKGGIRPNLIATIHGNSEKQLWIMSHLDVVPPGEEKLWESDPWTVIRKDDPPGARLVGRGTEDNQQGITASVLASLSFTKQGIKPNLTIKLLFAADEEVGSAYGIVWLVKNHGGLFKKDDMVLVPDGGDRKGEFMEIAEKNIMWMRFATRGKQAHGSRPDLGNNAFLAGSDLVLRLHSELSAKFSDRDPLFDPDYSTFQPTKKEANVPNVNTIPGEDVFYVDMRVLPRYPADMVLAEIERIKSEVEAKYGVSVTYSPVQMTQSVPTAADAPIVKKLSAAASEVYSVTPRPVGIGGGTMAAYLRNIGIDCAVWTKTDETLHQPNEYALLENILGDAKVMALLAIN

SEQ ID NO: 71203 - DNA, 2166 bp, Unknown
  Obtained from environmental sample
  misc_feature (1)..(2166): n is a, c, g, or t
atgatacaaaaagtaacacttcaaatagccggaaaagaccttgtcttggaaaccggcaggatagcaaaacaggcgaacgggtctgttttcgcgcagtacgcgggctcggcggtaatcgccacagtctgcgcgtctcatgatgcgatagagggcattgattatgttccccttacagttgaatataacgaaaaatattacgccgcgggaaaaattcccggcggttttataaagagggaaagccgtcccaaggacaaggagatacttgtctcccgccttatcgaccgccccatgcgccccctttttgaaaaaagtttcggacgtgaaattcaactgatcccgacaaccctttcaacagatcaggtaaatcctcccgatatgctttcgatcatcgcgtcttccgccgccgttcatatttccgatattccgtttaacggccccgtcgcgggagtcagggtctgccaggtggacggcgagcttattgtcaaccccacttatgaacagatagaaaaatccactctggaaattgtggtcgccggcactaaagacggcatcactatggtggaaggcggagcgaaagaggtaagcgaagaattgatgatcgaagcgctggaaaaagcgcataaaatgatcattgaattctgcatcctgcaggaaaaactgcgcgagcttgccggaaagcaaaaacttccgcttaacgttcccgattattcactggagaacaaggacgccatccgcgccgcggcttatcctaagctggaaacagcatgcttccttcccggaaagcaggaaagacacgacgccataaaagcggtaaaagccgaatttgaaaccgcgcatacggcgcagcttgaagacgaaaaacaaaaaaaacttttcaatgtgttattcgaagagatgcagtacgaaatattgcgctcttcaatattaaacaaaggcaaaagggtagacgggcgcgggcttgaagatatacgcaatatcacctgcgaaatcggcattttacagcggacgcacggctcggctctttttacgcgcggtgaaacacaggcgctggttgttacaacccttggaactgtttttgacgagcagatattcgacgacatagaaggcgacaagcgcgaaaacttcatgctgcattacaacttccctccctattcggtaggcgaggttggcagaatggggacaggaaggcgcgaaatagggcacggcaacctcgcgcgccgttctctggaagctatggttccgtccaaagaagtttttccgtataccgtgcgcgttgtttccgaaataatggaatcaaacggctcatcctcaatggcgtccgtttgcggcggcaccctttccatgcttcacgcgggcgttcccatgactaaaccggttgccggtatcgccatggggcttattaccgagggaaaagcaggaccgaacgacaggttcgcggtgttatctgacattctgggcgaggaagatcacttaggcgacatggactttaaggtcgccggaacccaggacggaattaccggtttccagatggatattaaaatcgccggcgtaagccccgagattatgcggaaagcacttgatcaggcaaaacgaggaagactgcatattctttccattatgaaccagtgcatcagcaagcccgtcgagcagattagcgagtacgcgcccaagattgtaactttgcgtattgatatagacaagatcggcgcgcttatagggcccggcggcaagaatataaaggcgttatgcgaacagtattcggttaagataaacacggaagacgacggcaccgtaacaatcttcggaaaatcttccaaagacgccgaggacgcaaaggccgccgttatgggcattgcctcggatccggaaattaacagggtatacgacggcgttgtaaagcgcatcatggatttcggcgcttttgtggaaattcttcccggcaaggaaggccttgtgcatatcagcaaactttccagacagaggattgcgcaggttacggacgtgttaaaagaaggccagcagattcccgttaaactgattgaaattgacaagcagggcaggttaaacctttcctacatagacgctattgatccaaacggctcttccgattcttcgtccgacaaaggcggtggaagagaagatcgcccgcggaataaccgccgttag

SEQ ID NO: 71204 - protein, 721 aa, Unknown
  Obtained from environmental sample
  DOMAIN (558)...(615): KH domain
  misc_feature (1)..(721): Xaa is any amino acid
MIQKVTLQIAGKDLVLETGRIAKQANGSVFAQYAGSAVIATVCASHDAIEGIDYVPLTVEYNEKYYAAGKIPGGFIKRESRPKDKEILVSRLIDRPMRPLFEKSFGREIQLIPTTLSTDQVNPPDMLSIIASSAAVHISDIPFNGPVAGVRVCQVDGELIVNPTYEQIEKSTLEIVVAGTKDGITMVEGGAKEVSEELMIEALEKAHKMIIEFCILQEKLRELAGKQKLPLNVPDYSLENKDAIRAAAYPKLETACFLPGKQERHDAIKAVKAEFETAHTAQLEDEKQKKLFNVLFEEMQYEILRSSILNKGKRVDGRGLEDIRNITCEIGILQRTHGSALFTRGETQALVVTTLGTVFDEQIFDDIEGDKRENFMLHYNFPPYSVGEVGRMGTGRREIGHGNLARRSLEAMVPSKEVFPYTVRVVSEIMESNGSSSMASVCGGTLSMLHAGVPMTKPVAGIAMGLITEGKAGPNDRFAVLSDILGEEDHLGDMDFKVAGTQDGITGFQMDIKIAGVSPEIMRKALDQAKRGRLHILSIMNQCISKPVEQISEYAPKIVTLRIDIDKIGALIGPGGKNIKALCEQYSVKINTEDDGTVTIFGKSSKDAEDAKAAVMGIASDPEINRVYDGVVKRIMDFGAFVEILPGKEGLVHISKLSRQRIAQVTDVLKEGQQIPVKLIEIDKQGRLNLSYIDAIDPNGSSDSSSDKGGGREDRPRNNRR

SEQ ID NO: 71205 - DNA, 450 bp, Unknown
  Obtained from environmental sample
  misc_feature (1)..(450): n is a, c, g, or t
atgggggagcagccgcggataaaagtggttaaagctcacgcgcgcattgagcttccggcttatgagagcaaaggcagcgccggcatggatttgcgcgcttttcttgatgcggatgttacgctcccgcctcttggcagagtgaaaatccccaccggattaaggcttgaaattcccgaaggatacgaagcgcaggtgcgcccgcgttcaggtttggcggtaaattccgggcttacagtccttaattcgccgggtactattgattcggattaccgaggagaactggaaataatactgattaatttgggcgccgataatgtggttataaaggacggacaacggatcgcgcagcttgtaaccgctcctgtttccagagcgcttcttgcagaggcgcaaacgcttgccgaaaccgaaagagcgggcggcgggttcggttctacaggcgttaattga

SEQ ID NO: 71206 - protein, 149 aa, Unknown
  Obtained from environmental sample
  DOMAIN (14)...(147): dUTPase
  misc_feature (1)..(149): Xaa is any amino acid
MGEQPRIKVVKAHARIELPAYESKGSAGMDLRAFLDADVTLPPLGRVKIPTGLRLEIPEGYEAQVRPRSGLAVNSGLTVLNSPGTIDSDYRGELEIILINLGADNVVIKDGQRIAQLVTAPVSRALLAEAQTLAETERAGGGFGSTGVN

SEQ ID NO: 71207 - DNA, 1356 bp, Unknown
  Obtained from environmental sample
  misc_feature (1)..(1356): n is a, c, g, or t
ttgacgcgcaagcgcactagcggagcacaaatggttaaatttttagattcaattatttcactcttcttcgacaggcgcgtcatggcaatggaaagcaaacggggactttccgccaccctttttaaatatatattatcagaggcgcttttttcgttttttatttgttttctttttttcttttttattttttttgtaaaccagatacttcttatggcgaaagaagtccttaccaaacatgtgcctttcggccaggtctccctattaatacttttttccctgccaacggttatcgccatgtccgcccctttcgcgtcgcttgtgggcacgttaatgaccgtagggcggcttacctccgataacgaaattcttgttatgctttcgtcaggcctttcttataaaaatatttttcttcccgccataacggttggaattataatttcgatactgtcgtttattacaaatgatattctgcttccggcgggcaccgttcagtttaataaattatggcggcgaattcttttctccactcccgcgctggaactggaagccaattccgtaaaaaggttcagggataccgtaattgttacgggcgatgttacggacaacactattaaaaacgtgatgattcttgacaagacttccgacggcgagcggagggtaataatggcaagccaggcggaattgaaagacagcggcaacgaaggcttaagcctggagctggaaaacgcctttgtccagtcgtcaaaagaaattgccagagaagattatgactacgcctccgcgagttctttgcagtactggatatcgaacgaagatattattcaggctgttatgagcgtaagccccagggagatgagttcaagggatgtccgtaaggcgataatacaaaaaaccgttgatgtaaataaaaaggcaaatgacagaaaagggaaagtcattatacaggcggctaatcttgaaaatactttaagaaaaggacctccgggggaatcatggagccgcaaacagtcaaacatcgcaaatttacagcgcgaaacacagattcttgccggaatctacaaagaccgttcgcttaccatacatattatagaatattataaaaagttttccgtccccttcggagcgttcttttttgtgtttttggccgtgtctttgggactgatggcaaaaaaaagcggacagacagtagggtttattttcggcaatataatcgctgtcatttactggtctatgctttttatcgggcagacaatgggtttgcgggtagggactcctccattctggtcaatgtggcttcctaacatactgtctcttgccatagggctggtattggctgtaatcaggatacgaaaatga

SEQ ID NO: 71208 - protein, 451 aa, Unknown
  Obtained from environmental sample
  DOMAIN (42)...(447): Predicted permease YjgP/YjgQ family
  misc_feature (1)..(451): Xaa is any amino acid
MTRKRTSGAQMVKFLDSIISLFFDRRVMAMESKRGLSATLFKYILSEALFSFFICFLFFFFIFFVNQILLMAKEVLTKHVPFGQVSLLILFSLPTVIAMSAPFASLVGTLMTVGRLTSDNEILVMLSSGLSYKNIFLPAITVGIIISILSFITNDILLPAGTVQFNKLWRRILFSTPALELEANSVKRFRDTVIVTGDVTDNTIKNVMILDKTSDGERRVIMASQAELKDSGNEGLSLELENAFVQSSKEIAREDYDYASASSLQYWISNEDIIQAVMSVSPREMSSRDVRKAIIQKTVDVNKKANDRKGKVIIQAANLENTLRKGPPGESWSRKQSNIANLQRETQILAGIYKDRSLTIHIIEYYKKFSVPFGAFFFVFLAVSLGLMAKKSGQTVGFIFGNIIAVIYWSMLFIGQTMGLRVGTPPFWSMWLPNILSLAIGLVLAVIRIRK

SEQ ID NO: 71209 - DNA, 321 bp, Unknown
  Obtained from environmental sample
  misc_feature (1)..(321): n is a, c, g, or t
gtgacggcgcttccactcgctgccgccagatcactaagacctactttcgtacctgctcggtctgtcgacctcgcagtcaagcctccttgtgcctttacactcatgcgccgatttccaaccggcgcgaggagaccttcgcgcacctccgttactctttgggaggcgaccgccccagtcaaaccgcctgcctatcactgtccccagcccggattcacgggtcgggttagaaacctaatcagacaagggtggtatttcactgttgactccgcgcaagctaacgcccacgcctcacagtctcccacctatactacacatgtctaa

SEQ ID NO: 71210 - protein, 106 aa, Unknown
  Obtained from environmental sample
  misc_feature (1)..(106): Xaa is any amino acid
MTALPLAAARSLRPTFVPARSVDLAVKPPCAFTLMRRFPTGARRPSRTSVTLWEATAPVKPPAYHCPQPGFTGRVRNLIRQGWYFTVDSAQANAHASQSPTYTTHV

SEQ ID NO: 71211 - DNA, 303 bp, Unknown
  Obtained from environmental sample
  misc_feature (1)..(303): n is a, c, g, or t
gtgccaaaccttcccgtcgatgtggactcttggggaagatcagcctgttatccccggagtaccttttatccgttaagtgacggcgcttccactcgctgccgccagatcactaagacctactttcgtacctgctcggtctgtcgacctcgcagtcaagcctccttgtgcctttacactcatgcgccgatttccaaccggcgcgaggagaccttcgcgcacctccgttactctttgggaggcgaccgccccagtcaaaccgcctgcctatcactgtccccagcccggattcacgggtcgggttag

SEQ ID NO: 71212 - protein, 100 aa, Unknown
  Obtained from environmental sample
  misc_feature (1)..(100): Xaa is any amino acid
MPNLPVDVDSWGRSACYPRSTFYPLSDGASTRCRQITKTYFRTCSVCRPRSQASLCLYTHAPISNRREETFAHLRYSLGGDRPSQTACLSLSPARIHGSG

SEQ ID NO: 71213 - DNA, 369 bp, Unknown
  Obtained from environmental sample
  misc_feature (1)..(369): n is a, c, g, or t
atggtttatcttgaggtgggcttcccgcttagatgccttcagcggttatcccttccgaacgtagctacccggcacttgcccttggcaggacaaccggtacaccagaggttcgtccatttcggtcctctcgtactaaaaacagctcctctcaaccatccagcgcccatggcagatagggaccgaactgtctcgcgacgttctgaacccagctcacgtaccgctttaattggcgaacagccaaacccttgggacctgcttcagccccaggatgcgatgagccgacatcgaggtgccaaaccttcccgtcgatgtggactcttggggaagatcagcctgttatccccggagtaccttttatccgttaagtga

SEQ ID NO: 71214 - protein, 122 aa, Unknown
  Obtained from environmental sample
  misc_feature (1)..(122): Xaa is any amino acid
MVYLEVGFPLRCLQRLSLPNVATRHLPLAGQPVHQRFVHFGPLVLKTAPLNHPAPMADRDRTVSRRSEPSSRTALIGEQPNPWDLLQPQDAMSRHRGAKPSRRCGLLGKISLLSPEYLLSVK

SEQ ID NO: 71215 - DNA, 1053 bp, Unknown
  Obtained from environmental sample
  misc_feature (1)..(1053): n is a, c, g, or t
atggacggtaaaaggctttttgcgcgggtaacgttgttggcgtcggttgtgttgctcggtttgtctacggcggcgtcggccaaagacaatgtctatggggacgttattgccaaggccgggcagtctgaagtggtgattgataacacgcttccgaccgggcttataatactggtagacggcaaggaggcgggtagaatgaaaggccgcgacaaggcgcgtttcgtggtgcccgacggcaaccactacctgaaagttatggggaccgccaggggtagcggctcttccaaggacgtgcagttctacaccaggggcaagaggtttgtctttaaggtgaccggtcccacaatccagtcggtctatctgtcgcgtgaaaacgcttacgaccttggcgtgcctccgggccagcccgcgccgggagtgtcggctgagtacggcggagcggatgtgcctctcgccgagaccgcgctcggcaaggataagggagcgatgtttgaccgcttagataaggcggctcccgttacccctgcccccgcgccggctccaactccggcaccggcaccagctcgggcggccgttcctgcggcctcgaccccggcgccgagtagcgcgcccgtcgttccggcagggcctaagttcgccacccccgacggaaaaaagccccaaatcgcggtttacgtgaccggcgataggtcggacggcgataaaaaggcgttgggcgataagttgttgaccgcgttggtgaacagcggcaagttcatagccattgagcgctcaaaagagttcttatccgaaatcgacaacgagcagaggaaacaacgcgagggttcggttgacgagagtcagataagcaaattgggcaggcagttcggcgtgcactacgtctgcgtggccaatattatagaggctttcggcggtcatcaagtctcggcaaggataatcaacgtggagaccgcggtagtggtggccatgggtgaagacgacagcccgctaaggaacatggacgatttggcaagcgtgtcgttcaggatcgctagggcgttgctcaaggaataa

SEQ ID NO: 71216 - protein, 350 aa, Unknown
  Obtained from environmental sample
  SIGNAL (1)...(27)
  misc_feature (1)..(350): Xaa is any amino acid
MDGKRLFARVTLLASVVLLGLSTAASAKDNVYGDVIAKAGQSEVVIDNTLPTGLIILVDGKEAGRMKGRDKARFVVPDGNHYLKVMGTARGSGSSKDVQFYTRGKRFVFKVTGPTIQSVYLSRENAYDLGVPPGQPAPGVSAEYGGADVPLAETALGKDKGAMFDRLDKAAPVTPAPAPAPTPAPAPARAAVPAASTPAPSSAPVVPAGPKFATPDGKKPQIAVYVTGDRSDGDKKALGDKLLTALVNSGKFIAIERSKEFLSEIDNEQRKQREGSVDESQISKLGRQFGVHYVCVANIIEAFGGHQVSARIINVETAVVVAMGEDDSPLRNMDDLASVSFRIARALLKE

SEQ ID NO: 71217 - DNA, 2112 bp, Unknown
  Obtained from environmental sample
  misc_feature (1)..(2112): n is a, c, g, or t
ttggacaccgtcaaaaacgccccgcgttttctcggtatcgcgcaggtagtaatgggcgccggcgccattgccacgctatttacttatagcagcctattcaagataatggtctttacaatagacgcgctcgaccgtaacgcctccggttacgtgctctttaacatcataagccacctgatctgcgttatcaccatgctaccgtccacgatatgcgccggtatggtcgtgccgctcatcatccacatgctctacagacgcgggtacggtgaggcggccatcggcaaggtttacgccgtgaacaccgccggcgggatactcggggtgatagtcgccgtgtgggggcttatggagcttaccggtctcaaataccttatcaccataggcggcgcgattgatatggcgctcgggctttacgtgctctacaaattcgccgagaccaaacagagcctgacgcgcaccatagcgcaaccggtctgccttatcgtgtttgtcgctgcggtcgccttctccaagctcgatccggtgctcgcctcttcgggggtctttcgctacgggtctatatccaacgcaaagcgtgtggtggagcacatagacgggaagacggcgtccatcaccctctttaaatcgggcgacaatttggtgctctccacaaacggcaaaccggacgccagcgttgggttcaaggatgattacagcagcgacgagtacactatgtcgctgctcggcgtgctacccatgagcgtgcgccctgatgtgcggacggcggcggtgatcggcatgggcgccggtatgacggcgcactacttgctttacgaccccaccttggagagcctagacgtggtggagattgagccggctatggccaaactcgccaaaaagatcgggccgaaggtggagaacaccttcaaagacccgcgttgccacatccactttgacgacgccaagaccttcttctcggcgcagaaccgcacctacgacgttatcgtctccgaaccctccaacccatgggtgagcggcgtgtcgagcctcttctcacgagagttcttccgacacatccgcagacacataaacgacggcgggatactcgtgcagtggttccacaagtacgaggccgactttaccatattggtatcaatactaaaggcgctgggcgaggcgttcccgcaatacgaactctacatggtcggttccgacttaatcgttatcgccgccaaagacgagagtaccgacatcagcctgaaacgcgacgttttcatctacgaccgattatccgataacatgaagaagatgggcttctccggcatggaggactttcgccttatccgctacgccgacaaggcttttttcgatccgctgataaatacctacaaaacgacgccggcgaacagcgattaccactcctacgtagacctctacgccgccaagcaccgcttcatgggcagcaccgcgaaggagatagacgacatgcgggagttcatagtcccggtcaagaagacgctgctcgccgacacggcgtacatgagcctgaccatgatgcgtaactatccggacatatacaacctatacgacatccacaaagcgaagtccttagcccaagagattctgttcagcgcaagggcggtaaacgacgacacgacgcacggctcgctctcggcttcaatcttcatactcgactatgccgaggcgcggccgcagatgataaccttttcgcagatacagagcgccatcacgcaaatactgcagaagacgttgccgtacctatccgccgaagagatgcgcgaactgtgggacgtcattgagggaaaagcagccaagcgggagctctcagatatagacaaagagtggatggcctatttcagggcgctatgcaactacgatatccccgaaacgcggcgtctgtcgttaagcctgctgccggtggaagcggacaccttggcggatcacttcagcaaccagatgctcattgcgtcattgcttacgacatccgtgataacgaacgactcggtgaatgtagggcgggtgtgggagaagtacgaagcgaagaagagaccgccggcggcaatacgggcggcgcgggcggtttacaatgaggttttgggagttaaaaaatag

SEQ ID NO: 71218 - protein, 703 aa, Unknown
  Obtained from environmental sample
  DOMAIN (167)...(410): Spermine/spermidine synthase
  misc_feature (1)..(703): Xaa is any amino acid
MDTVKNAPRFLGIAQVVMGAGAIATLFTYSSLFKIMVFTIDALDRNASGYVLFNIISHLICVITMLPSTICAGMVVPLIIHMLYRRGYGEAAIGKVYAVNTAGGILGVIVAVWGLMELTGLKYLITIGGAIDMALGLYVLYKFAETKQSLTRTIAQPVCLIVFVAAVAFSKLDPVLASSGVFRYGSISNAKRVVEHIDGKTASITLFKSGDNLVLSTNGKPDASVGFKDDYSSDEYTMSLLGVLPMSVRPDVRTAAVIGMGAGMTAHYLLYDPTLESLDVVEIEPAMAKLAKKIGPKVENTFKDPRCHIHFDDAKTFFSAQNRTYDVIVSEPSNPWVSGVSSLFSREFFRHIRRHINDGGILVQWFHKYEADFTILVSILKALGEAFPQYELYMVGSDLIVIAAKDESTDISLKRDVFIYDRLSDNMKKMGFSGMEDFRLIRYADKAFFDPLINTYKTTPANSDYHSYVDLYAAKHRFMGSTAKEIDDMREFIVPVKKTLLADTAYMSLTMMRNYPDIYNLYDIHKAKSLAQEILFSARAVNDDTTHGSLSASIFILDYAEARPQMITFSQIQSAITQILQKTLPYLSAEEMRELWDVIEGKAAKRELSDIDKEWMAYFRALCNYDIPETRRLSLSLLPVEADTLADHFSNQMLIASLLTTSVITNDSVNVGRVWEKYEAKKRPPAAIRAARAVYNEVLGVKK

SEQ ID NO: 71219 - DNA, 525 bp, Unknown
  Obtained from environmental sample
  misc_feature (1)..(525): n is a, c, g, or t
atgcgggaaattaatttagcgtctttcggcggaatagcggacggcgttacggataattcagatttctttgccgccgcgttacaggcgctcaaagaggcgggcggcggcagtctgaaaatcgggaaaggcgtgtggcgtaccggccctatagagatattctcaaatattacgattgtgttggacgaggaagctgtccttctctttattcctgatcctgaacgctacgagccggtaaagacgcggtgggaagggcttgaatgtttcgcgttgcatccgtgcattttcgcctcgggacaggagaatatcaccatcacaggaaaaggcgttattgacggcaacggcgggagctggtgggatatgttacgtgaaaaaagaggccgcggccagcaggagccggaaacgccgcaggaacttgcgttagccgcattaaatcccggttacgaaacccagccgtccggcggcggcggcaggaaattacaatttttacgtcctccccttgttcagtttcataatggtcaaaaataa

SEQ ID NO: 71220 - protein, 174 aa, Unknown
  Obtained from environmental sample
  misc_feature (1)..(174): Xaa is any amino acid
MREINLASFGGIADGVTDNSDFFAAALQALKEAGGGSLKIGKGVWRTGPIEIFSNITIVLDEEAVLLFIPDPERYEPVKTRWEGLECFALHPCIFASGQENITITGKGVIDGNGGSWWDMLREKRGRGQQEPETPQELALAALNPGYETQPSGGGGRKLQFLRPPLVQFHNGQK

SEQ ID NO: 71221 - DNA, 654 bp, Unknown
  Obtained from environmental sample
  misc_feature (1)..(654): n is a, c, g, or t
gtgggagatgacggcattgtgctcaagtcgggggcgggcgaggacggcatacgcgtgggaaaaccgtgccgcagaataactgttcgtaattgcgagataaaagacggccacggcgggatcgttatcggcagtgaaaccgcggcaggtatttatgaagtgcttaccgaggattgtctttttatgggaaccgaccgggggataaggataaaaacacggcgcggcaggggaggggaaattcacgatttggaattccgcaaccttaccatggaaaacaacctttgccctttcgctattaatatgttttaccgccccggcgcggtcatgaccgacggctttttcagccagagcgcccttcccgtgaacgccgcgacgccatcaattaagaatatccgcatctcggatatcagggcttcaggctgcagggcgtcggcgggttttatcgccggtttgcctgaatcgcccgtggaaaacgtcgtcataaaccgctgtgaattctccactgatgaaggctccggaataagccccgatgaatctgacatgtttttgggaattccggcgattacggaaaaaagcatacgtcttcttaatgttaaaaattttcaatataatgaagtaaatgtaaagggtccgctcgaggcttttatttatcgttag

SEQ ID NO: 71222 - protein, 217 aa, Unknown
  Obtained from environmental sample
  misc_feature (1)..(217): Xaa is any amino acid
MGDDGIVLKSGAGEDGIRVGKPCRRITVRNCEIKDGHGGIVIGSETAAGIYEVLTEDCLFMGTDRGIRIKTRRGRGGEIHDLEFRNLTMENNLCPFAINMFYRPGAVMTDGFFSQSALPVNAATPSIKNIRISDIRASGCRASAGFIAGLPESPVENVVINRCEFSTDEGSGISPDESDMFLGIPAITEKSIRLLNVKNFQYNEVNVKGPLEAFIYR

SEQ ID NO: 71223 - DNA, 900 bp, Unknown
  Obtained from environmental sample
  misc_feature (1)..(900): n is a, c, g, or t
atgtataaacaggtagacgcaaaagtaaattttcccaaattggaagaagaaatccttaaattttgggaacaaaaccatatttttgaaaaatccgtatccaacagggaagggcggagcgaattcgtcttttacgacggtcccccctttgccacaggactcccgcacttcgggcactttgtcccaagcacaatcaaagacataatcccccgctatcaggcgatgaaaggcaaaaaagtcgaacgccgcttcggctgggactgccacggactccccgtcgaaaacctaatcgaaaaagaacttggactcaactcaaaaaccgcaatcgaaaactacggcgtcgccaaattcaacgaagcctgccgagccgccgttctgcgttatgtgaaagaatggcgagccacaatcacccgcctcggacgatgggttgacttcgatcacgactacaaaacaatggaagccgactacatggaaacaatctggtgggtaatgaaaaccctctgggacaaaggctacctctacgaaggacactacatactcccatactgcccccgctgcgccaccgtcctctccaaccacgaactcaacctcggcggttacaaagacgtacacgatcccgcaatcactgtgcgattcaaggttttagggagtagggagtggggagtagggaatagtgatacttatctgctcgcgtggacaaccaccccgtggacgcttccttcaaacctcgcccttacactcggcgcagagattgactatgttttaatcgaaaacctttcccccactccccattccccactccccactcccaatgattactacatattagcggaagcgagactatcggcgtattacaaagaagcgtcggaatataaaatcatctggcgtaaaaaaggaaagtga

SEQ ID NO: 71224 - protein, 299 aa, Unknown
  Obtained from environmental sample
  DOMAIN (17)...(299): tRNA synthetases class I (I, L, M and V)
  misc_feature (1)..(299): Xaa is any amino acid
MYKQVDAKVNFPKLEEEILKFWEQNHIFEKSVSNREGRSEFVFYDGPPFATGLPHFGHFVPSTIKDIIPRYQAMKGKKVERRFGWDCHGLPVENLIEKELGLNSKTAIENYGVAKFNEACRAAVLRYVKEWRATITRLGRWVDFDHDYKTMEADYMETIWWVMKTLWDKGYLYEGHYILPYCPRCATVLSNHELNLGGYKDVHDPAITVRFKVLGSREWGVGNSDTYLLAWTTTPWTLPSNLALTLGAEIDYVLIENLSPTPHSPLPTPNDYYILAEARLSAYYKEASEYKIIWRKKGK

SEQ ID NO: 71225 - DNA, 2574 bp, Unknown
  Obtained from environmental sample
  misc_feature (1)..(2574): n is a, c, g, or t
atgaaaattagagtaaaactcacggcgattatggttgcgctcggcttatttgccattgcttcggtaagtattattctgcttgtccgttttcggtcaagtatcaccaatctttcggaacaatatgccctcataatggctcaagaatccgccacccttgttgacaattttcttgattcatatctgaccaaactggaaaccgcggctgacgtactggaacattataaggaaataccaattgccagccgccgcagtatatttaatgtgataactgaagggattgttgaaaaagatacggatattattgcggcatggtgcgtattggaaccggacgttttggaaggcggagacagtccgtatatagggacaaaaggagccggtcccggcgggcgtttttctccttattattactggaataacagaaaaattgaactggtcgttctggaagattttcaagatcccgcatatcttttgccgaaaaattcaggcattccgacaattatgaacccctatcagtatgacgtagacggaaaaatggtattgatgacatcaatttgcgtccctatacacgacatgaatgacatgaataaaaaggtcataggggttgtgggtattgatcttccacttgatcagattcaggaaatatcgcaaaccaaaaagccttttcccgattctgtaaccgcggtattcagcaatgatggcactattgcctcccacttcgatcccagtcgttttggaaaaaatattagggaaaccgaagcggacatggcaggcaaggttataaatgattttgtagacgccgttaaaaacggcaaacctttttctttttccaattacattgcggcattaaagacgaacatgaaaatgtttatcattccaattaccatcggaacaacgacaactccatggagttacgctatagccattatgcaaaagacgataatggctccggtctaccaaatgattaccataatcatagcgataagcgtcgcagtattgttcattgtgttattaatagccatattcatgtcccgatccatcagtaagccaattgtcaatgtagccgataccctcaaagatatatccgaaggcgaaggcgatttgacaaaacgaatagcatccaggtctgacgatgaagtcggcgctctttccaactacttcaaccggactatggaaaaaatcaaaaatctggtaagttctataaaatacaaaatcaacgggcttaatcataccagttttgaactttcatccaatatgggtaaaacttccacagcagtgcagcagatttcatctaaccttgataatatgaagaacctcatggttaaacaggaaaacagcgcggaagaagcgggcagagcggtagaagatattaagcacaatattgacagccttaaaaaaatgatagaacaacagactgacagcgtaaatatgtcgtcttccgccattgaagaaatgacagctaacattcattctgtaaccaagacgctggcggaaaacagcaaaaatgtcggtgtattaaccgaagcatcggagaacggcaagacgggcgttcaaacagtggcgcagaaaatacaggaaatatcgcaggattccgaagggctgctggaaataaactcggtaatgaagaatatcgccagtcagaccaatttgctttcgatgaacgccgctattgaagcggctcacgccggagatgcgggcaagggctttgccgtcgtcgccgatgaaatccgcaaacttgccgaatcatcggggcagcagtctaaaaccaccgcggcgatgctgaaaaagataaaagcgtccatagataatatcaccaaatcctcaggtgatgtgttggcgcgtttcggagccatagactcaagcgtaaaaacagtttcgcagcatgagcaaaatatccttcatgcgatggaagaacaggaacagggcggaaagcaaatactggattccataagccgtctgcgggacataacggcatcggttaaaaaagggtccgataacatggaggaatcgggaaagacactggtaaaaaatacggatggattcataaaaaccagcaaagaaacggtagaaggcatgaacgagatactgaaaggcattaatcaaataaatgtctcggtaagccatgttaatgaaatgagtttggaaaacaaccggaactttgagtcattaaaagaagaaacgcaaaaatttaatgttactgccggagacgaaaagaaaaaaatcctcatggtagacgacgatgaaatacatcttgaaatggtatctacggtattaaagaatgattatgatatagttacctctaaatcgggcaaagaagcgttgggcttattctatcagggtcttgtccccaatttaatcttattggacttgataatgccggacatggacggctggaatacatacaccagaataaaagcaataagcaatttgcatgatataccgatagcgtttttcacagtctccgatgacccgaaagataagcggcacgcgtacgaaataggcgcggttgattacatcaaaaaaccctatgacaaagacgacctgataaataggatagggaagattctcaacaaatag

SEQ ID NO: 71226 - protein, 857 aa, Unknown
  Obtained from environmental sample
  SIGNAL (1)...(20)
  DOMAIN (166)...(251): Cache domain
  misc_feature (1)..(857): Xaa is any amino acid
MKIRVKLTAIMVALGLFAIASVSIILLVRFRSSITNLSEQYALIMAQESATLVDNFLDSYLTKLETAADVLEHYKEIPIASRRSIFNVITEGIVEKDTDIIAAWCVLEPDVLEGGDSPYIGTKGAGPGGRFSPYYYWNNRKIELVVLEDFQDPAYLLPKNSGIPTIMNPYQYDVDGKMVLMTSICVPIHDMNDMNKKVIGVVGIDLPLDQIQEISQTKKPFPDSVTAVFSNDGTIASHFDPSRFGKNIRETEADMAGKVINDFVDAVKNGKPFSFSNYIAALKTNMKMFIIPITIGTTTTPWSYAIAIMQKTIMAPVYQMITIIIAISVAVLFIVLLIAIFMSRSISKPIVNVADTLKDISEGEGDLTKRIASRSDDEVGALSNYFNRTMEKIKNLVSSIKYKINGLNHTSFELSSNMGKTSTAVQQISSNLDNMKNLMVKQENSAEEAGRAVEDIKHNIDSLKKMIEQQTDSVNMSSSAIEEMTANIHSVTKTLAENSKNVGVLTEASENGKTGVQTVAQKIQEISQDSEGLLEINSVMKNIASQTNLLSMNAAIEAAHAGDAGKGFAVVADEIRKLAESSGQQSKTTAAMLKKIKASIDNITKSSGDVLARFGAIDSSVKTVSQHEQNILHAMEEQEQGGKQILDSISRLRDITASVKKGSDNMEESGKTLVKNTDGFIKTSKETVEGMNEILKGINQINVSVSHVNEMSLENNRNFESLKEETQKFNVTAGDEKKKILMVDDDEIHLEMVSTVLKNDYDIVTSKSGKEALGLFYQGLVPNLILLDLIMPDMDGWNTYTRIKAISNLHDIPIAFFTVSDDPKDKRHAYEIGAVDYIKKPYDKDDLINRIGKILNK

SEQ ID NO: 71227 - DNA, 1458 bp, Unknown
  Obtained from environmental sample
  misc_feature (1)..(1458): n is a, c, g, or t
atggatcagattggccgagttggcactatcgccggaatggtgaacgatttttgcgatcatctgagcggcggaattgggacaataaaatacaaaattaacggtcttaaccataccagttttgaactttcaataaatatgggtaaaacttccaatgccgtggagcagattacattgagtctcgataatatgaagaatctcatggttaaacaggaaagcggcgctgaagaagccggcagggcggtaggggtaattaaagaaaacataggcagtcttaaaaaaataatagaagaacaaacggaaagcgtaaatatgtcgtcctccgctattgaggaaatgacagctaacattcattcggtaacgcagacattgatagaaaacagcaaaaacgtcgctgttttaacggaagcgtctgagaacggcaaaacgggtcttcagacagtagcgcaggaaatactggaaatcgcgcatgattccgaagggttgctgcaaataaactcattgatgaacaatatagcaagccaaaccaacctgctttcgatgaacgcggcgattgaagcggcgcacgcaggagaagcgggcaagggttttgccgtagtagccgatgaaatccgcaaacttgccgagacatcgggaaaacagtcaaaaaccaccgccacgatgctgaagaaaataaaagcgtccatagacaacattaccaaatcctccaccgatgtacaggcgcgttttggagcgatagactcaagcgtaaaaacagtttccgaacatgagcagaatatccgcaatgccatggaagagcaggaaatcggcggaaggcagatattggaatccattggtcgattaagagacataacctattcggttaaaaaaggctctgacgatatggaaggatcgggcggaactttggtaaaagaaacggatgaatttataaaaataagcaaagaaacggtagacggcatgaacgaaataatgacgggtattaatcagataaatgtttcgataaaccatgttaacgaaatgagtattgagaacaacaataactttgaatcggtaaaacaggaaacgcaaaaatttaatgttacatccggcaacgaaaagaaaaaaatcctcatggtagacgacgatgaaatccatcttgaaatggtgggatcggtattgcagaacgattatgatattgtaagttcaaaatcgggcaaagaagctcttggcttattctatcagggtcttgttccgcaattaattttattagacttaataatgccggacatggacgggtggaatacatacacaagaataaaagcgataagcaacttacacgacatcccgatagcgtttttcacggtttccgacgacccgaaagacatggaacacgcgcacgaaataggagcggttgattacatcaaaaagccttatgacaaagacgacttgttaaatagaatagggaagatactgaaaaaataa

SEQ ID NO: 71228 - protein, 485 aa, Unknown
  Obtained from environmental sample
  DOMAIN (96)...(310): Methyl-accepting chemotaxis protein (MCP) signaling domain
  misc_feature (1)..(485): Xaa is any amino acid
MDQIGRVGTIAGMVNDFCDHLSGGIGTIKYKINGLNHTSFELSINMGKTSNAVEQITLSLDNMKNLMVKQESGAEEAGRAVGVIKENIGSLKKIIEEQTESVNMSSSAIEEMTANIHSVTQTLIENSKNVAVLTEASENGKTGLQTVAQEILEIAHDSEGLLQINSLMNNIASQTNLLSMNAAIEAAHAGEAGKGFAVVADEIRKLAETSGKQSKTTATMLKKIKASIDNITKSSTDVQARFGAIDSSVKTVSEHEQNIRNAMEEQEIGGRQILESIGRLRDITYSVKKGSDDMEGSGGTLVKETDEFIKISKETVDGMNEIMTGINQINVSINHVNEMSIENNNNFESVKQETQKFNVTSGNEKKKILMVDDDEIHLEMVGSVLQNDYDIVSSKSGKEALGLFYQGLVPQLILLDLIMPDMDGWNTYTRIKAISNLHDIPIAFFTVSDDPKDMEHAHEIGAVDYIKKPYDKDDLLNRIGKILKK

SEQ ID NO: 71229 - DNA, 417 bp, Unknown
  Obtained from environmental sample
  misc_feature (1)..(417): n is a, c, g, or t
atgtctcttaatcgaccaatggattccaatatctgccttccgccgatttcctgctcttccatggcattgcggatattctgctcatgttcggaaactgtttttacgcttgagtctatcgctccaaaacgcgcctgtacatcggtggaggatttggtaatgttgtctatggacgcttttattttcttcagcatcgtggcggtggtttttgactgttttcccgatgtctcggcaagtttgcggatttcatcggctactacggcaaaacccttgcccgcttctcctgcgtgcgccgcttcaatcgccgcgttcatcgaaagcaggttggtttggcttgctatattgttcatcaatgagtttatttgcagcaacccttcggaatcatgcgcgatttccagtatttcctgcgctactgtctga

SEQ ID NO: 71230 - protein, 138 aa, Unknown
  Obtained from environmental sample
  misc_feature (1)..(138): Xaa is any amino acid
MSLNRPMDSNICLPPISCSSMALRIFCSCSETVFTLESIAPKRACTSVEDLVMLSMDAFIFFSIVAVVFDCFPDVSASLRISSATTAKPLPASPACAASIAAFIESRLVWLAILFINEFICSNPSESCAISSISCATV

SEQ ID NO: 71231 - DNA, 372 bp, Unknown
  Obtained from environmental sample
  misc_feature (1)..(372): n is a, c, g, or t
atgaatgttggattggataagagcaggaagtttgcgatacggatttataatatgtataagtttttatgcgacacaaaacgtgaatatatacttgccaaacagttattgcgttccggtacttctatcggcgcaaatttaagcgaagcacaatactcagtcagcaaaaaggagtttctggtcaaagtgtcaatttctctgaaagaatgcgctgaaacagaattttggcttgatttactcaaggaagttaacctgattaataaaaaagagtacgacagtataatacaagactgcaaggaactcttaaaattgcttatttctataacaaaaacaacaaaaaagtcaataaaattaacaaggagcaaggaacaatga

SEQ ID NO: 71232 - protein, 123 aa, Unknown
  Obtained from environmental sample
  DOMAIN (7)...(107): S23 ribosomal protein
  misc_feature (1)..(123): Xaa is any amino acid
MNVGLDKSRKFAIRIYNMYKFLCDTKREYILAKQLLRSGTSIGANLSEAQYSVSKKEFLVKVSISLKECAETEFWLDLLKEVNLINKKEYDSIIQDCKELLKLLISITKTTKKSIKLTRSKEQ

SEQ ID NO: 71233 - DNA, 1260 bp, Unknown
  Obtained from environmental sample
  misc_feature (1)..(1260): n is a, c, g, or t
atgcggaaaaatgttaaggcgtttttagtaatagccgttgttttacttgcggcaaactgtgataaacaatccggcgcggacagattgcaaaactctcagcaagaattgcagcccttgctttccgatatcgtcaacgcgtggcttgatataaatacaaaacttgctccgccggatataacggaaacatttttttctgacggaattgaattgcaaatagaaaaatttaatgacagcctgaatcgatttataaattctccaatcggctatctgtatcggacgcacagaaaagaggatatgctttctattcaggaagtttccgccgctgtaaacaggcttaaagccgccgtgcaaaacggcaatgagcgtgaaattttttcaaatacccttgaaattgacagggcggttattatgctgcaaagagttgacatcgagctttcggttaaaagccaacggagttcttttctgttattctttttcttatccttaatgattatcgcaataactcttattctgacagctttgcaaaacaggcttaaaaccgaaaaattacagcaccagcagagcatatctttttcccgtgcgaccatacttgcgcaggaacatgaacgcgctcgtattgcgagggaattgcacgacacagtggcgcaagaccttttgcggctttcgcttcaaacggaacttatcaaaaaagaagcggtatccaaaaatcagagccgcctttgcgcggcagtagcggaaggtcaaaccgaattgctaagcagaataagaaacatctgcaatgatttaattccgccggattttcagccgagcggtaatagttatattcgtttacccgatgcactacggactctttgcaacacatttgaaaagcgcacaggcattgaatgtaacataatgatacacgataacgcggactttagttttcttgacgtagatatgcagcttcactgtttccgcattgttcaggaaagtcttgcgaacgttgaaaaacacgcaaaagcaagcgaggtatcggtgcttgtccgcagtaacgccgaagggaaactgctgatgtttgttaccgacaacggaaatggttttgaaaaaaccgacaaggatttttaccgtgtgatgagagcgaaggggcattttggtctgtggaatatgcaagagagagccgcttcaatgaacggcgttttcagcatagacagcgaaacgggggaaggcgcttcagtcaagttaatcatacccccccctaatttttccggacaggtggagtaa

SEQ ID NO: 71234 - protein, 419 aa, Unknown
  Obtained from environmental sample
  SIGNAL (1)...(22)
  DOMAIN (202)...(267): Histidine kinase
  misc_feature (1)..(419): Xaa is any amino acid
MRKNVKAFLVIAVVLLAANCDKQSGADRLQNSQQELQPLLSDIVNAWLDINTKLAPPDITETFFSDGIELQIEKFNDSLNRFINSPIGYLYRTHRKEDMLSIQEVSAAVNRLKAAVQNGNEREIFSNTLEIDRAVIMLQRVDIELSVKSQRSSFLLFFFLSLMIIAITLILTALQNRLKTEKLQHQQSISFSRATILAQEHERARIARELHDTVAQDLLRLSLQTELIKKEAVSKNQSRLCAAVAEGQTELLSRIRNICNDLIPPDFQPSGNSYIRLPDALRTLCNTFEKRTGIECNIMIHDNADFSFLDVDMQLHCFRIVQESLANVEKHAKASEVSVLVRSNAEGKLLMFVTDNGNGFEKTDKDFYRVMRAKGHFGLWNMQERAASMNGVFSIDSETGEGASVKLIIPPPNFSGQVE

SEQ ID NO: 71235 - DNA, 627 bp, Unknown
  Obtained from environmental sample
  misc_feature (1)..(627): n is a, c, g, or t
atgatttctatagtccttatagacgatcatcccatgcttaccaacgctatcagcgtatggctggaaactgcagggcggtttacaatctcaggcactgcggcgagccttgccgaagcccgcacattaatgaaagaacttgaccctctgcctcaaattgtcattcttgacatttcaatgggaagcggaaaacagtccgccgttcaggaagacgggcttacctttattcccgagcttaagaaaatctgcaaagaaagaaaagcgcccatgcccgatgtgctggtatgttcaatgtacgaagacccttttttggtacagcgggcaatggatttgggagcgaaagcatacgtcgcgaagtcggcggtagcggaggaaataaccgccgccatagacgcaatacttgcgggagaaacttatacgaacgtcaaaatcaaaaaaaggaatcagagcaaaacatttattgccttaacacggcgagagaatgaaattgtctcccttgtaaaacaatcactgtccaaccagcaaattgccaaaatgcttaagctcagcaatcgtactgtggaaaatcatctgcaaagtatttacgaaaaaacaggcgttgcctcaagagaaaaattaattagcttataa

SEQ ID NO: 71236 - protein, 208 aa, Unknown
  Obtained from environmental sample
  DOMAIN (152)...(208): Bacterial regulatory proteins, luxR family
  misc_feature (1)..(208): Xaa is any amino acid
MISIVLIDDHPMLTNAISVWLETAGRFTISGTAASLAEARTLMKELDPLPQIVILDISMGSGKQSAVQEDGLTFIPELKKICKERKAPMPDVLVCSMYEDPFLVQRAMDLGAKAYVAKSAVAEEITAAIDAILAGETYTNVKIKKRNQSKTFIALTRRENEIVSLVKQSLSNQQIAKMLKLSNRTVENHLQSIYEKTGVASREKLISL

SEQ ID NO: 71237 - DNA, 801 bp, Unknown
  Obtained from environmental sample
  misc_feature (1)..(801): n is a, c, g, or t
ttgcgtgggtctactttaggcggcggcgtaaggcacaggtgtaatatgctggaagttaaagatttatccgctggatacggcggcacagatgttatacgcaatatcaacttgaaggcggaaaggggagagagtctttgcatacttggtcctaacgggagcggaaaaagcactttgcttaaatcgatagcccgtattattgattatcgcgggtgcgtgttgatgaacggcgaagatatttccgctgtctcacgcaaagagttggcgaaaaaaatcgccttgcttagccaaagtacgcaggtgttttttccctacacggtttatgaaacggtatctttgggacgttacgcgtattcgcagggctttttgaaaaatctttccgccgaagacagggaagttatagaagacatattaaaaaaactcgacatttggaacaacaaagactgcatgatagacgaattgagcggcggagaattgcagagagttttccttgcgcgaactttagcgcaaagtcccgatttgattttactcgatgagccgagcaatcacctagacttaaaacatcaaattgaactgcttaaatttttaaaagcgtgggttaaggaaaacaacaagactctaatcagcgtttttcatgatcttaacttggctcgtctcttcggcgacacggcggttgttttgaacaacggaactttagccgcaagcggacaaattgaagacgttttgaacggcggtattttgaacgatgtttacggcatcgacattcgaggctttatgcgtgaagcgctggaaaagtggcagtga

SEQ ID NO: 71238 - protein, 266 aa, Unknown
  Obtained from environmental sample
  DOMAIN (42)...(229): ABC transporter
  misc_feature (1)..(266): Xaa is any amino acid
MRGSTLGGGVRHRCNMLEVKDLSAGYGGTDVIRNINLKAERGESLCILGPNGSGKSTLLKSIARIIDYRGCVLMNGEDISAVSRKELAKKIALLSQSTQVFFPYTVYETVSLGRYAYSQGFLKNLSAEDREVIEDILKKLDIWNNKDCMIDELSGGELQRVFLARTLAQSPDLILLDEPSNHLDLKHQIELLKFLKAWVKENNKTLISVFHDLNLARLFGDTAVVLNNGTLAASGQIEDVLNGGILNDVYGIDIRGFMREALEKWQ

SEQ ID NO: 71239 - DNA, 1029 bp, Unknown
  Obtained from environmental sample
  misc_feature (1)..(1029): n is a, c, g, or t
atgagtaacagaaatcgcattatcatcggcgcagttgtctctcttttcataattgccgccgccgtctctttgggcagttcagggataggcttgcgcgatactgttttaatcatcttgcataaaattttccgtctgcggcttgcgcaggatattgacccaaaaaatgtttcaatcgtgtggttgttgcggcttccccgtgttttgctggcgttccttgtcggcggtggacttgcggtaagcggcgcggtttgtcagtcagtattgcgcaatccgcttgcgtccccatacattttgggcgtctcgtccggtgcgtctttgggagcgggaataatcatcatcagcggaattgcgattcccatgttgggcggtttcactctgccgctgacaggttttgtctttgggcttgcggcagtcttttttgtcgccgctttttcttcacgcatagaccgctcgatgtctaataacacaataattctgtgcggtatggttctttcgctttttttaagcgcggcgcttactatgcttagcgcggtattttccgacgaccttcggcgtatcgccctgtggcaaatgggaagtttcgccatgcgagggtggtcatcgatatggatgctgcttccgtttttggtcgtcggaatagttggggttttctttttcacaaaggaaatggacattttaagtttcggcgacgaacaggcaaaatcttcgggagtggagacaggagcggtgcggaaaaaactgctcgctctctgcgccgtgctggcagggtccgccgtcgctctcagcggagttatcggttttgtagaccttattgcccctcatgcggcgcgccgaatctgcgggtctaatcacagacatttaatcccaatgtcgtttgttctcggcggctctttgcttgttttaaccgatctgctggcaagaacagtcgtctcgccgtcggagcttcccgtcggagcgattaccgccctaatcggcgcgccgttttttgcgtgggtctactttaggcggcggcgtaaggcacaggtgtaa

SEQ ID NO: 71240 - protein, 342 aa, Unknown
  Obtained from environmental sample
  SIGNAL (1)...(25)
  DOMAIN (87)...(336): ABC 3 transport family
  misc_feature (1)..(342): Xaa is any amino acid
MSNRNRIIIGAVVSLFIIAAAVSLGSSGIGLRDTVLIILHKIFRLRLAQDIDPKNVSIVWLLRLPRVLLAFLVGGGLAVSGAVCQSVLRNPLASPYILGVSSGASLGAGIIIISGIAIPMLGGFTLPLTGFVFGLAAVFFVAAFSSRIDRSMSNNTIILCGMVLSLFLSAALTMLSAVFSDDLRRIALWQMGSFAMRGWSSIWMLLPFLVVGIVGVFFFTKEMDILSFGDEQAKSSGVETGAVRKKLLALCAVLAGSAVALSGVIGFVDLIAPHAARRICGSNHRHLIPMSFVLGGSLLVLTDLLARTVVSPSELPVGAITALIGAPFFAWVYFRRRRKAQV

SEQ ID NO: 71241 - DNA, 966 bp, Unknown
  Obtained from environmental sample
  misc_feature (1)..(966): n is a, c, g, or t
ttgtctctttattttttttaccacgaaccacacgaaccaaagcgaacggcaacaagataccggacgataagttcgtggttttcgtgtggttcgtggttaatattcttaattttatttttaggttgcaatgccggtaacgggcgagaaataactgaccgcacagggaaaacagtaacaataaaaaatcaaattaaccgtatcgtgtccactgcgccgtcgaatacggaaattattaccgatctgggacaggcgcataaacttgtcgctatcgaccgccattcggcgaatgtcgcggggatacccgaaggactgatgcagctggattttttctaccctgacgcagaggcgattatcaaacttgagcccgatataattatcgccagcggacataatccaacgggaacgggagaagacccgttcaagcttttgcgcaaggtgggaatacctgtggtgtatatttctatgagcgcaagcattgatgaaatttacaatgatattgcgtttatagcggatattttgcgtgtgcagaaagagggagaaaaacttataaattcgatgagggcgcaaattgacgagattgcgaaaacggcggttaacgcggaaaacaagccaaccgtttattttgaaatttccgccgcgccggatatgatgacttttggaaagggcagttacattaacgatatgattttggttatcgggacgaaaaatgtttttgggaacgagaattggcttgtaacgccgggcgcggaagcggttatcagccgtaaccccgatgtgatttttacaaatgtggattatattgatgatccaatagcggaaataaaaagccgtccgggttttaaccacatcaacgcagtaattaataaccgtatttatcaaattgataccgattcatcggtgcgcccttcaaaccgtattattttggctttgcggcaaatgtcgcaagcggtatacggcggacactaa

SEQ ID NO: 71242 - protein, 321 aa, Unknown
  Obtained from environmental sample
  DOMAIN (64)...(298): Periplasmic binding protein
  misc_feature (1)..(321): Xaa is any amino acid
MSLYFFYHEPHEPKRTATRYRTISSWFSCGSWLIFLILFLGCNAGNGREITDRTGKTVTIKNQINRIVSTAPSNTEIITDLGQAHKLVAIDRHSANVAGIPEGLMQLDFFYPDAEAIIKLEPDIIIASGHNPTGTGEDPFKLLRKVGIPVVYISMSASIDEIYNDIAFIADILRVQKEGEKLINSMRAQIDEIAKTAVNAENKPTVYFEISAAPDMMTFGKGSYINDMILVIGTKNVFGNENWLVTPGAEAVISRNPDVIFTNVDYIDDPIAEIKSRPGFNHINAVINNRIYQIDTDSSVRPSNRIILALRQMSQAVYGGH

SEQ ID NO: 71243 - DNA, 618 bp, Unknown
  Obtained from environmental sample
  misc_feature (1)..(618): n is a, c, g, or t
atgcctatcagatttttgatgtatgttgcaaaactctatcaggaaataacagagccggaagacaagtttaaaagaaaactggagaaaatcccaaagcctgagtttatcgtactttacaacggcgaagacaagtatcctgattataaggaattaaggctttccgatgcttttataaaaaccgacataaagattgatgtaccgctggagttggtagtgcaggtatataacataaacaaagggcggaatcaggatatattgagcaaaagcaggacgcttgaaaattacagccgatttatagacaagatacgggagtaccagaaagagtatcaatggaagtataaagagaagaaggaaatacttgataaaccgttcaagtctgcgataaactattgtataaagaataatattctaaaggactttttgaagaaacatagttcggaggtattgaatatgctgtatggcgagtatgatcctgaagtggaaatgagggttgtccgtgaagaagccattgaagaaactcgtgaagaagaacgtcagtatttccttgaaatgataaataagggtttgacaatagaggaaataaaagagcgtcttaaacaggaagaaaggactttttga

SEQ ID NO: 71244 - protein, 205 aa, Unknown
  Obtained from environmental sample
  misc_feature (1)..(205): Xaa is any amino acid
MPIRFLMYVAKLYQEITEPEDKFKRKLEKIPKPEFIVLYNGEDKYPDYKELRLSDAFIKTDIKIDVPLELVVQVYNINKGRNQDILSKSRTLENYSRFIDKIREYQKEYQWKYKEKKEILDKPFKSAINYCIKNNILKDFLKKHSSEVLNMLYGEYDPEVEMRVVREEAIEETREEERQYFLEMINKGLTIEEIKERLKQEERTF

SEQ ID NO: 71245 - DNA, 651 bp, Unknown
  Obtained from environmental sample
  misc_feature (1)..(651): n is a, c, g, or t
atgaaaatggacaagaaagtttttgataaattgaaagaaactaaatatggcaaggtaaaattgagcaaattagctagttgggctatttgggatagtgaagaaattaaaaatctgaaatacaataatccgaaatatatcgaaaagaatattgaaaaattgaaaagtaatattgtttttgtcggtttaaattttagtaataaaatatcaccttggcaagattggcaaaattttcattgtatcaaaaggttacatgaacttttatcatgcaaggaattaatgggcgcatatatgactgatataataaaaaatcaccataattctgcctccggtaatttaatgaaaaatctcaaaaaagttgaaataaataaaaacatagattttttctttaaggaaatagaaatgttaaaaacaaaaaatatagaaatatatttatttggaggagccgtagaaagtttatttaagaaatatgtcaaagaagatgaaagatttaaagcattcatacaaaataaaacaataattaaatgccagaggatttaccattatgcaatgaggggcagaaattatgttgaaaaggtgcgtatacagcttggtttattacaaaaaggattaaatgttcgtaaatatcccgcattatgggacggtaacctgtag

SEQ ID NO: 71246 - protein, 216 aa, Unknown
  Obtained from environmental sample
  misc_feature (1)..(216): Xaa is any amino acid
MKMDKKVFDKLKETKYGKVKLSKLASWAIWDSEEIKNLKYNNPKYIEKNIEKLKSNIVFVGLNFSNKISPWQDWQNFHCIKRLHELLSCKELMGAYMTDIIKNHHNSASGNLMKNLKKVEINKNIDFFFKEIEMLKTKNIEIYLFGGAVESLFKKYVKEDERFKAFIQNKTIIKCQRIYHYAMRGRNYVEKVRIQLGLLQKGLNVRKYPALWDGNL

SEQ ID NO: 71247 - DNA, 1566 bp, Unknown
  Obtained from environmental sample
  misc_feature (1)..(1566): n is a, c, g, or t
ttgaatttaaaaaaattattagtatttttaatcgtttttaccgcttgcttttcggtttttcctcaagaaaaaaatgatgaggaagaggaagaagtaattgtccttgatgaaatattacagaaagacatttacacagaagagtcaatctttataataaattcttttaattacaatgttaaaggaataactcttccttttgtattaaacacaaaaacagaattaaaaaaagacgaagaaataataggaaaaacacattttgccaaatttataaaagataaaaaacagcttctaataaatgaaagggtattaaaagacgatgtcagaattgaatacacaataggcgaattaacgcaagaaggcaaatatcccgtagatttggaaatatacgttgaggatacatttaatataatcgcccttccgtaccccaaatatgattcaaataacggtctttcagttacaattaaagctcgtgattacaattttcttggttcaatggagccatttagagtagacattggttacaaacatgatcaggaaggacgtgatactttttcattaatgctggattcaggattaccattccaagcttttggtcttaactgggattttgattttgacaactattttgattatcgaccagaattatcagagccgttttattttaaaaacaaaacggcattatccgttgatattcccataaagcgtacaacgtttaacataggatttgcggaatcattttattggaacgaagaaaacaccgattccaacaaaccaactttaggagatgtccaggaagggctttatatgtcaagtaaccccagtatttcatggaaaatacctacgggtcttgaaataggcgattacggagaattaacttacagtccaagtgtaagcgctgttttttatcatgaaatttctccctgggagctttcgtataacagaataggaccgattttatattttagtcactctctttattttggccgcgtagactggataggtaattttcgccgcggtatatctgtcagcttaggtaattcgtacagctatgatttttattataaatcgcaagactggaatccgtgggtttataattacagagtcatagcaagaggacattatatttttgttgaagatctttttgggatctccgcccgtttgatgtaccgccactggataaaatcgtatgatgaatacgcgggagacgtgttacgcggcattactgacaaagatgtaatcgctgaatatatagtgtcatttaacattgattttgacgtaagagcggcaagaataagaccctatgagtggtttcccgattcaaagcttatgcgcatattagggtttgacgttcatttaaatcctatttttgacatggcatggtataaagatccgcagcaagacgcgtcttttgattatgaacattttctttttggagccggattcgaaatgatcatttatcctcatagatttcgcagtatgttctttagaatatcagcaggttgggattttacagatactacacaaacaaaaccggaattatttctgggtatggaactattttattaa

SEQ ID NO: 71248 - protein, 521 aa, Unknown
  Obtained from environmental sample
  SIGNAL (1)...(24)
  misc_feature (1)..(521): Xaa is any amino acid
MNLKKLLVFLIVFTACFSVFPQEKNDEEEEEVIVLDEILQKDIYTEESIFIINSFNYNVKGITLPFVLNTKTELKKDEEIIGKTHFAKFIKDKKQLLINERVLKDDVRIEYTIGELTQEGKYPVDLEIYVEDTFNIIALPYPKYDSNNGLSVTIKARDYNFLGSMEPFRVDIGYKHDQEGRDTFSLMLDSGLPFQAFGLNWDFDFDNYFDYRPELSEPFYFKNKTALSVDIPIKRTTFNIGFAESFYWNEENTDSNKPTLGDVQEGLYMSSNPSISWKIPTGLEIGDYGELTYSPSVSAVFYHEISPWELSYNRIGPILYFSHSLYFGRVDWIGNFRRGISVSLGNSYSYDFYYKSQDWNPWVYNYRVIARGHYIFVEDLFGISARLMYRHWIKSYDEYAGDVLRGITDKDVIAEYIVSFNIDFDVRAARIRPYEWFPDSKLMRILGFDVHLNPIFDMAWYKDPQQDASFDYEHFLFGAGFEMIIYPHRFRSMFFRISAGWDFTDTTQTKPELFLGMELFY

SEQ ID NO: 71249 - DNA, 1182 bp, Unknown
  Obtained from environmental sample
  misc_feature (1)..(1182): n is a, c, g, or t
ttgggtaaagtaaacataaaaaacagtcaaacaggcgcttttttctcttattttttttccggtttttccggaaaggttaatcatttgcaatttacttttaacgaatatcaaacattcatagaaataagcagggaaattcccgctattaaaaacatttctcttcaacttggtcttcaatccgacaatccctccttaaaacctttaatcatagccgacgaaaacaccgcctatatcgccgccaaaataacagacggcgcggactacccttgcgtttatcttaaaagcggcgaagaaaataaaaactggcagtccgtagaaacaatactccgcgccgccaacaaagccggattaggcagagacggagtttttatcgccgtaggcggcggagtcatcggcgacttggcaggttttgccgcgtcaatttacatgcgcggctgtaaatttgtacttgtatccactaccttgctcggcatggtagacgcttcggtaggcggcaaaaccggttttgatcttttaggtataaagaacctgataggtagtttttatcccgcgcagagtgtatacattccgttaaacgctctttccacactgcctcaggcggaaattaaaagcggcatggcggaacttataaaaacagccgtcctttgcggcgatgattttcttgaacagttaacgctcttagcggaaaattttaacgattttaaaaaagttttggaatacggctcattacaaaaatgcgtggaaaaagcggttaattacaaaggcggcatagtaagcgaggactttcgcgagtccggaaagcgaatgctgttaaatcttgggcatactttcgggcatgcccttgaaagcgcggcgggattggggaatattactcacggggaagccgtcgcatggggcattgtccgcgcctgcgaacttggaacagcgttaaaaattacgccgcgcgaaagagcggaaaaaattaaaaagctgattttatcattcgggtatgaatgttcctgcccacaccccgccgcgggagacaaaaaaactctgttaaacgcaatgaagagcgataaaaagaaaaaaagcggaaacttaacgtttataattccggatgaacaaagcgcgcgcgcagtaattcttaaaacggaagagactcaaattttagaaaaaatactacatggcggatttaacatttga

SEQ ID NO: 71250 - protein, 393 aa, Unknown
  Obtained from environmental sample
  DOMAIN (54)...(356): 3-dehydroquinate synthase
  misc_feature (1)..(393): Xaa is any amino acid
MGKVNIKNSQTGAFFSYFFSGFSGKVNHLQFTFNEYQTFIEISREIPAIKNISLQLGLQSDNPSLKPLIIADENTAYIAAKITDGADYPCVYLKSGEENKNWQSVETILRAANKAGLGRDGVFIAVGGGVIGDLAGFAASIYMRGCKFVLVSTTLLGMVDASVGGKTGFDLLGIKNLIGSFYPAQSVYIPLNALSTLPQAEIKSGMAELIKTAVLCGDDFLEQLTLLAENFNDFKKVLEYGSLQKCVEKAVNYKGGIVSEDFRESGKRMLLNLGHTFGHALESAAGLGNITHGEAVAWGIVRACELGTALKITPRERAEKIKKLILSFGYECSCPHPAAGDKKTLLNAMKSDKKKKSGNLTFIIPDEQSARAVILKTEETQILEKILHGGFNI

SEQ ID NO: 71251 - DNA, 834 bp, Unknown
  Obtained from environmental sample
  misc_feature (1)..(834): n is a, c, g, or t
atgaaagcgccacttaatcaggttattatcccgacctcttttcaggagttgtttgcggcatggaaccgttttcccgacgcggttttatttgccggaggcactaacattatcagcaaacaggatagaaatatactgtaccttccccctgtatttctctcccttgataaaattgaggaactgcaaaaaataacaagaacggaacagtaccttgaaataggctctatggtaaaactaaacagactgataaaactcggtaaaatagtgcctgaagtcctatgcttatgcttaaaaaaaatcgccggcgttcaattaagaaacatagcgacaatcggagggaatatatgcggcgcttcaaactggcatgatttatccgctccccttaccgcccttgacgctcaatatgaattccgaagcgcgtctaacgctactcggtgggtttccgccgcgcgtttccattcggaagaaaatacaacaatggaaaaacaggaattacttacaagaataaggcttccgcttcatcaatgggattacacggtatacaaaaaattccatagcgagaattattttaacagtaattcgcttgtttttttggctataacgcaaaaaaatatcctgtctgatataagagtgatttataaagagaacgcaatttatcgaaataagaacggcgaggacattctaaaagggaaatatttgccccttaaccgaaaaacatcccatgattttgttgtaagctggcaggaataccttgccgggaagccggaaatagacgaattttcaaaatattccctcttaaacagcatagaagagcacgtttttaacctatccgagtaa

SEQ ID NO: 71252 - protein, 277 aa, Unknown
  Obtained from environmental sample
  DOMAIN (4)...(173): FAD binding domain in molybdopterin dehydrogenase
  misc_feature (1)..(277): Xaa is any amino acid
MKAPLNQVIIPTSFQELFAAWNRFPDAVLFAGGTNIISKQDRNILYLPPVFLSLDKIEELQKITRTEQYLEIGSMVKLNRLIKLGKIVPEVLCLCLKKIAGVQLRNIATIGGNICGASNWHDLSAPLTALDAQYEFRSASNATRWVSAARFHSEENTTMEKQELLTRIRLPLHQWDYTVYKKFHSENYFNSNSLVFLAITQKNILSDIRVIYKENAIYRNKNGEDILKGKYLPLNRKTSHDFVVSWQEYLAGKPEIDEFSKYSLLNSIEEHVFNLSE

SEQ ID NO: 71253 - DNA, 801 bp, Unknown
  Obtained from environmental sample
  misc_feature (1)..(801): n is a, c, g, or t
ttgacaaaagaagggatactggagataaaaccaagcataccaagctcgaaggattatacaagaatttgggcgaaggtcgtcaaggaaacaatgtccatagaaccggatatggttcgtattatcgcttccaacgcgcccgattgcggtccntcatgcgcgtcaagaaatatnaccgtcgttacaaaacttgtagaaaaatgttgtcttgcaatccgtaaacagcgcttccacgacccgcttcccattacagtccgccgctcaataaaaccccaatacggaactctttggggcggacgatttaccccgccggaaggaaaaaatatcgacataaacagtttttccaaattagggcttgcctgcgccgtcgtcgaggtctccttagaccttattgagtgtatccctgttatacgcggcgtctggcttggaattgacggcggaaaaatcatctcggtaaacagggcgaaaagaagccttacccgcgcggcggttcaagcgttgggttgggcgtatacggaacatattaattatatcgacggcgttattccgacaaaccaatacaataactttacgattttttctcccgcggaaattccgcccattcatattgatttcttttccgaagatttaaccgagcctaaggggataaacgaactgccctttacatgcatacctgccgcgtttttgcaggcggtttcacaggcaatggatcacggttttaaaacaataccgttaaaaagaaaagacatctgggaaattttacgtttaagaaatattgatgccgcagcgcagggggcgaaatga

SEQ ID NO: 71254 - protein, 266 aa, Unknown
  Obtained from environmental sample
  misc_feature (1)..(266): Xaa is any amino acid
MTKEGILEIKPSIPSSKDYTRIWAKVVKETMSIEPDMVRIIASNAPDCGPSCASRNXTVVTKLVEKCCLAIRKQRFHDPLPITVRRSIKPQYGTLWGGRFTPPEGKNIDINSFSKLGLACAVVEVSLDLIECIPVIRGVWLGIDGGKIISVNRAKRSLTRAAVQALGWAYTEHINYIDGVIPTNQYNNFTIFSPAEIPPIHIDFFSEDLTEPKGINELPFTCIPAAFLQAVSQAMDHGFKTIPLKRKDIWEILRLRNIDAAAQGAK

SEQ ID NO: 71255 - DNA, 1272 bp, Unknown
  Obtained from environmental sample
  misc_feature (1)..(1272): n is a, c, g, or t
atgaacacaaaaaacgcaaggacaagaagcacaaaggcaaaaagctcgaaagccaaaggcgcgcgggcggcaaaaccgagcaaaccgggctacttcggccgtttcggcggcactttcgcccccgagacccttatgccggcccttgccgaggtgcgggaggcctacgaccgcttccgcgacgacgagcggtggcaggccgagtacgggcggctgctctccacctactgcgggcgggccacgccgctatacgaggcggtgaacctcggggagcggctcggcgggcggacgcgggttttcctcaaacgcgaggacctgaaccacacgggggcgcacaagatcaccaacgcgctcggacaggctctgctggcgcggttcatgggcaaggagcggctgatcgcggagaccggggcgggtcagcacggcgtggccacggccaccgcggcggcgcttttggggatggagtgcgacatcttcatggggaccgtggacatgcagaggcagctgccgaacgtctaccggatgaacctgctcggcgcccgcgtggtgcctgtggacagcggcgggcggacgctcaaggacgcggtcaacgaggctatgcgcgattggacgcggacggtcaggaatacgcactacgccttcggatcggcgcttgggccgcacccgtttcccaccatcgttcgggatttccaatcggtcatcggccgcgaatgccgcgaacagataaaggcggcggcggggcggctgcccgacgaggtcgtagcctgcgtcggcggcgggtcgaacgccatcgggattttcagcgcgtttattaaggataaagaagtgaagctcacgggcgtggaggcgggaggccgcggacttaggggagcgcaacacgcggtgaggcttacgccgtcgccgtattcaaggttaggaatactgcacgggtcgtattcatacgtcttgcaggacaaggacgggcagatcgcggacacgcactcggtctcggcggggctggattacagcggcgtggggccggagcacgcctacctctttgagagcggacgcgccggctacacctacgccacggacgaggaggcggtgggggcgttcagactgctctgcgaagcggagggcatcattccggcgctagagtcgtcgcacgcggtcgcctacgcggtgaagcgcgtgcccaagatggccgccggctccgtagtcgtggtgaacctgtcgggacgcggcgataaggatatggattctgtcgcgaaatttttggaggcgcggaaaaaatga

SEQ ID NO: 71256 - protein, 423 aa, Unknown
  Obtained from environmental sample
  DOMAIN (73)...(406): Pyridoxal-phosphate dependent enzyme
  misc_feature (1)..(423): Xaa is any amino acid
MNTKNARTRSTKAKSSKAKGARAAKPSKPGYFGRFGGTFAPETLMPALAEVREAYDRFRDDERWQAEYGRLLSTYCGRATPLYEAVNLGERLGGRTRVFLKREDLNHTGAHKITNALGQALLARFMGKERLIAETGAGQHGVATATAAALLGMECDIFMGTVDMQRQLPNVYRMNLLGARVVPVDSGGRTLKDAVNEAMRDWTRTVRNTHYAFGSALGPHPFPTIVRDFQSVIGRECREQIKAAAGRLPDEVVACVGGGSNAIGIFSAFIKDKEVKLTGVEAGGRGLRGAQHAVRLTPSPYSRLGILHGSYSYVLQDKDGQIADTHSVSAGLDYSGVGPEHAYLFESGRAGYTYATDEEAVGAFRLLCEAEGIIPALESSHAVAYAVKRVPKMAAGSVVVVNLSGRGDKDMDSVAKFLEARKK

SEQ ID NO: 71257 - DNA, 624 bp, Unknown
  Obtained from environmental sample
  misc_feature (1)..(624): n is a, c, g, or t
gtggcaggccgagtacgggcggctgctctccacctactgcgggcgggccacgccgctatacgaggcggtgaacctcggggagcggctcggcgggcggacgcgggttttcctcaaacgcgaggacctgaaccacacgggggcgcacaagatcaccaacgcgctcggacaggctctgctggcgcggttcatgggcaaggagcggctgatcgcggagaccggggcgggtcagcacggcgtggccacggccaccgcggcggcgcttttggggatggagtgcgacatcttcatggggaccgtggacatgcagaggcagctgccgaacgtctaccggatgaacctgctcggcgcccgcgtggtgcctgtggacagcggcgggcggacgctcaaggacgcggtcaacgaggctatgcgcgattggacgcggacggtcaggaatacgcactacgccttcggatcggcgcttgggccgcacccgtttcccaccatcgttcgggatttccaatcggtcatcggccgcgaatgccgcgaacagataaaggcggcggcggggcggctgcccgacgaggtcgtagcctgcgtcggcggcgggtcgaacgccatcgggattttcagcgcgtttattaa

SEQ ID NO: 71258 - protein, 207 aa, Unknown
  Obtained from environmental sample
  misc_feature (1)..(207): Xaa is any amino acid
MAGRVRAAALHLLRAGHAAIRGGEPRGAARRADAGFPQTRGPEPHGGAQDHQRARTGSAGAVHGQGAADRGDRGGSARRGHGHRGGAFGDGVRHLHGDRGHAEAAAERLPDEPARRPRGACGQRRADAQGRGQRGYARLDADGQEYALRLRIGAWAAPVSHHRSGFPIGHRPRMPRTDKGGGGAAARRGRSLRRRRVERHRDFQRVY

SEQ ID NO: 71259 - DNA, 807 bp, Unknown
  Obtained from environmental sample
  misc_feature (1)..(807): n is a, c, g, or t
atgaacagatacgaagaggcgtttaaaaaagcgaaagcgcgccgcgaatcggcgctgataccgtttgccgtggccggcgatccggaaccggagatgtttttggagataatcaaggcctatgtaaacggcggggcggatgtgcttgaaatcggatacccgttctccgatccggtggccgacggaccggtgaaccagcgggcgtcgcaacgggccataagcgccggactcaaccactcgctctttttccggcttataaaggagatccgctcgttcaccgacataccgataggtctgttgacgtacgcgaatacgatcaaccacctaagcgcggagactttctgcaaaaaagcggcgcaagccggaatagatagcatcctgacggccgatatgccgccggaggaatccgttgaccttgacgtacagatgcgcaaacacggtataggccgcgtgtacatagtgagcgaattaacgcccgacgagaggatgcgttacataagcgaccgcgtggactctttcgtctacgtggtgagccgtccgggagtcacgggggcggatacggcgctaagttcatccgtaaaggcgacgctcacccgtttgaaacgcgttacaaataaaccggcggccgtgggctttgggatcgcgacgccaaaacacgtacgcgaagcgacgggggccggagcgcatggcgtgatagttggcagcgcgttagtcaacatgattgaggacgccgtcaacaaaggcgtgagcccggcgcgggcgctcaaaaagagggtcggcgaactaaaggcggcgacccgccatgcctga

SEQ ID NO: 71260 - protein, 268 aa, Unknown
  Obtained from environmental sample
  DOMAIN (8)...(266): Tryptophan synthase alpha chain
  misc_feature (1)..(268): Xaa is any amino acid
MNRYEEAFKKAKARRESALIPFAVAGDPEPEMFLEIIKAYVNGGADVLEIGYPFSDPVADGPVNQRASQRAISAGLNHSLFFRLIKEIRSFTDIPIGLLTYANTINHLSAETFCKKAAQAGIDSILTADMPPEESVDLDVQMRKHGIGRVYIVSELTPDERMRYISDRVDSFVYVVSRPGVTGADTALSSSVKATLTRLKRVTNKPAAVGFGIATPKHVREATGAGAHGVIVGSALVNMIEDAVNKGVSPARALKKRVGELKAATRHA

SEQ ID NO: 71261 - DNA, 750 bp, Unknown
  Obtained from environmental sample
  misc_feature (1)..(750): n is a, c, g, or t
atgcctgaactcagcttagacagcatagcggcgcgtttagagagtttagaagaaacgatcatccaccgcctgatagaccgcgcccagtggcgcgtgaacgacacggcctacctgccgggcgcaagcggtttcccggtagcggaacagcgttctctttttgagttacgcctgcgcagccaagaggagatggacgcgagattcgggcgtttctgcgtgccggaggagagaccgttcagcaaagacttgcccaagccgctgcgaaccgtcaacctccccgacaccggcgtttacctgaaagactgcgacgtcgtaaacctgacggaaccgttattaagaagctacatgctgatcctgcctaagatctgccccgccggcgacgacggccaatacggttcaagcgtggagcacgacgtctacgccgtgcaagcgatagcgcggcgccttcactacggagcgatatacgtggcggagagcaagttcaggcaagaccccgagggttacaaaaaattggtgaaaacgcgtgaccgcgacggtttgatggagaagctgacgagaaaaaacgtggaaaagaaaattctggaacgtgtgaaggccaaagtcaaaagtctgcaggcaaaagtaaacaagtcgataaggaacaccgtgaggtatgaaccgattatcgtgtattacagggatcttctgatcccgcttaccaagcatggtgagattatctatttgtttaaccgagttgagaattataataattaa

SEQ ID NO: 71262 - protein, 249 aa, Unknown
  Obtained from environmental sample
  misc_feature (1)..(249): Xaa is any amino acid
MPELSLDSIAARLESLEETIIHRLIDRAQWRVNDTAYLPGASGFPVAEQRSLFELRLRSQEEMDARFGRFCVPEERPFSKDLPKPLRTVNLPDTGVYLKDCDVVNLTEPLLRSYMLILPKICPAGDDGQYGSSVEHDVYAVQAIARRLHYGAIYVAESKFRQDPEGYKKLVKTRDRDGLMEKLTRKNVEKKILERVKAKVKSLQAKVNKSIRNTVRYEPIIVYYRDLLIPLTKHGEIIYLFNRVENYNN

SEQ ID NO: 71263 - DNA, 876 bp, Unknown
  Obtained from environmental sample
  misc_feature (1)..(876): n is a, c, g, or t
atgcaagaacctaaaacaataaccatatacagcgtaggcctaataggcggctccatcggcgcggcattgaaagcgtccggcttcggcggacgtatagtcggtttatcgtcggaaaagggaatcaataccgccttaagccgcaactttatcgacgaaggccgtccgtattccgatttgtcaactatcgtcaagcaaacagatctactgatcctctgctcccctattctaacaataatcgatacgataaagactttgggcgggatggaactgccggacggtcttgtcatcaccgacataggcagtacgaaacgggcaatcgtcgaggccgctcgtaaatatctgccgccgcaagtaaaatttataggcggccaccccatggccggttccgagaggagcggcccggacgcgagcgataaagacttgttcttaaacgccgtgtatgtcttgacgccaaccgacggtgatgaggcaaacagcgccgccgttgattctctatcgacgtttctgcgcaaacacctgcgctgccgcacggtacttttcaatccggccacgcacgactcggtagtagccgcggtaagccacctgccgcacattttggcaagcgcgttggttttatgcgcaaacgagcgtgaaaagtcaatacccggcacgctgacgttggccgcgggcggctttagagacgtgacgagaatcgcttcggcgaagtatgatatctggcatgacattttttcaacaaacaaggaagcgattattccgttaatagactcatacatagatatattgaacgaattgaaaacgctcctatcaaacaacgcgttaaaagagcggtttgaggaagcgagggcaatcaaagaatcaatgttgatgctgacgtaa

SEQ ID NO: 71264 - protein, 291 aa, Unknown
  Obtained from environmental sample
  DOMAIN (9)...(284): Prephenate dehydrogenase
  misc_feature (1)..(291): Xaa is any amino acid
MQEPKTITIYSVGLIGGSIGAALKASGFGGRIVGLSSEKGINTALSRNFIDEGRPYSDLSTIVKQTDLLILCSPILTIIDTIKTLGGMELPDGLVITDIGSTKRAIVEAARKYLPPQVKFIGGHPMAGSERSGPDASDKDLFLNAVYVLTPTDGDEANSAAVDSLSTFLRKHLRCRTVLFNPATHDSVVAAVSHLPHILASALVLCANEREKSIPGTLTLAAGGFRDVTRIASAKYDIWHDIFSTNKEAIIPLIDSYIDILNELKTLLSNNALKERFEEARAIKESMLMLT

SEQ ID NO: 71265 - DNA, 1035 bp, Unknown
  Obtained from environmental sample
  misc_feature (1)..(1035): n is a, c, g, or t
atgctggatcaggcttacaaaggcttttctacggcaagaacttacaggcaggataactttgaggtaaattacgagttaggctcactggagtttgaaagaaaaaattacgagaaagcaattcagcttttacagcaggcgcgcattcaggaacctgagaatccagccgtcttacgcagtcttggtcactctcttttcagaataaaaaaacccaaagaagcgatgacttttatccgcaaggcgatagacattgccccggacgacaaagaatcgctttacactttggcggaatgttatcacgaagcgaatcagattgaacaagctctgcgcatttacaaccatctgcgcgccgacccggtaatgggacctacttgctgtctcagcgcgggaactattcatttggatacaagacagtatgagttggcaattcaggattttgaaatcggtttaagacacttggatattaaacctgatacttcagctgaattacgctacaaacttgcaacaacgctgattaaaacaaatgaaatcggcaaagcgattccccacctaaaacagcttcaacgcgaaaatccgtcatataaagacgttactgttctgttaggcaaatatatcgaattaaacgccaaccgcaatcttcaaacattcctgatgggttcatccgcggactttgtcgccctttgcagaaaaatcgttatgacctactacggcaaagcaaaagtaaaaatagtaaacatatccgttaacaaagccgaatgggcggatattcttgccgaggttgatacaataaaatggcaggatcttattatgttccgttttatcagaactcaaggttccataggcgaattgattgtaagagactttcactcacacttaaaagaagtaaaagccggcaagggaatttgcatcaccgtcggtcaatacacggaagaagccaaaagatacacggaagcgcgtcttatcgacttaattgaaaaagaaaaacttcaggcaatcctcaattcccttgacgcaaaaaccgccgcgttaaagaaatag

SEQ ID NO: 71266 - protein, 344 aa, Unknown
  Obtained from environmental sample
  DOMAIN (227)...(330): Restriction endonuclease
  misc_feature (1)..(344): Xaa is any amino acid
MLDQAYKGFSTARTYRQDNFEVNYELGSLEFERKNYEKAIQLLQQARIQEPENPAVLRSLGHSLFRIKKPKEAMTFIRKAIDIAPDDKESLYTLAECYHEANQIEQALRIYNHLRADPVMGPTCCLSAGTIHLDTRQYELAIQDFEIGLRHLDIKPDTSAELRYKLATTLIKTNEIGKAIPHLKQLQRENPSYKDVTVLLGKYIELNANRNLQTFLMGSSADFVALCRKIVMTYYGKAKVKIVNISVNKAEWADILAEVDTIKWQDLIMFRFIRTQGSIGELIVRDFHSHLKEVKAGKGICITVGQYTEEAKRYTEARLIDLIEKEKLQAILNSLDAKTAALKK

SEQ ID NO: 71267 - DNA, 1080 bp, Unknown
  Obtained from environmental sample
  misc_feature (1)..(1080): n is a, c, g, or t
ttggaggttgctatgaaaaatctttactttttactcgttcttgtttttgctctgtccggctgttcaaatactgaacccgggacaccccccgatgagccgggaatccttaccctgatgacgtggaatgtccacaacttgtgcgacggcgtagacgacggctatgaatacgatgaattcacgcagtcggctggctggtcgcaggaaaagtacatgggcaggattaatgccatatccgccgctatcggcgctttaaagccgcagccggatatccttatgctggaggaaattgagtccaatgtgattcttgaagaccttgcgcgcgcattgccaaaagattacgcctgtagtcattttgccaataatccgggcgcggcaatgggaatcggcatattaagccgtttgccgttgacggatacaataactcattccataagcattgacggagagactacgccgcgtcctgttcttgaggctagggttaaaaccgaaggaggggatatcattttatttgtctgccattggaaatctaaactcggcgatgatgatgttactgaaagtatccgcaggtcttcagtcagggtgctccttcgccggatacgggaaattggtgaaagcgagcctgatatcggctttattattgcgggcgatttaaatgaaaactacgatgagtttttccggcggaaagcaagcgtaatctgcgcccttgttccagacgacgcgtattgcgtgaaattgtccaatgtaaatgtcgaggggcaaaaagacttttttgtaattacaggaaataaaccgccgctgtctgttaatttcccgcaggaaacaattactttgttttcaccgtggatgagcgatttacaaaacggatcgtatttttacaagcacaactgggagacaatcgatcattttttaatttccggtcatttttttgataattcaggatgggagtatgaaaaagtaatgataggaaattttgaaccctttgccggcgcaagcgggactccaactccttacaacacaaagacaggcgtgggactaagcgatcattttccgttgatattgacgattaaactatttctttaa

SEQ ID NO: 71268 - protein, 359 aa, Unknown
  Obtained from environmental sample
  SIGNAL (1)...(24)
  DOMAIN (36)...(355): Endonuclease/Exonuclease/phosphatase family
  misc_feature (1)..(359): Xaa is any amino acid
MEVAMKNLYFLLVLVFALSGCSNTEPGTPPDEPGILTLMTWNVHNLCDGVDDGYEYDEFTQSAGWSQEKYMGRINAISAAIGALKPQPDILMLEEIESNVILEDLARALPKDYACSHFANNPGAAMGIGILSRLPLTDTITHSISIDGETTPRPVLEARVKTEGGDIILFVCHWKSKLGDDDVTESIRRSSVRVLLRRIREIGESEPDIGFIIAGDLNENYDEFFRRKASVICALVPDDAYCVKLSNVNVEGQKDFFVITGNKPPLSVNFPQETITLFSPWMSDLQNGSYFYKHNWETIDHFLISGHFFDNSGWEYEKVMIGNFEPFAGASGTPTPYNTKTGVGLSDHFPLILTIKLFL

SEQ ID NO: 71269 - DNA, 1287 bp, Unknown
  Obtained from environmental sample
  misc_feature (1)..(1287): n is a, c, g, or t
ttgactgtgggcggttcggaaacattaaccgcaacatttgcgccgactaacgcgacaaacaaaaatgttacatggacatcgagcgatacaacaaaggcaaccgttgcaaatggcacagttaccgctgttgccgcaggtacaacgacaattaccgttaaaacaacagacggaaacaaaaccgcaacttgcgcagttaccgtaacaggaggaggttcaaccgtatcagttacaggcgtaacccttaacaaaaccagtctttcaatggctttaggcagttcggaaacattaactgtaaatgttgcgccggataacgcgacaaacaaaaatgtaacatggacatcgagcaatacaacaaaggcaaccgttgcaaatggcacagttaccgctgttgccgcaggtacaacgacaattaccgttaaaacaacagacggaaacaaaaccgcaacttgcgcagttaccgtaattggcggtgaaactattaccagtcctacaggtattataatggtttcgatacctgccggaacatttataatgggcagtcccacaagtgaaccttatcgaatggacgatgaaacacaacattcggtaacgttgagtgctttttctatgagtaaatatcaggtaacgcaagagcagtatcaggcggtcatgaaaacaacaaatcccagctattttggctctaagccgcaagcaggcgaaacacaaggcaaacgaccagtggagtttgtaagttggtatggcgctttggtattctgtaataagttgagtataaaggaaggattaactcctgcgtacagtattagcggtaaaaccaatcctgatgattggggaacagtgccaataggatccgatgcaatatgggatgctgtagtaatcgttgccggttctaacggttatcgtttgccgacagaggcgcagtgggagtatgcgtgcagagcgggtacaacaaccgcatataatacaggagatacgattagcgacaatacggggtggtataaaaataacagtgaggaaaagacacatgaagtgggaaaaaaacccgccaatgcatggagactgaatgacatgcatggaaatgtgtgtgaatggtgctgggattggtatgactcaaattattattctagtagcccgactaatgatccgatgggcgcgtcctcggggattagccgcgtgtggcgcggcgggagctatgacgattcagctgcgaacctgcgctccgcgtaccagcgtggcagcaacccgtacctcgtgagccgctatcgtggcttccggcttgtccgcccctag

SEQ ID NO: 71270 - protein, 428 aa, Unknown
  Obtained from environmental sample
  DOMAIN (1)...(65): Bacterial Ig-like domain (group 2)
  misc_feature (1)..(428): Xaa is any amino acid
MTVGGSETLTATFAPTNATNKNVTWTSSDTTKATVANGTVTAVAAGTTTITVKTTDGNKTATCAVTVTGGGSTVSVTGVTLNKTSLSMALGSSETLTVNVAPDNATNKNVTWTSSNTTKATVANGTVTAVAAGTTTITVKTTDGNKTATCAVTVIGGETITSPTGIIMVSIPAGTFIMGSPTSEPYRMDDETQHSVTLSAFSMSKYQVTQEQYQAVMKTTNPSYFGSKPQAGETQGKRPVEFVSWYGALVFCNKLSIKEGLTPAYSISGKTNPDDWGTVPIGSDAIWDAVVIVAGSNGYRLPTEAQWEYACRAGTTTAYNTGDTISDNTGWYKNNSEEKTHEVGKKPANAWRLNDMHGNVCEWCWDWYDSNYYSSSPTNDPMGASSGISRVWRGGSYDDSAANLRSAYQRGSNPYLVSRYRGFRLVRP

SEQ ID NO: 71271 - DNA, 594 bp, Unknown
  Obtained from environmental sample
  misc_feature (1)..(594): n is a, c, g, or t
gtgggactgcccattataaatgttccggcaggtatcgaaaccattataatacctgtaggactggtaatagtttcaccgccaattacggtaactgcgcaagttgcggttttgtttccgtctgttgttttaacggtaattgtcgttgtacctgcggcaacagcggtaactgtgccatttgcaacggttgcctttgttgtattgctcgatgtccatgttacatttttgtttgtcgcgttatccggcgcaacatttacagttaatgtttccgaactgcctaaagccattgaaagactggttttgttaagggttacgcctgtaactgatacggttgaacctcctcctgttacggtaactgcgcaagttgcggttttgtttccgtctgttgttttaacggtaattgtcgttgtacctgcggcaacagcggtaactgtgccatttgcaacggttgcctttgttgtatcgctcgatgtccatgtaacatttttgtttgtcgcgttagtcggcgcaaatgttgcggttaatgtttccgaaccgcccacagtcaatgaaagactggttttgtttagggatacgcctgtantagattcgcgataa

SEQ ID NO: 71272 - protein, 197 aa, Unknown
  Obtained from environmental sample
  misc_feature (1)..(197): Xaa is any amino acid
MGLPIINVPAGIETIIIPVGLVIVSPPITVTAQVAVLFPSVVLTVIVVVPAATAVTVPFATVAFVVLLDVHVTFLFVALSGATFTVNVSELPKAIERLVLLRVTPVTDTVEPPPVTVTAQVAVLFPSVVLTVIVVVPAATAVTVPFATVAFVVSLDVHVTFLFVALVGANVAVNVSEPPTVNERLVLFRDTPVXDSR

SEQ ID NO: 71273 - DNA, 807 bp, Unknown
  Obtained from environmental sample
  misc_feature (1)..(807): n is a, c, g, or t
ttggaagggcagtatgtctgtgcgcgattggcgaagattctgaatgacgggaaacaaaaacttaccggcattgtggacatttatcccgccgtaaacccgctgggtattgattccattacgcgcggattcccgatgttcgacctggacatgaaccgcatatttcccggctctccttcggggtcgcttgcggaagtagcggcatacgacattatgcgcgacatcgaaggcgcggatatgtgcatagacatacactcaagcaacatttttctgcgcgagataccgcaagtgcgtatcagcgaacaaaacgagtccgcgctgctgccttacgcgcttatgctcaatgtcgatctggtgtggatacacacgtcggctaccgttttggaatcgactctcgcgcactcgctcaatatgcgcggcgttaaaacgctggtagttgagatgggcgtcggaatgcgtatcacagagaacttctgcatacagcttgtgtacggaatactgaaccttctgcgcgaacttggaatgtggaaaggagcgggcggacaaacgcgggagccgcttgtctcaaaagatcacggcgtaggttttttaaattcggacgcgggcggaatatttattccgagcgccgcgcacggaagtcatgtaagctcaggagattatatcggtatggtcgtagacccgctcaccggcgcggtagtagaggaaacgcttgcgccctgcgacggcttgttgtttactctgcgggaatatccggttgtattcggcggttcgcttcttgcgcggattatggaggactccaaaaatggttaa

SEQ ID NO: 71274 - protein, 268 aa, Unknown
  Obtained from environmental sample
  DOMAIN (1)...(264): Succinylglutamate desuccinylase / Aspartoacylase family
  misc_feature (1)..(268): Xaa is any amino acid
MEGQYVCARLAKILNDGKQKLTGIVDIYPAVNPLGIDSITRGFPMFDLDMNRIFPGSPSGSLAEVAAYDIMRDIEGADMCIDIHSSNIFLREIPQVRISEQNESALLPYALMLNVDLVWIHTSATVLESTLAHSLNMRGVKTLVVEMGVGMRITENFCIQLVYGILNLLRELGMWKGAGGQTREPLVSKDHGVGFLNSDAGGIFIPSAAHGSHVSSGDYIGMVVDPLTGAVVEETLAPCDGLLFTLREYPVVFGGSLLARIMEDSKNG

SEQ ID NO: 71275 - DNA, 1038 bp, Unknown
  Obtained from environmental sample
  misc_feature (1)..(1038): n is a, c, g, or t
ttgcgccctgcgacggcttgttgtttactctgcgggaatatccggttgtattcggcggttcgcttcttgcgcggattatggaggactccaaaaatggttaaggacattatatattcgattaaatctccgtaccgtcagagtatggacgtaatagcgtacaccttcggttcaggcgaacgctcatgctgcgtggtgggcgcgttacgcggaaatgagattcaacaaatggcaatttgcgctcaattggtagacacgctcaaacgtctggaggcaaacgggcatgttgtctccggcaagagcataatgatcataccgtgcgcgaaccactattccatgaatatcggcaaacgtttttggacaatggacaacaccgacatcaaccgtatgtttcccggatacgatcaaggcgagacaacgcagcgaatcgcggacggattgtttaaattgatcaaggactacgtttacggcatacagatggcaagtttctaccgcgaaggcgagttcctgccgcacgtcaaagtgatggacaacgattgcagaaagagcgaaacctacgagtcgctgacggattttggtctgccctacggtttgattagaataccgcagccatacgacaccgcgacgctcaactataactggcagatttggggctgccaagcctattcactgttctctacatacacggagcacattggaaagcaatccacgcaaaccgccgtgaacgcggtactgcgtttccttgtcgccaaagggattatcaaatgggcgttggacggcggtatgcacacccgcatactaaatgaggatttgataaaagacgtccagacaagacgcggcggaatactgaaaaaatacgtcgcggtcggagacgaagtcgtcgagggtgatttgctctgcgagataatccatcccttagagggaaacacgataggacggatagagtcgccgacagacgggacggtatttttcgcttacaataaacagttggtaatggaacataccgacgtgtttaatatagtgccgttttccggtgcgtag

SEQ ID NO: 71276 - protein, 345 aa, Unknown
  Obtained from environmental sample
  DOMAIN (58)...(342): Succinylglutamate desuccinylase / Aspartoacylase family
  misc_feature (1)..(345): Xaa is any amino acid
MRPATACCLLCGNIRLYSAVRFLRGLWRTPKMVKDIIYSIKSPYRQSMDVIAYTFGSGERSCCVVGALRGNEIQQMAICAQLVDTLKRLEANGHVVSGKSIMIIPCANHYSMNIGKRFWTMDNTDINRMFPGYDQGETTQRIADGLFKLIKDYVYGIQMASFYREGEFLPHVKVMDNDCRKSETYESLTDFGLPYGLIRIPQPYDTATLNYNWQIWGCQAYSLFSTYTEHIGKQSTQTAVNAVLRFLVAKGIIKWALDGGMHTRILNEDLIKDVQTRRGGILKKYVAVGDEVVEGDLLCEIIHPLEGNTIGRIESPTDGTVFFAYNKQLVMEHTDVFNIVPFSGA

SEQ ID NO: 71277 - DNA, 999 bp, Unknown
  Obtained from environmental sample
  misc_feature (1)..(999): n is a, c, g, or t
atgagtaatactgaagactatctgaagcatattcaaaaattacttcgggatagccatgttccaaagcttcctgatgaatacgcggaaaatcctttaatagttcagattcatgaagaattaaaagctatccgtgaaattttacgcgcattttcatcaggagatttttctccttccattacagttcgaggtattattcctggttgtttaaaaaaccttcaggctaatcttcgccatttaatttggcaggttcaaatggtggaaaaaggagatttttctcaacaagtccgctttatgggtgaattttcagacgcatttaacagcatggttcgcatatttagcctaagcctttcaaaacaacaggaacatggagaaacccttgccgttataaatgataagctccgcaaagaagttgaacacatggaaacacttaaagaaagtaatgcccatttaaaatttctggcgagccatgatcctttaacgggcattcttaaccgcagggcatttattgaaatggtggaagttgaacttgccaatgcgtcatatttttgtgttccatgctgtcttgccatgatggacatagatcattttaagagttttaacgatacctatggacatctagccggagatgaagccttgcgtcatacggtcaagaccattgaggcaatgctgcgaaaaaaagatgttatgggacggtacggcggcgaggaatttatccttttcttttacgatactgatgaagaaacaggattaagagtagtggaacgtctacgcgcatacttatctgaatcgcctgtttctctggcaaaaggtcctgtagaaatccatgcgagttttggtcttgcggtagttgacaggaaaaagtccgttgaaaaagggtatgtgcagaacttgatccatgaagcggacacagccctttatgccgctaaactagcgggacgaaacagggttgtgcttttcaaccaggaaatggaatctaacaatgaagagaaagcatcataa

SEQ ID NO: 71278 - protein, 332 aa, Unknown
  Obtained from environmental sample
  DOMAIN (150)...(315): GGDEF domain
  misc_feature (1)..(332): Xaa is any amino acid
MSNTEDYLKHIQKLLRDSHVPKLPDEYAENPLIVQIHEELKAIREILRAFSSGDFSPSITVRGIIPGCLKNLQANLRHLIWQVQMVEKGDFSQQVRFMGEFSDAFNSMVRIFSLSLSKQQEHGETLAVINDKLRKEVEHMETLKESNAHLKFLASHDPLTGILNRRAFIEMVEVELANASYFCVPCCLAMMDIDHFKSFNDTYGHLAGDEALRHTVKTIEAMLRKKDVMGRYGGEEFILFFYDTDEETGLRVVERLRAYLSESPVSLAKGPVEIHASFGLAVVDRKKSVEKGYVQNLIHEADTALYAAKLAGRNRVVLFNQEMESNNEEKAS

SEQ ID NO: 71279 - DNA, 528 bp, Unknown
  Obtained from environmental sample
  misc_feature (1)..(528): n is a, c, g, or t
atgaataatcaacgaaaataccaatttgactgggacaatacggttggggctgatatgaaactggcgcgtcccagtcttggttccggtacaagggtggaagtataccggcttttccaatttactcttagagatatactggaacaacactatggcgctgaaattgctgataacctgtttcgtgaagcgggcgttatagcaggaaaggctttttttgaaaaatttttaagcgaaaccagggatgtatcaagtcttgccacaaaaattcaagattcctttaattcgtttggtattggaatattccgtgtagaaaacgccgcagaagacaattcacaatttgtttttaccgtggaagaagaccttgattgttccggtcttcccgatacttcagatgtcgtttgcgtatacgatgaaggatttattcagggaatactggaatcattcagcggaaaaggttttaatgtcaaagaaattgactgctggtgcaccggcgcacgtacctgccgctttgaagcaaaaaaggttccgtaa

SEQ ID NO: 71280 - protein, 175 aa, Unknown
  Obtained from environmental sample
  DOMAIN (111)...(173): V4R domain
  misc_feature (1)..(175): Xaa is any amino acid
MNNQRKYQFDWDNTVGADMKLARPSLGSGTRVEVYRLFQFTLRDILEQHYGAEIADNLFREAGVIAGKAFFEKFLSETRDVSSLATKIQDSFNSFGIGIFRVENAAEDNSQFVFTVEEDLDCSGLPDTSDVVCVYDEGFIQGILESFSGKGFNVKEIDCWCTGARTCRFEAKKVP

SEQ ID NO: 71281 - DNA, 1074 bp, Unknown
  Obtained from environmental sample
  misc_feature (1)..(1074): n is a, c, g, or t
ttgactgaagcttcggaaaacggaaaaacaggactcccgttggtcgcgcaggaaatacaggaaatagcgcatgaatccgagggactgctggaaataaattcagtaatgaataatatcgcaagccagaccaatttactttcgatgaacgcggcaattgaagcggcgcatgccggagagtcgggaaagggatttgccgtagtcgccgatgaaatccgtaaacttgccgaatcatccagcaaacaatcaaaaaccaccgcggcgatgctgaaaaaaataaaagcgtccatagacaacattaccaaatcctccggcgacgtattggcgcgttttgacgcaatagactcgagcgtaaaaacagtgtcgcaacatgagcaaaatattcttaacgcgatggaagaacaggaaacgggcggaaaacaaatactggaatcaatcagccgtttaagagatttaacatcatcggttaagaaagggtctgatagtatggaagaatcaggaaagactcttgtcaaggatacggacggattcataaagaccagtcaggaaactgtagaaggcatgaatgagatactgaaaggcattcatcagataaatgattcggtgagccgagtagacgaaatgagtcatgaaaacgataaaaactttgaatcattaaaacaggaaacgcaaaaatttaaagatactcttggcaatgaaaagccgaaaattctcatggtagatgacgacagtatccatcttgaaatggtgaaaacagcattacaggatgagtatgacatatctaccgccgaatcgggaaaagaagcgctgggattgttctatcagggactggttccgcaattaatattattggatttaataatgccgggtatggacggatggcatacatacagcagaataaaagcgataagcaatttgcacgatactccaatagcgtttttcacagcctcaaatgatccgaaagatataaaacatgcgcatgaaataggggcggttgattttatcaaaaaaccttatgatagagacgatctgttaaacagaacaggaaaaattattaaagaaaaaaaatgcgcatga

SEQ ID NO: 71282 - protein, 357 aa, Unknown
  Obtained from environmental sample
  DOMAIN (1)...(178): Methyl-accepting chemotaxis protein (MCP) signaling domain
  misc_feature (1)..(357): Xaa is any amino acid
MTEASENGKTGLPLVAQEIQEIAHESEGLLEINSVMNNIASQTNLLSMNAAIEAAHAGESGKGFAVVADEIRKLAESSSKQSKTTAAMLKKIKASIDNITKSSGDVLARFDAIDSSVKTVSQHEQNILNAMEEQETGGKQILESISRLRDLTSSVKKGSDSMEESGKTLVKDTDGFIKTSQETVEGMNEILKGIHQINDSVSRVDEMSHENDKNFESLKQETQKFKDTLGNEKPKILMVDDDSIHLEMVKTALQDEYDISTAESGKEALGLFYQGLVPQLILLDLIMPGMDGWHTYSRIKAISNLHDTPIAFFTASNDPKDIKHAHEIGAVDFIKKPYDRDDLLNRTGKIIKEKKCA

SEQ ID NO: 71283 - DNA, 582 bp, Unknown
  Obtained from environmental sample
  misc_feature (1)..(582): n is a, c, g, or t
atgaatccgtccgtatccttgacaagagtctttcctgattcttccatactatcagaccctttcttaaccgatgatgttaaatctcttaaacggctgattgattccagtatttgttttccgcccgtttcctgttcttccatcgcgttaagaatattttgctcatgttgcgacactgtttttacgctcgagtctattgcgtcaaaacgcgccaatacgtcgccggaggatttggtaatgttgtctatggacgcttttatttttttcagcatcgccgcggtggtttttgattgtttgctggatgattcggcaagtttacggatttcatcggcgactacggcaaatccctttcccgactctccggcatgcgccgcttcaattgccgcgttcatcgaaagtaaattggtctggcttgcgatattattcattactgaatttatttccagcagtccctcggattcatgcgctatttcctgtatttcctgcgcgaccaacgggagtcctgtttttccgttttccgaagcttcagtcaaagtgctgacatttttactgttttcaaccagcgtccnngtgttnccgaattaa

SEQ ID NO: 71284 - protein, 193 aa, Unknown
  Obtained from environmental sample
  misc_feature (1)..(193): Xaa is any amino acid
MNPSVSLTRVFPDSSILSDPFLTDDVKSLKRLIDSSICFPPVSCSSIALRIFCSCCDTVFTLESIASKRANTSPEDLVMLSMDAFIFFSIAAVVFDCLLDDSASLRISSATTANPFPDSPACAASIAAFIESKLVWLAILFITEFISSSPSDSCAISCISCATNGSPVFPFSEASVKVLTFLLFSTSVXVXPN

SEQ ID NO: 71285 - DNA, 489 bp, Unknown
  Obtained from environmental sample
  misc_feature (1)..(489): n is a, c, g, or t
atgcacggcggccaccaagagagcggtgcgcgggccggaaccgaaaacgtcccctacatagtcggtctgggccgagcctgcgaactggccgcggagcgcataaccgacgaaaacacaagagtacgggccctccgcgacaggttagaaaaggcgcttttggaaaaatgcgccggagcgaaactgaacggcaaccccgccgaacgcctcccgaacacgaccaatatcagtttcgagaacatagagggcgaggcgatcctcctgcacttggacgaggccgggatagccgccagctccggctcggcatgcacgacgggctccttggaaccctcccacgtgatgatggccatgggcataccgtacaactacgcccacagctcgatccgcttctctttcagcgtctacagtaccgatgaagaggtggacagggtgattgcggtgatgccggggattgtggagaagttgcgggggatgtcgccgtttgtggattag

SEQ ID NO: 71286 - protein, 162 aa, Unknown
  Obtained from environmental sample
  DOMAIN (1)...(143): Aminotransferase class-V
  misc_feature (1)..(162): Xaa is any amino acid
MHGGHQESGARAGTENVPYIVGLGRACELAAERITDENTRVRALRDRLEKALLEKCAGAKLNGNPAERLPNTTNISFENIEGEAILLHLDEAGIAASSGSACTTGSLEPSHVMMAMGIPYNYAHSSIRFSFSVYSTDEEVDRVIAVMPGIVEKLRGMSPFVD

SEQ ID NO: 71287 - DNA, 1506 bp, Unknown
  Obtained from environmental sample
  misc_feature (1)..(1506): n is a, c, g, or t
atgcgtaaaaagagtacgctgtcgttagtcggcgcggcggtcgcgcttgtttgcgcgtccgccgccgtcgcccagacgcccgttgagaggcatgggcagctctccgtctcaggcaaccggattgtcggcaagcacggcaatccggtgcagctgcggggaatgagcctctattggagcatgggtcccggcggcagggacttctacaacgctagcgccgtgcagtacctcgccgcgaactggaaggtgagcgtgataagggccgccatgggggtggagaccaacttttggaacgaggccaaccagcagggatacatctcaaatccaaccgccaacctcgcccgcgtgaaagccgtggtagacggcgccatagcggcaggcatctacgtcataatcgattggcactcccacgaagcggaaagctacacggcgcaggccaagtcgttcttcgaggagatggcgcgtacctacggcggtaaagccaacgtcatatacgaaatatacaacgaaccgatagggacggcttcgaccaccgcggccacgtggagcaccataaagacttacgccaacgcgatagtgccggccatcagggcgatagacggcgagaacctcatcatcataggcacgccccttagctgccaataccccaacttggccgccgccgacccggtcgccggcaagaatttggcctacaccgtgcacttctacgcggcggagccgggccaccaagcggacctgcgcaaccgcacgagagacgctctcaaaaaaggcgcgccgatattcgcctcggaaatgggcacctgcgccgccagcggaaaaggcaccataaactcggcgcagacggatacatggttcaggctgctcgacgagtacggcgtgagctgggccaactggtcgataggcaccgccgatgaaaccgcctccgccctcaaatccggcgcgagcgcctccggtaattggaacgacggcaacctgacggagtccggcaaactgatccgcggtaagctcatagattacgccaacggcaaggaactgacgacattggccgtaggcgcgggttcaataggacgcggcacctacgcgccatacgcctcgggcgcctcggtaaccctaaccgcaactcccgacgcgggttgggtattcaaggagtggagcggcgacgcgtcaggcaccgcaaacccggtaacggtaacaatgaacgcggacaagatagtcaaagcgatcttcacggagggaggaacgtccgtgttaacgcaaaagaaggcgaccgatctacgggcgtcttggtcaatcgtaaaaaccggaacggaactgttaataacgggcccggcggagtccggcgcgaccgcgtcaatatacgacacccgcggcaaaatcgtaaaaaacataaccgccaaagacggccaaacgctgagcgcctcgggcatccccaccggtagctatttagtagtgattaaaaaccgcgtcggcgcggacgtctataggtcgagggtatcgtttgtgagatag

SEQ ID NO: 71288 - protein, 501 aa, Unknown
  Obtained from environmental sample
  SIGNAL (1)...(24)
  DOMAIN (39)...(307): Cellulase (glycosyl hydrolase family 5)
  misc_feature (1)..(501): Xaa is any amino acid
MRKKSTLSLVGAAVALVCASAAVAQTPVERHGQLSVSGNRIVGKHGNPVQLRGMSLYWSMGPGGRDFYNASAVQYLAANWKVSVIRAAMGVETNFWNEANQQGYISNPTANLARVKAVVDGAIAAGIYVIIDWHSHEAESYTAQAKSFFEEMARTYGGKANVIYEIYNEPIGTASTTAATWSTIKTYANAIVPAIRAIDGENLIIIGTPLSCQYPNLAAADPVAGKNLAYTVHFYAAEPGHQADLRNRTRDALKKGAPIFASEMGTCAASGKGTINSAQTDTWFRLLDEYGVSWANWSIGTADETASALKSGASASGNWNDGNLTESGKLIRGKLIDYANGKELTTLAVGAGSIGRGTYAPYASGASVTLTATPDAGWVFKEWSGDASGTANPVTVTMNADKIVKAIFTEGGTSVLTQKKATDLRASWSIVKTGTELLITGPAESGATASIYDTRGKIVKNITAKDGQTLSASGIPTGSYLVVIKNRVGADVYRSRVSFVR

SEQ ID NO: 71289 - DNA, 1977 bp, Unknown
  Obtained from environmental sample
  misc_feature (1)..(1977): n is a, c, g, or t
gtgggaaaaataaaagcgtttgcggctgtcgccgcgctgtcgctagcggttgcgggcaatctttgggcccaagcccccgccggaagcccggtggcggagcacggggcgctcaaagtggatgggagcatggtgttggacaaaaacaacgagccggtgcagttgcggggaatgagcttgtattggactcttgaggaaaacgcgaggaggtactacaacgcgaatgtcgtcaggtcgctgtggagcgaatggaaagggaacgtgatcagggcggcgatgggcgtcggcgggtgcaaagggagttggaaacccgggtattcgtccgccggagacgctcacgacaaggccgtcgaggatgtggtcacggcggccgtggcgaccggcatatacgtcatcatagattggcactcgcatgaggcgcacaatcaaacgtccgccgctcaggcgtttttcgagcgggtggcggcgaaatataaggacacgcctaacgtgatctttgagatatacaacgaaccgatagacataagcggatgcgaagtggactttgacaacgcgaatttcgccaagacgtggagcgataagataaaaccgtacagcgagacgatagtcagcgccataaggaataagggcgccgataacctcatcatcttgggtacgccttactactgtttgttccccggaaccgccgcggccaacccggtaacggcgggcggcgggaagaacctgctgtactccttccatttttacgccgcgacgcatccggttgcgcaaagatccggcgaggtttctaaggcgatctccgccggcaaggctgttttcgtctccgagttcggcaccgtagcctccaccggcgacggtactccgaatacggccgaaaccgacaaatggttccagttcttagacagaaaccaaatcggctgggccaactggtcgttcagcaacatggggcagtcctccgccgtgttctccggcgacgcgtcgaacgggtctttttcatcgcttagcgcctccggaacatacataagcaacaaactcaagcagtacgccaccaccaccttcaccgttaccgcgacggttgacggcaaaggcaaaataacgactttcccgtcgggttcgaacggcaaattcggctacggcgtgccggtgacgcttaccgccgtcgcagacccgggttgggagttttccaactggagcggcgacgcgtcgggcaacacaaataccgtgaaactctccccgctctacgcgaacgcaagcgttaaggcggtgttcgtagagggcggcaacataatcaagaacggcaagttcaacggcaccgataactggggaaaattcggaacgttttccacaaccacggacggcggccaggggctgaaatttgataatataacggccaccgcgggcgatcccaagagcgtgtacctttatcaggaggttccgctcgtccaaaatcacaagtataagctcaccttcaaagccaaaacgggaacgggaacgcggaagctcatagtcgcggtaaccagcaccaacacggttacggcttatatgacgccgcttgaggcgtcgctcactacgacgatgtcgccgtacagcacggagtttacattcactagggcgagcggtaacgcgagggtgctgttccagtgcggcgatcaggccggcgcgtggtacttggacgacgtgaggcttgaggatttgggcctgtcgtcgaccgttgtccgcgacgcggtctcttcttcagtcaaaaggacgccgtggtcgctcgttaggacggccgggggcgtacagttgcgcggccctattgaggccggcgccacggcagcgttctataatacgcgcggcaaacttgtaggcagagttgcgatcgccgccgacgggcatgccgccctgagcgccggcgtcccggcgggcggttatttggtggtcgtgagggatagggcgggcgctgaggtgcacaaaacgcgcttctcgctcgtggattag

SEQ ID NO: 71290 - protein, 658 aa, Unknown
  Obtained from environmental sample
  SIGNAL (1)...(23)
  DOMAIN (426)...(564): Carbohydrate binding domain
  misc_feature (1)..(658): Xaa is any amino acid
MGKIKAFAAVAALSLAVAGNLWAQAPAGSPVAEHGALKVDGSMVLDKNNEPVQLRGMSLYWTLEENARRYYNANVVRSLWSEWKGNVIRAAMGVGGCKGSWKPGYSSAGDAHDKAVEDVVTAAVATGIYVIIDWHSHEAHNQTSAAQAFFERVAAKYKDTPNVIFEIYNEPIDISGCEVDFDNANFAKTWSDKIKPYSETIVSAIRNKGADNLIILGTPYYCLFPGTAAANPVTAGGGKNLLYSFHFYAATHPVAQRSGEVSKAISAGKAVFVSEFGTVASTGDGTPNTAETDKWFQFLDRNQIGWANWSFSNMGQSSAVFSGDASNGSFSSLSASGTYISNKLKQYATTTFTVTATVDGKGKITTFPSGSNGKFGYGVPVTLTAVADPGWEFSNWSGDASGNTNTVKLSPLYANASVKAVFVEGGNIIKNGKFNGTDNWGKFGTFSTTTDGGQGLKFDNITATAGDPKSVYLYQEVPLVQNHKYKLTFKAKTGTGTRKLIVAVTSTNTVTAYMTPLEASLTTTMSPYSTEFTFTRASGNARVLFQCGDQAGAWYLDDVRLEDLGLSSTVVRDAVSSSVKRTPWSLVRTAGGVQLRGPIEAGATAAFYNTRGKLVGRVAIAADGHAALSAGVPAGGYLVVVRDRAGAEVHKTRFSLVD

SEQ ID NO: 71291 - DNA, 954 bp, Unknown
  Obtained from environmental sample
  misc_feature (1)..(954): n is a, c, g, or t
atgagggaatggaatagcaaagaaaacaaagtcgttctgctgaccgccgaagtaaaaagcgtcattgaaatccccaatgaggaattttcctccataccaaaagcattgggcgatctgcgcttttccaaaatattcagcggcataaagttttcggataatccggttcttctattaaatgttgatcaattactccaaatcatacaaaatgatcggtgggtattagataaaaaaaccagtcccccggaacagcctgtgcccacggcggcttccgagccttctccccctgcggccagtaaagttatagaagagcccccagtaagtcctgcggtgacatccgagccttctcctccagcgactagtgaaattattgaagaacctgcaacaagccctgcgatgacatccgagccttcttctccagcgactagtgaaattattgaagaacccgcaacaagccttgcgatgacatccgagccttctccttcggtggctagtgaagttattgaagaacccccagtaagtcctgcggtgacatccgagccttctcctccagcgactagtgaagttactgaagaacccgcaacaagccctgcgatgatatccgagccttctcctacggtgaccaatgaagttattgaagtttgcgaagttgttgaagtttgtgaagttgttgaagaaccgcctacaagtcctacggagatctccgagccttcttccctgaagcttgaacctcaaccgagcccgcagggcgaaggttcccctcttgaacctcacccgagcctggagccatcggtgcgggagcaccgtaaagtttcccctcttgacgaagttcttgaagtttctgaaattattgatgaaccgccaagaaaccctacggagacttccgatccttcttcaccggctttaaatacaaaacaaaagaaacctcgtaagagcaaaaaaacacaaagtgaatga

SEQ ID NO: 71292 - protein, 317 aa, Unknown
  Obtained from environmental sample
  misc_feature (1)..(317): Xaa is any amino acid
MREWNSKENKVVLLTAEVKSVIEIPNEEFSSIPKALGDLRFSKIFSGIKFSDNPVLLLNVDQLLQIIQNDRWVLDKKTSPPEQPVPTAASEPSPPAASKVIEEPPVSPAVTSEPSPPATSEIIEEPATSPAMTSEPSSPATSEIIEEPATSLAMTSEPSPSVASEVIEEPPVSPAVTSEPSPPATSEVTEEPATSPAMISEPSPTVTNEVIEVCEVVEVCEVVEEPPTSPTEISEPSSLKLEPQPSPQGEGSPLEPHPSLEPSVREHRKVSPLDEVLEVSEIIDEPPRNPTETSDPSSPALNTKQKKPRKSKKTQSE

SEQ ID NO: 71293 - DNA, 441 bp, Unknown
  Obtained from environmental sample
  misc_feature (1)..(441): n is a, c, g, or t
ttggtcaccgtaggagaaggctcggatatcatcgcagggcttgttgcgggttcttcagtaacttcactagtcgctggaggagaaggctcggatgtcaccgcaggacttactgggggttcttcaataacttcactagccaccgaaggagaaggctcggatgtcatcgcaaggcttgttgcgggttcttcaataatttcactagtcgctggagaagaaggctcggatgtcatcgcagggcttgttgcaggttcttcaataatttcactagtcgctggaggagaaggctcggatgtcaccgcaggacttactgggggctcttctataactttactggccgcagggggagaaggctcggaagccgccgtgggcacaggctgttccgggggactggtttttttatctaatacccaccgatcattttgtatgatttggagtaattga

SEQ ID NO: 71294 - protein, 146 aa, Unknown
  Obtained from environmental sample
  misc_feature (1)..(146): Xaa is any amino acid
MVTVGEGSDIIAGLVAGSSVTSLVAGGEGSDVTAGLTGGSSITSLATEGEGSDVIARLVAGSSIISLVAGEEGSDVIAGLVAGSSIISLVAGGEGSDVTAGLTGGSSITLLAAGGEGSEAAVGTGCSGGLVFLSNTHRSFCMIWSN

SEQ ID NO: 71295 - DNA, 582 bp, Unknown
  Obtained from environmental sample
  misc_feature (1)..(582): n is a, c, g, or t
gtgctcccgcaccgatggctccaggctcgggtgaggttcaagaggggaaccttcgccctgcgggctcggttgaggttcaagcttcagggaagaaggctcggagatctccgtaggacttgtaggcggttcttcaacaacttcacaaacttcaacaacttcgcaaacttcaataacttcattggtcaccgtaggagaaggctcggatatcatcgcagggcttgttgcgggttcttcagtaacttcactagtcgctggaggagaaggctcggatgtcaccgcaggacttactgggggttcttcaataacttcactagccaccgaaggagaaggctcggatgtcatcgcaaggcttgttgcgggttcttcaataatttcactagtcgctggagaagaaggctcggatgtcatcgcagggcttgttgcaggttcttcaataatttcactagtcgctggaggagaaggctcggatgtcaccgcaggacttactgggggctcttctataactttactggccgcagggggagaaggctcggaagccgccgtgggcacaggctgttccgggggactggtttttttatctaa

SEQ ID NO: 71296 - protein, 193 aa, Unknown
  Obtained from environmental sample
  misc_feature (1)..(193): Xaa is any amino acid
MLPHRWLQARVRFKRGTFALRARLRFKLQGRRLGDLRRTCRRFFNNFTNFNNFANFNNFIGHRRRRLGYHRRACCGFFSNFTSRWRRRLGCHRRTYWGFFNNFTSHRRRRLGCHRKACCGFFNNFTSRWRRRLGCHRRACCRFFNNFTSRWRRRLGCHRRTYWGLFYNFTGRRGRRLGSRRGHRLFRGTGFFI

SEQ ID NO: 71297 - DNA, 759 bp, Unknown
  Obtained from environmental sample
  misc_feature (1)..(759): n is a, c, g, or t
atgggtaactacaatctggaaaaaataatcgccgcacggacggcgaagacggtctaccgcgacggggacaaggtaataaaacttttgggcgaagaattcctcgcgccggatgtgctttccgaggcgcacaaccttgccgcggtgggagagaccgacctcaaggttccacggctcgtagaggtaacgaaaatagacggcaaatgggcggtagtgtgggaatatatcgcgggaaccactcttgcccagcttatggaaaaaaacaaggacaaggaacagcagtaccttgaacgctttgttgacattcagcttgatatgcaccgccatagcgcgacaaggcttcccttgcttatagaaaaaatggagcgcaagataaaagcctccagcctcgacgctaccgcccgttacgaaattttgggaaggctggcaagcatgcccaaacacaccaaactctgccacggcgattttaaccccagtaatattgtcatcactgaaaaggacgaggcgtatatcatcgactggtcccacgccactcagggcaacgcctcggcggacgcggcgcacacatacatgttgttctggcttacgggcaacgtcgcgttggcggaagattaccttttaatgttctgcaaaaagagcgacacggcaatacagtacgtggaaaagtggttgtctatagtggcggcttcacagcttcccaaagcaaaaccggaagacaaaggattattacttagttgggcgaatgtggtagagtacgtttga

SEQ ID NO: 71298 - protein, 252 aa, Unknown
  Obtained from environmental sample
  DOMAIN (60)...(186): RIO1 family
  misc_feature (1)..(252): Xaa is any amino acid
MGNYNLEKIIAARTAKTVYRDGDKVIKLLGEEFLAPDVLSEAHNLAAVGETDLKVPRLVEVTKIDGKWAVVWEYIAGTTLAQLMEKNKDKEQQYLERFVDIQLDMHRHSATRLPLLIEKMERKIKASSLDATARYEILGRLASMPKHTKLCHGDFNPSNIVITEKDEAYIIDWSHATQGNASADAAHTYMLFWLTGNVALAEDYLLMFCKKSDTAIQYVEKWLSIVAASQLPKAKPEDKGLLLSWANVVEYV

SEQ ID NO: 71299 - DNA, 960 bp, Unknown
  Obtained from environmental sample
  misc_feature (1)..(960): n is a, c, g, or t
atgaacaccctgaagcggattttgaggatatggctatgcgctttgccgacatcccgcaagcgggtctacaccttccccaagatgggagaaaaagcctactttattgccatacccacctccgccggaacaggcagcgaggtaacaccgtttgccgtcatcaccgacgaaaccaagggcatgaaatacccgctggcggattacgaactgatgcccaaaatggcgattgttgatgcggatgtgcagatgaacgcgcccaagggacttaccagcgcttcaggcattgacgcattgacccacgcactggaagcctacgcctcgatcatggccaccgacttcaccgacggccttgcgatacaggcgatcaagatggtttttgaatggctgcccaaagcttacaacgaaggcgccgcgaatcctgtcgcgcgggaaaggatggcgaacgccgccaccatagcgggcatggccttcgccaacgccttcctcggcgtctgccactcgatggcgcacaaacttggcgcgttccatcacataccccacggcgtcgccaatgccctgatgatcagcgaagtgcttcgctacaacgccgtcgaagttccgcccaaaatgggaaccttcccgcagtacgatcatcccaagaccctttcccgttacgcggaaatcgcggatgccatggattttgccggcaaaaacgacgaggaaaaacttgaaaacctgatcgccgccgtggaatggctgaaagagcagattgggattaaaaagactatcaaggattacggcattgatgaaaaagattttcttgcccgccttgacgagatgagcgaacaggcttttgacgatcagtgtaccggcgcgaatccccggtaccccctgattgaggaaatcaaacagatgtatatcaatgcctactacggcaagaatattcatgtgggcggttccaaaggaaagaaggagcgggcgtaa

SEQ ID NO: 71300 - protein, 319 aa, Unknown
  Obtained from environmental sample
  DOMAIN (1)...(294): Iron-containing alcohol dehydrogenase
  misc_feature (1)..(319): Xaa is any amino acid
MNTLKRILRIWLCALPTSRKRVYTFPKMGEKAYFIAIPTSAGTGSEVTPFAVITDETKGMKYPLADYELMPKMAIVDADVQMNAPKGLTSASGIDALTHALEAYASIMATDFTDGLAIQAIKMVFEWLPKAYNEGAANPVARERMANAATIAGMAFANAFLGVCHSMAHKLGAFHHIPHGVANALMISEVLRYNAVEVPPKMGTFPQYDHPKTLSRYAEIADAMDFAGKNDEEKLENLIAAVEWLKEQIGIKKTIKDYGIDEKDFLARLDEMSEQAFDDQCTGANPRYPLIEEIKQMYINAYYGKNIHVGGSKGKKERA

SEQ ID NO: 71301 - DNA, 1728 bp, Unknown
  Obtained from environmental sample
  misc_feature (1)..(1728): n is a, c, g, or t
atgggcgtagtagaggacaaagtcatcaaaaaccactacgcctcggagtacatctacaacgcctacaaagacgaaaaaacctgcggcataattgaggatgaccccgtgtccggcatcaccaggatagccgaacccattggccttgtggcggcggtcattcccaccaccaaccccacatccacggcgattttcaaggcgctcatctgcctaaaaacccgcaacggcatcatcatctcgccgcacccccgcgccaaatgttgcacctgcgccgccgcgaaaatcgtgctggacgcggcagtagaggctggagcgcccgaggggatcatcggctggatagacgaaccgagccttgaaatgaccaacatggtgatgaaagaggccgacatcatccttgccaccggcgggccgggcatggtcaaatccgcctattcctccggcaagcccgccatcggcgtggggtcgggcaatgtgcccgccatcattgacgacagcgcggatatacttctggcggtgaactcaattatccattcaaaaacttttgacaacggtatgatctgcgcgtccgagcaatcggtaatcgccctgcaaagcgtttatgatcaggtgaaagtcgaattcaaacgccgcggctgttatttccttacgcctgaagaaaccgagaaggtacgcaatacgattattgttaatggatcgcttaactcanaaatcgtcgggcagaaggctgcgacaatcgcggagcttgctggcgtaaaagttccggaagcaacgaaaatccttataggcgaagttgaaagcgtggagctttcggaagaatttgcccatgaaaagctttccccggtgctgggcatgtacaaggcgaaggattttgacgatgccatggacaaggccgatcacctggtaaaagacggcggctacggccacacagccagcgtataccttgacccgcaaaagtgcgcagacaaactcgccgcctttagcgcccgcatgaagacctgccgcatcgtgctaaatacgccatcggcgcacggaggcatcggcgacctgtacaacttccgcctgcggccttcgctcacccttggctgcggcagctggggcggcaattcagtttcggagaatgtcggcgtcaaacacctgctaaatatcaaaacactggcggcaaggagggaaaacatgctgtggttccgcgctcccgaaaaggtatatatcaaacggggctgcctccccgtggctctggacgagcttaaaaacgtgatgggaaaaaagcgggcgttcatcgttaccgataccttcctctaccaaaacggctacaccaaatgcatcaccgacaagctggacagcatgggtattgtccatgaaacgttctttgacgtcgctccggacccgaccctgggctgcgccaagagaggcgcggctctggtgacagctttcaagcccgatgtaatcatcgcgctgggcggcggctcggcaatggacgcgggcaaaatcatgtgggtactctatgaacaccctgaagcggattttgaggatatggctatgcgctttgccgacatcccgcaagcgggtctacaccttccccaagatgggagaaaaagcctactttattgccatacccacctccgccggaacaggcagcgaggtaacaccgtttgccgtcatcaccgacgaaaccaagggcatgaaatacccgctggcggattacgaactgatgcccaaaatggcgattgttga

SEQ ID NO: 71302 - protein, 575 aa, Unknown
  Obtained from environmental sample
  DOMAIN (7)...(384): Aldehyde dehydrogenase family
  misc_feature (1)..(575): Xaa is any amino acid
MGVVEDKVIKNHYASEYIYNAYKDEKTCGIIEDDPVSGITRIAEPIGLVAAVIPTTNPTSTAIFKALICLKTRNGIIISPHPRAKCCTCAAAKIVLDAAVEAGAPEGIIGWIDEPSLEMTNMVMKEADIILATGGPGMVKSAYSSGKPAIGVGSGNVPAIIDDSADILLAVNSIIHSKTFDNGMICASEQSVIALQSVYDQVKVEFKRRGCYFLTPEETEKVRNTIIVNGSLNSXIVGQKAATIAELAGVKVPEATKILIGEVESVELSEEFAHEKLSPVLGMYKAKDFDDAMDKADHLVKDGGYGHTASVYLDPQKCADKLAAFSARMKTCRIVLNTPSAHGGIGDLYNFRLRPSLTLGCGSWGGNSVSENVGVKHLLNIKTLAARRENMLWFRAPEKVYIKRGCLPVALDELKNVMGKKRAFIVTDTFLYQNGYTKCITDKLDSMGIVHETFFDVAPDPTLGCAKRGAALVTAFKPDVIIALGGGSAMDAGKIMWVLYEHPEADFEDMAMRFADIPQAGLHLPQDGRKSLLYCHTHLRRNRQRGNTVCRHHRRNQGHEIPAGGLRTDAQNGDC

SEQ ID NO: 71303 - DNA, 471 bp, Unknown
  Obtained from environmental sample
  misc_feature (1)..(471): n is a, c, g, or t
atggccggtgacagaaaaaaaattatcgtcgtagacaataaccctgaaaacctgaacgcttttaataatactgcgaatgaaaactacatggtatattcaaacttctccgcgccggatatggttaagttattggagaatgtccggccggacttaatcctgatggataaagaaagctacatagtatatccaaacatttccgctcaggatatgtttgagttattggaacaaatccggccggatttaatcctgctgaacgtggaaatgccgggaatggacggggatgaagttataaaaaagctggaaagcaacgtcaaatacaggaaaatacccgttatcttcctgtcttccatgaacgacacgcaaagcgaagaggaggtcttgcaacttgacgctgttgattatatacaaaagccccttgtcgcccctatattgcttgagcgtataaaaacgcgtccgtctatattgaattaa

SEQ ID NO: 71304 - protein, 156 aa, Unknown
  Obtained from environmental sample
  DOMAIN (6)...(149): Response regulator receiver domain
  misc_feature (1)..(156): Xaa is any amino acid
MAGDRKKIIVVDNNPENLNAFNNTANENYMVYSNFSAPDMVKLLENVRPDLILMDKESYIVYPNISAQDMFELLEQIRPDLILLNVEMPGMDGDEVIKKLESNVKYRKIPVIFLSSMNDTQSEEEVLQLDAVDYIQKPLVAPILLERIKTRPSILN

SEQ ID NO: 71305 - DNA, 1215 bp, Unknown
  Obtained from environmental sample
  misc_feature (1)..(1215): n is a, c, g, or t
gtgaacgaaaaaaaattattcgtcgtagacgataatcccgaaaacttaaaccttctcaagaatactctaaaagacacatatatagtatatcccgtcccttccgcggcggaaatgtttgaattattggagcatgttcagcctgaattgattctgttggatgtggaaatgccgggtatgaacggctatgaagcggcaaggaaactgaaagagcacaacaaacacaatgaaattcccattatcttccttacttccatgaacgactcgaaaagcgaaatagaaggtttaagcctaggcgctgttgattatatacacaaacccattgtaattcctctgctgcttcagcgtttaaagatgcatttgtcttttcaggatcatcagcgtgaaattcaagacatgcttgaattaaaatcgaaagaggttattcttcgcatagcggcggaacaggaggcgctaagcgcgtcgcaggcaaagagcgattttctttcccacatgagccatgaaatacgctctccgttaaacgccgttatcggcatgataaacattggatacgaaaaagaagatattgatgaaataaaagtttatcttgtaagggcgagaaacgcggcgaatcatgtactgaacgttattaacgatattcttgatatgtcaaaaattgaggcgaataaacttgaactttctttcaatgattttgattttaagacaatgatatcaaaaattgttgatgttacgggtatccgcgctcaggagaaacatcagcaaattacagttaatatggacccgaatattccgtcatttataaactgcgacgaattacgattgacgcaggttattaccaatttgatgagcaactcgataaaattcacgccggaaaacggcaatataacattgagcgcggcaaagcaggacgaaaaagacggtgaaattaccatgcgaattgaagttgcggataacggcataggaatttctcctgaacagcagacaagactttttaaggcttacagtcaggctgaaggcggaaccaccagaaaattcggcggcacaggtcttggattagctatttcaaaacgtattgtagaattgatgcaggggacgatatggattgaatcggagttggacaaaggcgcgaaatttatatttaccataaaagtgaaaaaggtggagcaaagcgcggcgcaaaccgaggataaatcggcgtctgcgatccccaaagaataa

SEQ ID NO: 71306 - protein, 404 aa, Unknown
  Obtained from environmental sample
  DOMAIN (156)...(221): His Kinase A (phosphoacceptor) domain
  misc_feature (1)..(404): Xaa is any amino acid
MNEKKLFVVDDNPENLNLLKNTLKDTYIVYPVPSAAEMFELLEHVQPELILLDVEMPGMNGYEAARKLKEHNKHNEIPIIFLTSMNDSKSEIEGLSLGAVDYIHKPIVIPLLLQRLKMHLSFQDHQREIQDMLELKSKEVILRIAAEQEALSASQAKSDFLSHMSHEIRSPLNAVIGMINIGYEKEDIDEIKVYLVRARNAANHVLNVINDILDMSKIEANKLELSFNDFDFKTMISKIVDVTGIRAQEKHQQITVNMDPNIPSFINCDELRLTQVITNLMSNSIKFTPENGNITLSAAKQDEKDGEITMRIEVADNGIGISPEQQTRLFKAYSQAEGGTTRKFGGTGLGLAISKRIVELMQGTIWIESELDKGAKFIFTIKVKKVEQSAAQTEDKSASAIPKE

SEQ ID NO: 71307 - DNA, 390 bp, Unknown
  Obtained from environmental sample
  misc_feature (1)..(390): n is a, c, g, or t
ttgcatttaagcggctataccatacttgccgctgaagacacggactttaaccgtgaaatacttgccaaatatctggacaagaccggcgtttccattgattttgccgagaacggcaggatagccgttgacatgttcaaaaataatcccgataaatacagtttaatttttatggacgttaatatgcctgtaatgagcggagatgaggcgacaaaggagatacgcgcgcttgattcaaagaaggcgaaagagataccgattatcgctatgactgcggatgtttttaaggaagatatcgaaaaatgcctgtcgattggtatgaatgatcatatctcaaaaccgattgttttgccggttttgtttgggaagcttaagcagtatatgggagtgtag

SEQ ID NO: 71308 - protein, 129 aa, Unknown
  Obtained from environmental sample
  DOMAIN (6)...(124): Response regulator receiver domain
  misc_feature (1)..(129): Xaa is any amino acid
MHLSGYTILAAEDTDFNREILAKYLDKTGVSIDFAENGRIAVDMFKNNPDKYSLIFMDVNMPVMSGDEATKEIRALDSKKAKEIPIIAMTADVFKEDIEKCLSIGMNDHISKPIVLPVLFGKLKQYMGV

SEQ ID NO: 71309 - DNA, 2085 bp, Unknown
  Obtained from environmental sample
  misc_feature (1)..(2085): n is a, c, g, or t
atgaaattaagtatcagagtaccattattaatcgtagcggttgtattgataacatcagccgcaatcattatttccgttaatatgttggtaacaaaaaacatgggagagtcggttattaacggagcggtcagcaacagcaggataaacgccgaattactccaatctaaattggacaccctgctcaaccaactgtgggaaatcgccaaccgtgccagaaccagaacaatgaactgggaaggggtggtcaaggcaaactttgcccccgatgtagaccgtattgaaagccttgatatagggctggttttcccggacggaacaacccattatgtgcgggatgaggtttccgctaacctaggcgacagggcttatgtcaaagaagcttttaacggaaaaactgcggtttcggatgtcattataagccgcgttaccaataaaccggtcgtgatgcttgccgccccgattttcaaagatgacagcaaggacgcccctgttttaggcgtagtagtcacccgaaaagacggtcctacattcctcaccggtttggtaaatcatatacaaaccagctataaaacagagtacggttttttagtcaataatgagggaacaatcattgcccaccctgacatggaactggtaaacaagcaatgtaaccctatcaaagaagcggaaaaagactcttcaatgaaatcaatggcggacttgataacgaaagtcatcaaagaaaaaacaggcagcgcgcaatatgttaataacggaaaagagatggtctgcgccttcacgcagcttcccggtcacgattggatatttgttcaaaatattgatgaaagcgaagtgtttgcccctgttaaacatatccgcgaaatcatgatgagcatcggtttaacgtgcgccgcgctgggcgttattgtcgccgtttttgccgggcgttccataaccaaacctttaacttatatgactaaaatagtaaagcatacaggcagcggagatttaaccatgcgcgtcaacatcaaatccaatgacgaaataggcgaattggcgaacggctttaataccatgcttgacaatattaaatccctcattaccactataaaacaggagtctgaaaatctgtccggcataggagacacgcttgccggcagttcacaaaagacagctatggcggtaaaagaaattaccggcaacattcaaaacattcaaaatctcgcggtcaaccagtccgcttcggtaacgcagacaaacgccacaatggaacagataagcggcaacattcaaaaacttaacgagcatgtgatacaccaaacggagagcgtttcccaatcgtcttcagccgttgaagaaatgatttccaatatcaattctgttacccaaactcttttcaagaactctgacaaggtgaatgagttgacagacgcttccggcataggacgcggaggactgcagacggtagttgcggatgttgaggaaatcgccaaagaatccgaggacttgttaaagatcaattcggtaatggaaaacattgcaagcgagactaacctgctttccatgaacgccgccattgaagccgcccacgccggaaacgccggaaaaggtttcgccgttgtagccggagaaatccgtaaattagcggaaagctcaagcgagcagtcaaaaaccattgacgcggctcttaataaaattagaagttctattgataagatttcacactccaccggcagcgcgctggaatcatttgaagctatcgaaggcggaatccatacggtatccgatcaagaagaaaatatccgcggagctatggaagagcaaggcgaaggaagcaagcaaattcttgacgccatcgttcaactcaacgaaattacacggcaagtaaaggatagttctttagagatgcttgaaggcgcgaaggaaattatcagcgaaggcaaaaatcttgagaaagccaccggtgaaattaccggcggaatgagcgaaatggcagtaagcgcggaacagatcaacgccgccgtgagcgaagtaaacagcatcagcgggcaaaacaagaaaattatcgacaacctcgtcgtagctgtatcgaagtttaaggtttaa

SEQ ID NO: 71310 - protein, 694 aa, Unknown
  Obtained from environmental sample
  SIGNAL (1)...(20)
  DOMAIN (134)...(219): Cache domain
  misc_feature (1)..(694): Xaa is any amino acid
MKLSIRVPLLIVAVVLITSAAIIISVNMLVTKNMGESVINGAVSNSRINAELLQSKLDTLLNQLWEIANRARTRTMNWEGVVKANFAPDVDRIESLDIGLVFPDGTTHYVRDEVSANLGDRAYVKEAFNGKTAVSDVIISRVTNKPVVMLAAPIFKDDSKDAPVLGVVVTRKDGPTFLTGLVNHIQTSYKTEYGFLVNNEGTIIAHPDMELVNKQCNPIKEAEKDSSMKSMADLITKVIKEKTGSAQYVNNGKEMVCAFTQLPGHDWIFVQNIDESEVFAPVKHIREIMMSIGLTCAALGVIVAVFAGRSITKPLTYMTKIVKHTGSGDLTMRVNIKSNDEIGELANGFNTMLDNIKSLITTIKQESENLSGIGDTLAGSSQKTAMAVKEITGNIQNIQNLAVNQSASVTQTNATMEQISGNIQKLNEHVIHQTESVSQSSSAVEEMISNINSVTQTLFKNSDKVNELTDASGIGRGGLQTVVADVEEIAKESEDLLKINSVMENIASETNLLSMNAAIEAAHAGNAGKGFAVVAGEIRKLAESSSEQSKTIDAALNKIRSSIDKISHSTGSALESFEAIEGGIHTVSDQEENIRGAMEEQGEGSKQILDAIVQLNEITRQVKDSSLEMLEGAKEIISEGKNLEKATGEITGGMSEMAVSAEQINAAVSEVNSISGQNKKIIDNLVVAVSKFKV

SEQ ID NO: 71311 - DNA, 441 bp, Unknown
  Obtained from environmental sample
  misc_feature (1)..(441): n is a, c, g, or t
gtggagtgtgaaatcttatcaatagaacttctaattttattaagagccgcgtcaatggtttttgactgctcgcttgagctttccgctaatttacggatttctccggctacaacggcgaaaccttttccggcgtttccggcgtgggcggcttcaatggcggcgttcatggaaagcaggttagtctcgcttgcaatgttttccattaccgaattgatctttaacaagtcctcggattctttggcgatttcctcaacatccgcaactaccgtctgcagtcctccgcgtcctatgccggaagcgtctgtcaactcattcaccttgtcagagttcttgaaaagagtttgggtaacagaattgatattggaaatcatttcttcaacggctgaagacgattgggaaacgctctccgtttggtgtatcacatgctcgttaagtttttga

SEQ ID NO: 71312 - protein, 146 aa, Unknown
  Obtained from environmental sample
  misc_feature (1)..(146): Xaa is any amino acid
MECEILSIELLILLRAASMVFDCSLELSANLRISPATTAKPFPAFPAWAASMAAFMESRLVSLAMFSITELIFNKSSDSLAISSTSATTVCSPPRPMPEASVNSFTLSEFLKRVWVTELILEIISSTAEDDWETLSVWCITCSLSF

SEQ ID NO: 71313 - DNA, 735 bp, Unknown
  Obtained from environmental sample
  misc_feature (1)..(735): n is a, c, g, or t
atggaagccgtaagaggcgcgtatgtaaactccatcgacaaacttatcgcgagcaacgcggacacatcgacaagaaacataaggggagatactccgcttcacatcgccgttgcatcggaaagaatcgatattattgagcgccttcttaaaacaggcgtttccattcacgcgcgcaacacaaaaaacagaactccgtttcaaatgtctttaaccatatcgcccaggattgtatccgctcttttggaaaataacagaatcaatatatccgacgacttcggcaattctgttcttcacgtcgcgttacacgaaagagccgatgacaacgtaataaggacaataatcagtcagggagccagagttaacgcggttgactataacggcaaaacgccgcttcgccttgcccttgattatgaaatgcttgaagcggcaaaaatcatcgcggattcgggagccgacccattcataacggcggctgacaacagatcgccggctgaaatctccattgcaaaaggcgaggtatatttaagggcggttttctcaggcagagcaataaacgcgagagacagttccggcaataccattctgcactacaccgcaagattaggtacgccgcaattaattactgttctttttgaattaggcgcaaacagaagcataagaaatatcgccgcggaaagtcccaatgatatcgctctaagatggaacaagaaagataattcggaattgttaagataa

SEQ ID NO: 71314 - protein, 244 aa, Unknown
  Obtained from environmental sample
  DOMAIN (190)...(222): Ankyrin repeat
  misc_feature (1)..(244): Xaa is any amino acid
MEAVRGAYVNSIDKLIASNADTSTRNIRGDTPLHIAVASERIDIIERLLKTGVSIHARNTKNRTPFQMSLTISPRIVSALLENNRINISDDFGNSVLHVALHERADDNVIRTIISQGARVNAVDYNGKTPLRLALDYEMLEAAKIIADSGADPFITAADNRSPAEISIAKGEVYLRAVFSGRAINARDSSGNTILHYTARLGTPQLITVLFELGANRSIRNIAAESPNDIALRWNKKDNSELLR

SEQ ID NO: 71315 - DNA, 1620 bp, Unknown
  Obtained from environmental sample
  misc_feature (1)..(1620): n is a, c, g, or t
ttggatctttctaaaattgaagcgggtaaactggaacttgttcccgtcaaatatgaagttgcaaggcttattaacgatattattcaattaaattatattcgttatgtgagtaaaccaattgaatttaaaatcaaaatagacgaaaacactccgtcatttcttgtcggcgacgatctccgaattaaacaaattttaaataaccttctttcaaacgcttttaaatatacaaatgaaggcatagttactttttctgtcagcgcggaatgtgttggacgcggcggagctgtattagttactcttatttttgaggtaagcgatacagggcagggtatgtcccccgaacaggtaaacaaattgtttgacgaatacacccgctttaacatggaagccaaccgtacaaccgagggcgcgggacttggcatgaccattacgcgaaaccttgtagacttaatgtatggaaaaatattcgttaaaagtacggttggcgaaggctcaacttttacggttagactgccgcaaaaaacagaaggcaaaggcattgaaggcgttatcggcaaaaatttggcggaaaacttaagccagcttaatcaagataacttcgtacaaataaagaaagctcaggtaattcacgaatatatgccttatggcagcgtacttattgttgatgacgtagaaaccaatttatatgtcgcanaaggacttatgcttccatacggacttaaaattgacgttgtaacaagcggatttgacgcgattaaaaaagtcaaagaaggttcaaattacgatgtgatatttatggatcacatgatgccaaaaatggacggtatagaaacgacaaaacaacttcgtaaaatgggctatataaaacccatagttgcgttgacagctaacgcattaaccggtcatgctgaaatgtttttaaacaacggttttgatgattttatttcaaaaccaattgatatacaccagctaaacagaacccttaacagattgattcgagataaacaaccttccgaagttatagaagccgcaatgaaagagaaaatcgaaatagacaaaaaaagaaattccaatacgggatttcagcaagcagacgaacaaatagtaaaaatattcgcacgagacgccgaaaaagccgttgtcgccattaaaaagagtattcaaaaaaatcttgacaacgaagatgatattcatctgtatataattaacgttcacgcgatgaaaagcgctcttgcaaatatcggagaaaaagaactatccgccgaagcgaacaaacttgaacaagcaggcagagataaagacattaattttttattatcagaaacaagtgaatttttagaaaaacttgacaaggttataaatgaaattaaaaaaagagaggaaaaaaatgaattatccgaggactcagaagaatctcttgttatgttaaaagagaaattacagatcataaaagacgcgtgtaatgatttgaataaaaaagttatcaaagaggaattaaacgagttaagaaaaaaagcgtgggctcaggaaacaaatgaacttttaacctctatagaagaacatttactccacagtgattttgaagaagcgtcggcgctcatagataattataataaataa

SEQ ID NO: 71316 - protein, 539 aa, Unknown
  Obtained from environmental sample
  DOMAIN (367)...(455): Hpt domain
  misc_feature (1)..(539): Xaa is any amino acid
MDLSKIEAGKLELVPVKYEVARLINDIIQLNYIRYVSKPIEFKIKIDENTPSFLVGDDLRIKQILNNLLSNAFKYTNEGIVTFSVSAECVGRGGAVLVTLIFEVSDTGQGMSPEQVNKLFDEYTRFNMEANRTTEGAGLGMTITRNLVDLMYGKIFVKSTVGEGSTFTVRLPQKTEGKGIEGVIGKNLAENLSQLNQDNFVQIKKAQVIHEYMPYGSVLIVDDVETNLYVAXGLMLPYGLKIDVVTSGFDAIKKVKEGSNYDVIFMDHMMPKMDGIETTKQLRKMGYIKPIVALTANALTGHAEMFLNNGFDDFISKPIDIHQLNRTLNRLIRDKQPSEVIEAAMKEKIEIDKKRNSNTGFQQADEQIVKIFARDAEKAVVAIKKSIQKNLDNEDDIHLYIINVHAMKSALANIGEKELSAEANKLEQAGRDKDINFLLSETSEFLEKLDKVINEIKKREEKNELSEDSEESLVMLKEKLQIIKDACNDLNKKVIKEELNELRKKAWAQETNELLTSIEEHLLHSDFEEASALIDNYNK

SEQ ID NO: 71317 - DNA, 1290 bp, Unknown
  Obtained from environmental sample
  misc_feature (1)..(1290): n is a, c, g, or t
atgcaaaagaaaacaatcatgcttggaaccgttgaaaccgttcattttcgcaataacgcgttcctttgcgtcggaacaggcagaatggggcttgcccttcaaaaagaatattttgaacaattaaaacttgtgcaggaaaacatcggttttaaatggattcgcgggcacggtctcttcaacgaagacatgtcaatttatcaggaatataaaacggaagacggctccgtcttacccgaatacaattttacatatcttgaccttgtaatagacagctatttagaactcaatatccgtccctttattgagctcggctttatgcctcacgcgatagcgtcgggggagcagtcggtattttactggcgcggtaatattacgccgcccaaagattacgcacaatggaacaaacttgtcggtgcgacactacagcatttaatagaccgctacggcgcggaagaagtaacatcctggcctgttgaagtttggaatgagccgaacctcgctcacttttggaaagacgccgacagaaacgaatattttaaacttttccgcgaatcaataagaacggtaaaatccgttaataaaaaattccgcgtgggcggtcccgctatctgcggcgttgatgatatttcctggttaaaagattttttaaatttttgccgcgatgaaaaacttcccttagattttgttacgcgtcatttgtacaacattacaattcctgaacgcgacggcagatacggttacccgaaaatcagtccgctttcccgcgcctttggggaaacaaaccgttcccgcgaaattatcgacagctaccccgaataccgcggcatggaaatgcacgtaacggaatttaacacctcatattcgccgcgcactccgatacatgatactaaccttaacgccgcgtacatcgcctaccagcttgcatatctcggcgacacgagtgaatcgtactcgtattggacattcggggatatttttgaagaatggggcgtacccttcactcctttccatggaggtttcgggctagtcgcaaacgggaaaatttttaaaccgacatattgggcgtataagttttttaaagacttgggaaacggcgaatgcatccatcgctcggagaatacgattgttttaagaaaaaaggacggaagttatcgcgggattgcgtggaatttagttgcagctaacaattcttccgccgaagaaggcgataaattgactctttgttttattccggaagacgggcgcgttcaaagagaacgaatactgcgttgttacaaaaacagtcgatga

SEQ ID NO: 71318 - protein, 429 aa, Unknown
  Obtained from environmental sample
  DOMAIN (1)...(429): Glycosyl hydrolases family 39
  misc_feature (1)..(429): Xaa is any amino acid
MQKKTIMLGTVETVHFRNNAFLCVGTGRMGLALQKEYFEQLKLVQENIGFKWIRGHGLFNEDMSIYQEYKTEDGSVLPEYNFTYLDLVIDSYLELNIRPFIELGFMPHAIASGEQSVFYWRGNITPPKDYAQWNKLVGATLQHLIDRYGAEEVTSWPVEVWNEPNLAHFWKDADRNEYFKLFRESIRTVKSVNKKFRVGGPAICGVDDISWLKDFLNFCRDEKLPLDFVTRHLYNITIPERDGRYGYPKISPLSRAFGETNRSREIIDSYPEYRGMEMHVTEFNTSYSPRTPIHDTNLNAAYIAYQLAYLGDTSESYSYWTFGDIFEEWGVPFTPFHGGFGLVANGKIFKPTYWAYKFFKDLGNGECIHRSENTIVLRKKDGSYRGIAWNLVAANNSSAEEGDKLTLCFIPEDGRVQRERILRCYKNSR

SEQ ID NO: 71319 - DNA, 1164 bp, Unknown
  Obtained from environmental sample
  misc_feature (1)..(1164): n is a, c, g, or t
atgaaaacaaatgtatacgttgtaaaatgtgaaagttacgaaaaagcggatgagaaaattaatgaacttattaatttgatgggcggtatcagtctattcgcgaaaaagggcgagaaaatcactttaaaagcaaacctgttaggcgctgttccgcctgaaaaagcggtcagcactcacccgtctattgtcgccgcagtaggcaaacttgctaaaaatgaaggggctattcctttaattgcggacagtccggggtcgggctatttgtacaatgaagcgacgcttaaaaaactctataaaacctgcggtatgtacgatgcggcggaacaggcaggcatcaatgtaaatatggacacaggctatgaaagagtatctttcccgcagggcaagttgatgaaacaaattgacgttataaaaccgataacgcaggcggacgccgtatttaacatctgcaaaatgaaaacgcatttatatatgcacgtaacgggagcggtaaaaaatcatttcgggattatacccggtttatcaaaagtagggtttcacgcaaaattattcgataaagaacgttttgcggatatgctgttggatttgtctctttacgtagccccaagattaacaattatggacgcagttcttgccatggaaggcgaaggaccgggcgcttcgggaactccaaggcacgtcgggcttctgttagcgtctacaagcgaccttgctcttgacgttgtagcgggcgaaatcatggggcttccaaatgaacacaaccccgtattaatggcggcgaaaagacgagaagcgtctccctacaaaatcgaagacgtaaatgtaatcggcgaagacctttcaagtataaaaatttccgattacaaattcccatcaactgtaaaaggttttagtaaaactgtcgaaaaaaatcccgctgtaagaaatcttctaagatcggctttaactaaatttcctgttgtagcaaaagaaagatgtataggctgcggtatgtgcgcgaccgcctgtccgcaaaaaatgattacaataattccgtacaaaaaaaagaaagttgccgttataagcctgaaagactgtattcgctgttattgctgccacgaactatgtccgcataaggcgattgacatgaagagtaagttaattacgaaggtattgaaggcttag

SEQ ID NO: 71320 - protein, 387 aa, Unknown
  Obtained from environmental sample
  DOMAIN (352)...(375): 4Fe-4S binding domain
  misc_feature (1)..(387): Xaa is any amino acid
MKTNVYVVKCESYEKADEKINELINLMGGISLFAKKGEKITLKANLLGAVPPEKAVSTHPSIVAAVGKLAKNEGAIPLIADSPGSGYLYNEATLKKLYKTCGMYDAAEQAGINVNMDTGYERVSFPQGKLMKQIDVIKPITQADAVFNICKMKTHLYMHVTGAVKNHFGIIPGLSKVGFHAKLFDKERFADMLLDLSLYVAPRLTIMDAVLAMEGEGPGASGTPRHVGLLLASTSDLALDVVAGEIMGLPNEHNPVLMAAKRREASPYKIEDVNVIGEDLSSIKISDYKFPSTVKGFSKTVEKNPAVRNLLRSALTKFPVVAKERCIGCGMCATACPQKMITIIPYKKKKVAVISLKDCIRCYCCHELCPHKAIDMKSKLITKVLKA

SEQ ID NO: 71321 - DNA, 1266 bp, Unknown
  Obtained from environmental sample
  misc_feature (1)..(1266): n is a, c, g, or t
atgaaagagatgtatttgagccgtatagcggataaggtgctggataaagcgctgggagtttccggagcggtacttgttgaaggaccaaaatggtgcggaaaaacgaggacagccgaagaaaaagccgccagtatcctctatatgcaggatcccgaccatactgcttcctacttaaaagcggctgatacaaaaccttccttgctattggctggtgatgcgccgcgcctaatagacgaatggcagatggcgccggtattgtgggacgcggtccgatttgcgatagatcaacgcggagaaaccggacagttcatcttaaccggctctgctgtacctaaggacaatgctgttcaacatacgggaaccggtcgtttttcgcggatgttaatgcgtccaatgtccttgtttgagtcgctggaatcgaatgggactatttcattaaaagccttatttgacggagttactaacggagagtgcgcctcttctctgacaattgaggctttggcgtttgctttaactcgcggcggttggcctgcttcagtaaatcaaaaagagtctgttgctttacagcgcgtgtatgactatgtagatgccgtaattaatatcgacgtgtccagagttgatgatgtgaaaaaaaatcccgcgcgtattcgcgctntaatgcgttcattggcgcgtaatgtttctacagcggcgagtattgcgacaattcgggaagatattgcgggaaatgaaggaactatttctgaaaaaacaatttctacataccttaacgctctgcgtcgaatatttgtgttagaagatttgcctgcgtggaatcccgctatgcgttctaaaactgttttaagaacttcatcaaaacggcactttgtcgacccttctatcgccgccgcggtgttacgcgccggtccggacaatttattgcaagactttaaaacatttgggtttttatttgagtcgttgtgtgtaagggacttgcgtgtttatgccgaggcaattgacggagaagtatttcattaccttgataagaacggattggaatccgacgcaatcgttcatctgaaagatggacgatggggtgcggttgaagtaaaaatgggcgcaaaagaaatagaaatcgccgcggaaaatctaaaaaaattgcgaaataaaattaatacggaaaaaatgagagagccgtcttttttaatggtactgacaggcacggaatatggttacaaacgtgatgacggagtatatattatcccaatcggctgtttgcgtgattga

SEQ ID NO: 71322 - protein, 421 aa, Unknown
  Obtained from environmental sample
  misc_feature (1)..(421): Xaa is any amino acid
MKEMYLSRIADKVLDKALGVSGAVLVEGPKWCGKTRTAEEKAASILYMQDPDHTASYLKAADTKPSLLLAGDAPRLIDEWQMAPVLWDAVRFAIDQRGETGQFILTGSAVPKDNAVQHTGTGRFSRMLMRPMSLFESLESNGTISLKALFDGVTNGECASSLTIEALAFALTRGGWPASVNQKESVALQRVYDYVDAVINIDVSRVDDVKKNPARIRAXMRSLARNVSTAASIATIREDIAGNEGTISEKTISTYLNALRRIFVLEDLPAWNPAMRSKTVLRTSSKRHFVDPSIAAAVLRAGPDNLLQDFKTFGFLFESLCVRDLRVYAEAIDGEVFHYLDKNGLESDAIVHLKDGRWGAVEVKMGAKEIEIAAENLKKLRNKINTEKMREPSFLMVLTGTEYGYKRDDGVYIIPIGCLRD

SEQ ID NO: 71323 - DNA, 480 bp, Unknown
  Obtained from environmental sample
  misc_feature (1)..(480): n is a, c, g, or t
atggcgcagactatgaatattcccgtcgaagaatatttagcttttgaagaaggacagcgggacttttcgttcagtttcctgcaaaatgcggcgcagattttcggcgttgatgttgttgacattatttccggcgaatcgccgaaacttacaaaatgcgctattgtcaaaaaaggcgaaggttacgatatagaacgccgcaaagcatacgactataaacaccttgcatttactttcagcaacaaaagggctgaaccgttcttggttaaggtagagccgaaagaagatgaaaagctgactctgcactcgcacgaaggacaggaatttgactatatgctttccggtaaaatagaatttcattttgataaagcgttttatgtgcttaacgagggcgacagcgtatatttcgattcaggagttccgcacgccatgaaagctctaggcgataaagcggcgacgtttcttgctgtggtaataaaatag

SEQ ID NO: 71324 - protein, 159 aa, Unknown
  Obtained from environmental sample
  DOMAIN (86)...(157): Cupin domain
  misc_feature (1)..(159): Xaa is any amino acid
MAQTMNIPVEEYLAFEEGQRDFSFSFLQNAAQIFGVDVVDIISGESPKLTKCAIVKKGEGYDIERRKAYDYKHLAFTFSNKRAEPFLVKVEPKEDEKLTLHSHEGQEFDYMLSGKIEFHFDKAFYVLNEGDSVYFDSGVPHAMKALGDKAATFLAVVIK

SEQ ID NO: 71325 - DNA, 1719 bp, Unknown
  Obtained from environmental sample
  misc_feature (1)..(1719): n is a, c, g, or t
atgttgatttacgaaaaatttatcggaaaaaacagagacgattttacttctttcgaagaccttaaaaaaaattataaggtcacctataaagacgattttaattttgcttacgatgttcttgatgaattggcaaaaacacagccggacgcgctctgtatgctgtgggtttccaacgaaggcgaagaaaaacgaataacctttgcggatatggcgcggtactcaaataaagccgcgaattattttaaatcgctgggcatacgcaagggcgattttgtaatgctggtactcaaaagaagctaccttttctggtactgcatgatgggtctgcataaactcggcgcgatagccgtgcaggcggcgcatcttttaacaaaggacgattacatctaccgttgtaacgcgggcggcattaaaatggcggtcataacaggagataataattgcaccgaggcttttgacggcggtttaagcgaatacaagacgataaaacttaaagcggtaaccaaaggaaaaaaagcaggcgacggctggcttgactttgaagcgggactggaagccgcctcagatgattggaagcgtcccaaaggagcggaagcgacccatgcctccgacataatgataatgtcgttttcttccggcactaccggttatcccaaaatggtagcgcacgattacacctacccgctcggtcacttggcgacgggagttttttggcacagagtggaaaaaggcggcttgcattttacaatttccgataccggctggcttaaatcgctgtggggaaaaatgtacgggcagtggctcggcgaatgcgccatccttacttacgattttgaaaaatttaacgcgcgcgatattttaaaagttatcgaaaaatataaagtgacaagtttctgcgccccgccaaccatgtaccgctttatcatgaacgaggacgttccttcttacgatctttccgctcttaaacactgtaccgcggcgggtgaggctttaagccaagaccttttcaaaaaatgggaaacaatgacggggcttaacatttacgaaggtttcgggcagacggaaacaacaatctgctgcggaacactctaccctttcactgaaccgcacgccagttcaatgggcatggaaattcccggttacgatatttcgctcctcgacgcggacggcaacaatgtccccgtcggcgcaacgggtgaaatctgcatgaaagcggatcgcccaaaacacggagttatccgccgtccggtcggactgtttatcggttactacaaaaatgatgaagctacaaatttctcatggcatgacggatatttccacacaggcgatcttgcctactacgacgaacagggttatttgtggtatgtgggacgcaacgacgatgtaattaaatcgtccggttaccgcataggacctttcgaagttgaaagcgtgctgttaaaacatcccgccgtcgcggaaaccgcggtaaccggaatacccgacccaatccgcgggtttaacgtaaaagcgactatcgtacttgcaaaaaactttcaggcttccgatgaacttatcaaagacttgcaggattttgtcaaaaaaaataccgcgccgtacaagtacccaagagttatagaatttgtcagcgaactgccgaaaactataaacggaaaaattcgccgcgcggaaatacgcaacagggacatgggcaagccgccgacagaaagcgatatttaa

SEQ ID NO: 71326 - protein, 572 aa, Unknown
  Obtained from environmental sample
  DOMAIN (66)...(490): AMP-binding enzyme
  misc_feature (1)..(572): Xaa is any amino acid
MLIYEKFIGKNRDDFTSFEDLKKNYKVTYKDDFNFAYDVLDELAKTQPDALCMLWVSNEGEEKRITFADMARYSNKAANYFKSLGIRKGDFVMLVLKRSYLFWYCMMGLHKLGAIAVQAAHLLTKDDYIYRCNAGGIKMAVITGDNNCTEAFDGGLSEYKTIKLKAVTKGKKAGDGWLDFEAGLEAASDDWKRPKGAEATHASDIMIMSFSSGTTGYPKMVAHDYTYPLGHLATGVFWHRVEKGGLHFTISDTGWLKSLWGKMYGQWLGECAILTYDFEKFNARDILKVIEKYKVTSFCAPPTMYRFIMNEDVPSYDLSALKHCTAAGEALSQDLFKKWETMTGLNIYEGFGQTETTICCGTLYPFTEPHASSMGMEIPGYDISLLDADGNNVPVGATGEICMKADRPKHGVIRRPVGLFIGYYKNDEATNFSWHDGYFHTGDLAYYDEQGYLWYVGRNDDVIKSSGYRIGPFEVESVLLKHPAVAETAVTGIPDPIRGFNVKATIVLAKNFQASDELIKDLQDFVKKNTAPYKYPRVIEFVSELPKTINGKIRRAEIRNRDMGKPPTESDI

SEQ ID NO: 71327 - DNA, 858 bp, Unknown
  Obtained from environmental sample
  misc_feature (1)..(858): n is a, c, g, or t
ttgaaagaggcgaaaaaaatgaaaaataaaaaattatttgctaaatttgccatgatagcggttatactgataacagcctgcgttacggataaaagtaataaagacaaccccgaagcatggctaaacgaacacggaggcgaaattgtggactacgcctattcaaaagcggatattgaggcggaaattgaagccaaatggaaatcgtacggatacaaagaaaaaccgaccaaatacatcgccataagttttgacgacggtccttgttccccgtccaactacggcggaactgccgccatactcgcaaaacttgatgaattaaaagtaaaagctactttttttgtaattggacagaatgtccgcgcaaataaagccgccgcacaggcgatttttaacggcggacacgaattaggcagccattccgacagctataacagcctaggaagtttatctgtaagcgaaatagccgcaagccttgacgcggcggggctggctattaaggaaataaccggaaaatacccctgtctttttcgcgctcccaacctaaaccacggggaaaacctgtcaaaagtctgtagggagcggaaaatggcgctaattgacggaaatgtccacaacgactgggacggaaccggacatacgccaaattcgataaaaaacagcgttcttgccaatcctcaggacgggggaataatccttttacatgacaataatacgtcaaaaggcgatactttgagcgttttgccatatataatcggcggacttagggaaaaagggttctggattatgccggttgggcagcttgccgccataaaagggcaggttttagaagccggaaaaaggtataattccgttaattag

SEQ ID NO: 71328 - protein, 285 aa, Unknown
  Obtained from environmental sample
  SIGNAL (1)...(26)
  DOMAIN (72)...(199): Polysaccharide deacetylase
  misc_feature (1)..(285): Xaa is any amino acid
MKEAKKMKNKKLFAKFAMIAVILITACVTDKSNKDNPEAWLNEHGGEIVDYAYSKADIEAEIEAKWKSYGYKEKPTKYIAISFDDGPCSPSNYGGTAAILAKLDELKVKATFFVIGQNVRANKAAAQAIFNGGHELGSHSDSYNSLGSLSVSEIAASLDAAGLAIKEITGKYPCLFRAPNLNHGENLSKVCRERKMALIDGNVHNDWDGTGHTPNSIKNSVLANPQDGGIILLHDNNTSKGDTLSVLPYIIGGLREKGFWIMPVGQLAAIKGQVLEAGKRYNSVN

SEQ ID NO: 71329 - DNA, 819 bp, Unknown
  Obtained from environmental sample
  misc_feature (1)..(819): n is a, c, g, or t
atggcagaagtagaaggtctaaccgacgctaattttgagttatatcgagatctcatttacagagaaagtggaataacatttactcctactaaccgctctattcttgaaagccgattaaaagaacgtcttcgtgaaaaaggcttaacctcaatggttggttaccttgaacaggtaatggcaagcaaagatgagcttaacggattcttggattctatcacgactaacctgacgcggttcttcagaaatcaagcgcaattcgacgctctggaaaaatacgtcattcccgagttaattaacaatatcagaaaattccccggaacaatcagaatatggagcgccggatgttctacaggtgaagaaccctactctatcgccatgttgttaagtgaaattctcccaaaagcttggaactttgaaattcttgccagcgatatttcgctgaaatgtttaatgacggcaaaagaaggtttttacgacataaacagaatcgtcggtatccccgataactatcttgcgaaatattttgacaaagtagacggcggatacaaggttcatgctgatattcacgaaaaaatcaaattcgactatcataacctgaaaaacgattctctgcaaagaaacttcgatgtcgttttttgtcgtaacgtaattatttattttgatgatgtcgcgcaaaccgtggttatgggacatttttgggatgctatgacgcctaaatctttcttatttattggtcattcggaatctttgtttggaatgaagacaaaattcgaattcttaaaaaccgaatgggcgacactctattgtaaaaaagaataa

SEQ ID NO: 71330 - protein, 272 aa, Unknown
  Obtained from environmental sample
  DOMAIN (8)...(64): CheR methyltransferase, all-alpha domain
  misc_feature (1)..(272): Xaa is any amino acid
MAEVEGLTDANFELYRDLIYRESGITFTPTNRSILESRLKERLREKGLTSMVGYLEQVMASKDELNGFLDSITTNLTRFFRNQAQFDALEKYVIPELINNIRKFPGTIRIWSAGCSTGEEPYSIAMLLSEILPKAWNFEILASDISLKCLMTAKEGFYDINRIVGIPDNYLAKYFDKVDGGYKVHADIHEKIKFDYHNLKNDSLQRNFDVVFCRNVIIYFDDVAQTVVMGHFWDAMTPKSFLFIGHSESLFGMKTKFEFLKTEWATLYCKKE

SEQ ID NO: 71331 - DNA, 486 bp, Unknown
  Obtained from environmental sample
  misc_feature (1)..(486): n is a, c, g, or t
gtgtcttttactatatggatatcttctgatactgaacctgaaggcttttgtataaagtcgcttgctccaagatcaagagcttccatggtaatagccgcgccgcgggcggcaacggaggaaagtattacgacggggatatcgatccctctgctttttcgttcctttaaaaattcaatgccgttcatttccggcatttcaagatcaagacaaataacatccggctcaacacgggggattttttgcagggcaaaaataccgttcattgctttttcagcaacggtcaagcccggtgtgtcttcaatcatgcggctgattaagttgcgcattaacgccgaatcatctacaactaatactgatatttcatctgccattttatttttccttcttttttcaattattcttttttacaatagagtgtcgcccattcggtttttaagaattcgaattttgtcttcattccaaacaaagattccgaatgaccaataa

SEQ ID NO: 71332 - protein, 161 aa, Unknown
  Obtained from environmental sample
  misc_feature (1)..(161): Xaa is any amino acid
MSFTIWISSDTEPEGFCIKSLAPRSRASMVIAAPRAATEESITTGISIPLLFRSFKNSMPFISGISRSRQITSGSTRGIFCRAKIPFIAFSATVKPGVSSIMRLIKLRINAESSTTNTDISSAILFFLLFSIILFYNRVSPIRFLRIRILSSFQTKIPNDQ

SEQ ID NO: 71333 - DNA, 1068 bp, Unknown
  Obtained from environmental sample
  misc_feature (1)..(1068): n is a, c, g, or t
atggcagatgaaatatcagtattagttgtagatgattcggcgttaatgcgcaacttaatcagccgcatgattgaagacacaccgggcttgaccgttgctgaaaaagcaatgaacggtatttttgccctgcaaaaaatcccccgtgttgagccggatgttatttgtcttgatcttgaaatgccggaaatgaacggcattgaatttttaaaggaacgaaaaagcagagggatcgatatccccgtcgtaatactttcctccgttgccgcccgcggcgcggctattaccatggaagctcttgatcttggagcaagcgactttatacaaaagccttcaggttcagtatcagaagatatccatatagtaaaagacacgctggtaagtaaacttttgggttatggcggatcatatcgcaaatcgaaaggtaaaaaaattctcgctcctgcagaatatcatgaaaaacctgcggcaaaagaaacaaaaaacatagatttagcggttcattttaatcttatatctacagtgcccaccggtcccgctcaagctcccgtcagagcgcgtcatccggctaccacggaaataatcgccatcggtatcagtacgggaggacccgacgctctgcgcgtagtattcgcaaatttagacgccgatttaaaagtgccgattgtcgtagtacagcacatgcctgcgggttttacaaacgaattcgcaagaagtcttgatcgcatttgtccgttagatgtaaaggaagcggaagaaggcgatgaaataagaccgggtagaattcttatcgctcagggcaataaacatcttgaagttgaaaaaaaagcctccggcggactcgtccatctttccgacaatcctctggtttcgggtcacagaccttccgccgacgtgcttttcgcgtctgtagcgatggcgtatacaaatcgtgttcttggagtaatcatgacgggtatgggacgcgacggagcgcagcacctcggcacgatttacaaagaaggcggcataactcttgggcaggatgaaaaaagncgctgttgtttacggaatgccgcgtgtcgcttatga

SEQ ID NO: 71334 - protein, 355 aa, Unknown
  Obtained from environmental sample
  DOMAIN (5)...(122): Response regulator receiver domain
  misc_feature (1)..(355): Xaa is any amino acid
MADEISVLVVDDSALMRNLISRMIEDTPGLTVAEKAMNGIFALQKIPRVEPDVICLDLEMPEMNGIEFLKERKSRGIDIPVVILSSVAARGAAITMEALDLGASDFIQKPSGSVSEDIHIVKDTLVSKLLGYGGSYRKSKGKKILAPAEYHEKPAAKETKNIDLAVHFNLISTVPTGPAQAPVRARHPATTEIIAIGISTGGPDALRVVFANLDADLKVPIVVVQHMPAGFTNEFARSLDRICPLDVKEAEEGDEIRPGRILIAQGNKHLEVEKKASGGLVHLSDNPLVSGHRPSADVLFASVAMAYTNRVLGVIMTGMGRDGAQHLGTIYKEGGITLGQDEKXRCCLRNAACRL

SEQ ID NO: 71335 - DNA, 1767 bp, Unknown
  Obtained from environmental sample
  misc_feature (1)..(1767): n is a, c, g, or t
atgacatataacagtaaaacacattcgccgctttggatttttgtcgtttatatgcttgcttcctgcgccttaattatgatttatcggtttgcttttcccggctctcccgcgcccgtattgattttttcacgtaactggcgcttgttacacggcgcgctggaattgtttaatttgtttccggccttggttttttcatcgcttgtgctccctttcgggattgtatccttcgaggaagattaccccagtttctcgcaaatattttttaagcggttaatttcttcggtgttaattgctatttttgcggctgttctttacggcgcgattttcttttttgcgtatcccatgcttaaaaattacgaaggcaatttgcaatacaagggggaaatgtaccatcttgcgaaagaaaacgcgcgccttaaatgcaagaccggcgagtgggtagaggcgtctcagttccttgccatttgcgatcaagtttgggaaaacagccctgagttagccgaagtaagaaccgagattgaaatgaatcttttcaaagaataccttgcggatcttgaaggaagagaaaaagcgcgggctagtttggcaagagattggcgcggcgctgaagttactactttgtccgccgggggcaaacagcctttagacgccgtaagcgcgcttgccatgtgcaataccgcatttgccgaaaggcgttattttgacgcgcactggcttgctgttctcgccggacggcttgcgttggacggaagcccggaagcggcgaccgccgcgcgccttgcgaccgccgcgtggaatcaaattgagtctcaggcgccaagcgaaagggaaaaccatatgcattccctgtatcaattaaaactttccgggtatcaggaaatgaacaacagcgattggatagccgcttattatatatttttagaattgttagaatcaactcccgatgatccggacgccaaaaaatttcttgccgcgtgtgagaacggtttaaaggattatacattttttattgacgagatgcatgtaactatcggagaaatactgacaggcgcgttattttctttgccgactcaatccggcagggcagtgatgcgttttaccaatctttccacatcagcggattatgcttacggtatgggatttgagtatatggagttcgatgtattttcccgcccatatataagcataagagcgccttacgcgaaacttttgcctgttaccgtcagcggaaaagacaagataatggttattactcacactctggaccgttataataaagatatcagttgggaaagcgagtggcttctgggtaataaaaagatttctgttattatgctggatataagttttgaggattttctgcttttatccaccgtgcgccgcggcctttcaactcttcaggttgacgaactttttacagcttccaaacaactaggctcactgggatatgtttcgcagatttttgaagccgaaatactcaaccgtataagctccactgtatttttcctgcctatggcgatttttgttatagttataggctggcgttacagaacaaaaaaaagaccgaggtattttttcttccttctgcttcccgttctgcccattgttttcagcggttttgttttcttttaccggaatttattaaacactgttggtatttggcttgtcatcagtttaggatttgcggcggctcttacaataattattgtcgctcttgcggttatattgtttatttctttgataacgcttgccgcccaacatgggtaa

SEQ ID NO: 71336 - protein, 588 aa, Unknown
  Obtained from environmental sample
  misc_feature (1)..(588): Xaa is any amino acid
MTYNSKTHSPLWIFVVYMLASCALIMIYRFAFPGSPAPVLIFSRNWRLLHGALELFNLFPALVFSSLVLPFGIVSFEEDYPSFSQIFFKRLISSVLIAIFAAVLYGAIFFFAYPMLKNYEGNLQYKGEMYHLAKENARLKCKTGEWVEASQFLAICDQVWENSPELAEVRTEIEMNLFKEYLADLEGREKARASLARDWRGAEVTTLSAGGKQPLDAVSALAMCNTAFAERRYFDAHWLAVLAGRLALDGSPEAATAARLATAAWNQIESQAPSERENHMHSLYQLKLSGYQEMNNSDWIAAYYIFLELLESTPDDPDAKKFLAACENGLKDYTFFIDEMHVTIGEILTGALFSLPTQSGRAVMRFTNLSTSADYAYGMGFEYMEFDVFSRPYISIRAPYAKLLPVTVSGKDKIMVITHTLDRYNKDISWESEWLLGNKKISVIMLDISFEDFLLLSTVRRGLSTLQVDELFTASKQLGSLGYVSQIFEAEILNRISSTVFFLPMAIFVIVIGWRYRTKKRPRYFFFLLLPVLPIVFSGFVFFYRNLLNTVGIWLVISLGFAAALTIIIVALAVILFISLITLAAQHG

SEQ ID NO: 71337 - DNA, 516 bp, Unknown
  Obtained from environmental sample
  misc_feature (1)..(516): n is a, c, g, or t
atgaagtacatatatttttacaaatatcagataaataaaaaattcgttataaaactgggaattgcggaagatagcggcaatacttccggcaaagccgccggcaaaaccgcgatttgcaatgttttcttaaatgccgtcaatgcgcttaaaggttatgaaaaaaaggaaactccgttgataaaaaaagcggctctgcaattcggcgaatatttcaagggtaaacgaaaaagttttaatctgcccttaactatgcaagggacggactttcaaatgaaggtatggaacgcgctaaaaagagttccctatggaaaaaccatcaattacggagaactagccgcgatgatcggcaatccaaaagcgtgcagagccgtaggcatggcgaaccataacaacccaatagcgatcattgtcccctgccacagagtaatcggccacgatggaagcttaaccggttacggaggcgggcttgaattaaaacaacaattactggaactggaaaaagctattactatgtaa

SEQ ID NO: 71338 - protein, 171 aa, Unknown
  Obtained from environmental sample
  DOMAIN (86)...(171): 6-O-methylguanine DNA methyltransferase, DNA binding domain
  misc_feature (1)..(171): Xaa is any amino acid
MKYIYFYKYQINKKFVIKLGIAEDSGNTSGKAAGKTAICNVFLNAVNALKGYEKKETPLIKKAALQFGEYFKGKRKSFNLPLTMQGTDFQMKVWNALKRVPYGKTINYGELAAMIGNPKACRAVGMANHNNPIAIIVPCHRVIGHDGSLTGYGGGLELKQQLLELEKAITM

SEQ ID NO: 71339 - DNA, 1938 bp, Unknown
  Obtained from environmental sample
  misc_feature (1)..(1938): n is a, c, g, or t
atggataaggatactttgtcaaaagtaagcgacggcgcttccgcggctatgctcgaaaaaagccgcgccgattgtgttgacacttgttttgctcgcgcggaaactcaacagacgcagtgcggtcttggcagaagcggcgtttgttgccgtatttgccacatgggtccgtgcagaattacgcctaagtcgcccaaaggaatttgcggcgcgacagccgatacaattgccgcgagaaatttccttcgcgaagttgtcggcggaacaagcgcacactcggatcacgggcggcatttggtgttgcagcttagagatgtagcgcagggaaaagcgcccggctatcaaattaaagatgaaaaagctctgcgccgagccgcgaaactttacgatgtgcaggaagagggcagaagcgctgaggaagtcgcgctggaactttcaaatgtattccttaacgaattttcagaacaggaaggttttttaaaaactttaaaattagctcctaaaaaaagacagggtatttgggaagccaccggcattaaaccgaacggaatagatcgaatggtagttgaggcgatgcacagaacgacgatgggcgttgatcacgattaccttaatttgcttcaccacgcttttcgggtgtctctcgcggacggctggggcggctcaagagtagcgtcgatttgttccgatatactctttggaactccgtccccggtaaaaagcgccgcgaatatcggcgtgttaaaaaaagatacggtaaatattttaattcacggacatgaacccgctctttctgaaatacttacgaccgttgttgctgatccgcagattgttgaatacgcgaaggcggcgggagcgaaggggattactttagccggtatctgttgtaccgccaatgaaattttaatccgccacggcgttccgcttgccggaaattttttacagcaggaattggcgatagtaaccggcgctgtcgaaatgatgataatagacgtacagtgctgtatgccgagtcttcccgatgtcgcgaaaaattatcacacggaaattatttccaccgccgacattgccaaaactatcggcgcaagccatgtcagcgtagggcatgacggcgatcctgtaaaacacgcgaaagagcttgtaaaacgcgccgtcgataattttaaaaacagagattcgtcaaaggtaaatattcccgcggacaatgaaaatcttgtcgccggtttttccgtagacgcgataaaatatatgcttggcggtcgataccgcgcttctttccgtccgttgaatgacgcaatcatagcgaacagaattctgggtgttgtgggaattgtcggctgtaataacacaaagcaaaaaacggacgattatacaaatacgctcaccctagaacttattaaacgaaatatactcgtgcttcaaacaggctgttcggctatcggaagcgcgaaggctggtctgttgaaaccggaagtcgcgttaaagtatgcgggcgcggggcttagggaagtttgcgaaactgtaggcattccgcctatactgcacatgggaagctgtgtggataactcaagaattcttgaagccgcggcggaagttgtttttgaggggggacttggagacgaccttggcggacttccagccgtcggcgttgcgcctgagtggatgagcgagaaggcggtcgccattggctgttactttgtcgcaagcggtgtcgatgtagtgcttggaaatccgttttatgtttccggttcggaagccgtgagcaattaccttcacaacgaagtcaggaaagaatacggagcaagtttccattttattgaagacccaatagaggcggcggatcgtattgtagaaataatcaatcaggcaagagacgcgcttggaattaacaaaaaagctgaacgcaaactcttcgatatgaaagacaggagggcaatgtaa

SEQ ID NO: 71340 - protein, 645 aa, Unknown
  Obtained from environmental sample
  DOMAIN (47)...(612): Prismane/CO dehydrogenase family
  misc_feature (1)..(645): Xaa is any amino acid
MDKDTLSKVSDGASAAMLEKSRADCVDTCFARAETQQTQCGLGRSGVCCRICHMGPCRITPKSPKGICGATADTIAARNFLREVVGGTSAHSDHGRHLVLQLRDVAQGKAPGYQIKDEKALRRAAKLYDVQEEGRSAEEVALELSNVFLNEFSEQEGFLKTLKLAPKKRQGIWEATGIKPNGIDRMVVEAMHRTTMGVDHDYLNLLHHAFRVSLADGWGGSRVASICSDILFGTPSPVKSAANIGVLKKDTVNILIHGHEPALSEILTTVVADPQIVEYAKAAGAKGITLAGICCTANEILIRHGVPLAGNFLQQELAIVTGAVEMMIIDVQCCMPSLPDVAKNYHTEIISTADIAKTIGASHVSVGHDGDPVKHAKELVKRAVDNFKNRDSSKVNIPADNENLVAGFSVDAIKYMLGGRYRASFRPLNDAIIANRILGVVGIVGCNNTKQKTDDYTNTLTLELIKRNILVLQTGCSAIGSAKAGLLKPEVALKYAGAGLREVCETVGIPPILHMGSCVDNSRILEAAAEVVFEGGLGDDLGGLPAVGVAPEWMSEKAVAIGCYFVASGVDVVLGNPFYVSGSEAVSNYLHNEVRKEYGASFHFIEDPIEAADRIVEIINQARDALGINKKAERKLFDMKDRRAM

SEQ ID NO: 71341 - DNA, 1791 bp, Unknown
  Obtained from environmental sample
  misc_feature (1)..(1791): n is a, c, g, or t
atgtcaaagcttatttgcaccggcgcgattgacggcgcggttgcgtttgttgcccaggctgtcaacaagttagatgaagcgataaaacaaaaaggtttggattgtcccgtaggttttcccgataccaattattttttgcctgtcatttattcttttacaggcagacaaatgaaaactcttgccgatttacgcagtattttggaagaagcaaaatcgcttttacccgcgcgccccgccgaaaatgtttggctgccgtatcttggaagcgcgcttgacgccggagtcgccgctcttttcgcgtgcgaagtaatcgaagcctgcaagtatcttattggtccgaatcctgttgacggcatttggcttggagcggctaacgatgtaattatgcgtgagcgcggaattgagtttgtagacggaaccgcgcccggttttgccgcgattacgggagccgcgcccgataacgccacggctgtaaaaatcgcgaaggaattacagcagaaaaatctttatgtatttatgggcggctgtacaaacggcgtgcagtttgcggagcagttagccgccgaaggcgtacagcttggctgggaaacccgccttgtgccttttggtcgggatgtttcttcgttgatttacgcgcttggtttcgccaaccgcgctgcgctttccttcggcggagtaaagccgggcgattatgaggcaaacttaaagtataacaagaacagaattttcgcttttgtcattgcgttaggtgaagtaacaaacgacaaatacgcggcggcggcgggagcaattaattacggcttccccgttattgcggataccgatattcctgaaattctgccgacgggcgtatgcacttacgagcatgtagtttcaaaagtgccgcacgataaaatcgtagaaaaagcccttgaagtacggggctgtaaaataaaaatagttaatgtgccgatacctgtcgcttacggtcccgcgtttgaaggcgagagaatccgcaaagaagacactcatgttgaattcggcggaaacaaaacccttgcttttgaatttgttacaagcgcggattatgactctattagcgacggcgaaatcaaggttatcggtcccgacattgacactgtggaaccgggcggaagactgccgctcggcatttgggtggaagtagccggcagaaaaatgcaacctgattttgaaccgatactggagaggcagattcaccacatggtcaacggcgcggaaggaatctggcacatgggacagagagacattgtatggactcgtgtttccaaaacaggttttgaaagaggcataaggcttaaacactacggagaaattttacacgccaaattgttagcggattatcccgctatagtagataaagtgcgcgtaacgcttgttaccgatcaagccgaagtggaaaaaaggcttgccatggcgcgtaaagtttacgacgaccgcaaccgcagactggaagccatgactgatgaatcagttgatactttttattcctgtctgctttgccagagcttcgcccccaatcatgtgtgcgttatcacaccggagcggcttggtctttgcggagcgtacaactggctggacggcaaagcggcttacgagattgacgaaacaggtcccaaccaaccgcttgttaaaggcgactgccttgattccgtaaagggaatctggtcgggagtaaatgaatatgtttacacaaacagccacaagtcgatagaatctttttgcgcttacttcatcatggacagaccccatgacaagctgcggctgctttga

SEQ ID NO: 71342 - protein, 596 aa, Unknown
  Obtained from environmental sample
  SIGNAL (1)...(20)
  DOMAIN (315)...(596): CO dehydrogenase/acetyl-CoA synthase complex beta subunit
  misc_feature (1)..(596): Xaa is any amino acid
MSKLICTGAIDGAVAFVAQAVNKLDEAIKQKGLDCPVGFPDTNYFLPVIYSFTGRQMKTLADLRSILEEAKSLLPARPAENVWLPYLGSALDAGVAALFACEVIEACKYLIGPNPVDGIWLGAANDVIMRERGIEFVDGTAPGFAAITGAAPDNATAVKIAKELQQKNLYVFMGGCTNGVQFAEQLAAEGVQLGWETRLVPFGRDVSSLIYALGFANRAALSFGGVKPGDYEANLKYNKNRIFAFVIALGEVTNDKYAAAAGAINYGFPVIADTDIPEILPTGVCTYEHVVSKVPHDKIVEKALEVRGCKIKIVNVPIPVAYGPAFEGERIRKEDTHVEFGGNKTLAFEFVTSADYDSISDGEIKVIGPDIDTVEPGGRLPLGIWVEVAGRKMQPDFEPILERQIHHMVNGAEGIWHMGQRDIVWTRVSKTGFERGIRLKHYGEILHAKLLADYPAIVDKVRVTLVTDQAEVEKRLAMARKVYDDRNRRLEAMTDESVDTFYSCLLCQSFAPNHVCVITPERLGLCGAYNWLDGKAAYEIDETGPNQPLVKGDCLDSVKGIWSGVNEYVYTNSHKSIESFCAYFIMDRPHDKLRLL

SEQ ID NO: 71343 - DNA, 663 bp, Unknown
  Obtained from environmental sample
  misc_feature (1)..(663): n is a, c, g, or t
atggaaatgtacgatatgcttcccagccttaaagaaggcggaacattcctgctcaacagcccgtataaagcggctgatgtatggaaagaacttcccgtagaagtccagaaaaaaatcatagataaaaaacttaaattctatgtgattgacgccgctcacattgccagagaaacaggcatgggtaaccgtatcaatacagttatgcaagccgcttactttaaaatctcaggcatactggaagaagccgaagccgtcaaattgatgaaagaacatatccagcattcctacggcaaaaagggagccgacgttgtagagaagaactacaagacggtagacgcctcattaagcgccgttgaggaagtgaaatatccttccaagacagaaggcgatcaccacatgaaagtgccttttgccacggcaaagaacgatccacattttgagggatttaattctaaatggataaaagacacattgggagcggtatcataccaagccggcgaatcattgcctgtcagcaaatccccgaagacggaactttccccacagcgacaagccagtacgaaaaacgctcagtcgcggaaagggttccgatttggaatcccgatgtttgtacccagtgcggtatctgctccgttgtctgcccacatgcctgtatccgcatga

SEQ ID NO: 71344 - protein, 220 aa, Unknown
  Obtained from environmental sample
  DOMAIN (1)...(116): Pyruvate ferredoxin/flavodoxin oxidoreductase
  misc_feature (1)..(220): Xaa is any amino acid
MEMYDMLPSLKEGGTFLLNSPYKAADVWKELPVEVQKKIIDKKLKFYVIDAAHIARETGMGNRINTVMQAAYFKISGILEEAEAVKLMKEHIQHSYGKKGADVVEKNYKTVDASLSAVEEVKYPSKTEGDHHMKVPFATAKNDPHFEGFNSKWIKDTLGAVSYQAGESLPVSKSPKTELSPQRQASTKNAQSRKGFRFGIPMFVPSAVSAPLSAHMPVSA

SEQ ID NO: 71345 - DNA, 1626 bp, Unknown
  Obtained from environmental sample
  misc_feature (1)..(1626): n is a, c, g, or t
atggataaaagacacattgggagcggtatcataccaagccggcgaatcattgcctgtcagcaaatccccgaagacggaactttccccacagcgacaagccagtacgaaaaacgctcagtcgcggaaagggttccgatttggaatcccgatgtttgtacccagtgcggtatctgctccgttgtctgcccacatgcctgtatccgcatgaaaaatcttacagccgatcaggttgcgaaagcgcccaaaggtttccagaccgccgaagttaaacccaaagcggttgagggacagaaagcgacattggttatttcctgcgccgactgctatgaatgcggcgtttgtttcaacgcctgtccgatgtgcaaaggcgacggaagtccgcaggctcttacctataaatcatattccgatgatcccgaattccacgcggaacaaggcgagatatggaattacttcctcagcctgcccgaaactccggttgccggcgaattgagcaatcccaaagctctcgcgtacaaacgcccgttatttgaattctcaggcgcgtgcggcggatgcggcgagacgccgtacgtcaaacttatgtcgcagcttttcggcgacagagcgcttatagccaacgccacaggttgttcgtcaatctacggcggtaacctgcctaccacaccctattgccagcgttcagacggacgcggtccggcgtggtcaaacagcctctttgaagacacagcggaattcgcgctgggcttcagacttacaagcgacaaacttgccgttcacgcccgtgaaatggcggagaaggcaaagagcgaaggtatcgccgcgggaatcattgataaacttcttgcaaacacccaagcggacgacgccgcaatcgacgaacagcgcaaaaatgttgacgagcttaaagccgctcttaaaaaagattccaaacccaccgcaaaattgctgctctcacttgccgaccactttgttaagagatcggtatggggcttcggcggcgacggctgggcttatgacatcggcttcggcggcttagaccatgttcttgcctccggcaaaaacgtaaatctgctttgtatggacacggaagtttactccaacacaggcggacagatgtcgaaagccacccctgtaggcgctatagcgaaattcgccgcttccggtaaagagattaccaaaaaagaccttggcgcaatagcgatgagctacggctatgtctatgtggcaaagatttcgttaggcgcaaatatggctcaaaccattaaagctttccgcgaagccgaatcctacgacggtccgtcgctgattatcgcgtacgcgcattgtatcaaccacggtattgatatgagcaagggattggatcaaggcaaagcggtagtatcaagcggcttatggcccctgttccgctatgacccgcgccttaaagacgagggcaagaaccccttccagcttgactccaaagaacccacttttgcgcttgaagacgttatgtacaaagaagtccgtttcaagagcctcaaagccgcagacccggctcgcgccgatatgctgcttgcgaaagccaagaaacacgctgaacgcctttacaaagagtacaagtatttgtcggaaagaccgttctag

SEQ ID NO: 71346 - protein, 541 aa, Unknown
  Obtained from environmental sample
  DOMAIN (45)...(68): 4Fe-4S binding domain
  misc_feature (1)..(541): Xaa is any amino acid
MDKRHIGSGIIPSRRIIACQQIPEDGTFPTATSQYEKRSVAERVPIWNPDVCTQCGICSVVCPHACIRMKNLTADQVAKAPKGFQTAEVKPKAVEGQKATLVISCADCYECGVCFNACPMCKGDGSPQALTYKSYSDDPEFHAEQGEIWNYFLSLPETPVAGELSNPKALAYKRPLFEFSGACGGCGETPYVKLMSQLFGDRALIANATGCSSIYGGNLPTTPYCQRSDGRGPAWSNSLFEDTAEFALGFRLTSDKLAVHAREMAEKAKSEGIAAGIIDKLLANTQADDAAIDEQRKNVDELKAALKKDSKPTAKLLLSLADHFVKRSVWGFGGDGWAYDIGFGGLDHVLASGKNVNLLCMDTEVYSNTGGQMSKATPVGAIAKFAASGKEITKKDLGAIAMSYGYVYVAKISLGANMAQTIKAFREAESYDGPSLIIAYAHCINHGIDMSKGLDQGKAVVSSGLWPLFRYDPRLKDEGKNPFQLDSKEPTFALEDVMYKEVRFKSLKAADPARADMLLAKAKKHAERLYKEYKYLSERPF

SEQ ID NO: 71347 - DNA, 2130 bp, Unknown
  Obtained from environmental sample
  misc_feature (1)..(2130): n is a, c, g, or t
ttgtttcagccatgtttgggcttcagttttttcccgacgttccgggaatattctttgtccgctcattcgggattctttcccctgcttatccccgcgtattttttctacgccgcggctgttttgtccgacaagaattggcgtcccgacaggatatttattctaaacgggtatatacttccgtttttaaccctttccatagggtatgtatttttccgcgattatgacatccgtcaaacacagtcctcgttcttgtattctatgggaaaaacaggtttcagcctttttattatcaccgttactgtaatgaaaatcgtacttttacaggtgttaagaaatatcctcttttttaaagaaaccaaaataatgcaaaggaaaatactgctcccgcctccgcttgaggaagagacaacgaacgaaaacgccgttgttccctacacgaatgatctgcaaacggaagtcgtaaatgaggataatcaggaaactcaaacaacatctcaaacagaaattttagaagcagataataatgaagaaatcgaagaacttgatgaagttgacgtcggaatggatatcgacaccgatacagaaaccgagaccgatgacgaagaagacgatgttgacgctgtaacacgcgcattggaagaagcggaagctgcggcggcggctcacgcggaacaggtgcgcaataaaaacaaaaagtttagtaatcttcgcaataaaaaatacatggttccggtggatattcttaacgaataccccgacggcgaatactgggtaatcgatcaggctacaagggacgcggctatcgcgttaaaagaaactcttaacgaatttaatattcaggcggaagttacaggcataagaaaaggtcccgtaattactatgttcgagattcttcccgctcccggcgttaaactttcaaaaattgtcggcttacaggacaatatcgccttgcgtcttgccgcttcgtccgtgcgtattgtcgcccctattcccggaaaacacgccgtaggtatcgaagttcctaacgcaaaacgcaatattgtctcttttaaagaaattatcgaaaacgagcttcagcgcgaagagaaaaaaatggagattcccgtcgttatgggaaaagacatcacaggggaagcgcagacagtcgatcttgttcaaatgccgcacctgttaatcgcgggcgctaccggttcgggaaagtcagtctgtgtaaactccataatactttcgatactgtatcagcttcatccggcggagtgcagacttatgcttatcgacccaaaaattgttgagttgaaattgtacaacgacatccctcatttattgacgccggtaattaccgattcaaaaaaagcgtttcaggctttacaatactgcatttatgaaatggagagacgctatgcctgtcttgactcaatgggtgtgcgcgacattcgcagttacaacaaacgcgtcaaagaaaaaaatgtcgcgcaggagtatatgccctatatcgtcgttgtaattgacgaatacgccgatttaatgacgactacgggaaaggaattggagtccaccgtggcaaggcttgccgcgatgagccgcgccgtcggcattcaccttgtgcttgcgactcagcgtccttctatcgacgtaattacggggcttatcaaggcaaacattccaagccgtatcgcgttcatggtcgccagtaaaacggacagccgcatcataatcgacatggttggcgctgaaaaacttttaggcaagggcgatatgctttattccggcgttgtcgatcctttcccgattcgtatgcagggcgcgtttatttccgaagaagaagtagaatcggttgttgaatatgtaaaatcattcggcgagcccgattatatagacgatgaaattttctttgaagaagaggaagacgcaggcgcttccctattctccgacggtgatgatccgttatacgaaaaagcgctggaaatagtttatcagcagggtaaggcgagcgccagttttattcaacgcagactaaaaatcggctttaaccgcgccgcgagacttatcgatgaaatggaacatcacggagtggtaggacccgcgaacggaagcaagccaagagaactggtaagagacttcagcgcgtaa

SEQ ID NO: 71348 - protein, 709 aa, Unknown
  Obtained from environmental sample
  DOMAIN (349)...(543): FtsK/SpoIIIE family
  misc_feature (1)..(709): Xaa is any amino acid
MFQPCLGFSFFPTFREYSLSAHSGFFPLLIPAYFFYAAAVLSDKNWRPDRIFILNGYILPFLTLSIGYVFFRDYDIRQTQSSFLYSMGKTGFSLFIITVTVMKIVLLQVLRNILFFKETKIMQRKILLPPPLEEETTNENAVVPYTNDLQTEVVNEDNQETQTTSQTEILEADNNEEIEELDEVDVGMDIDTDTETETDDEEDDVDAVTRALEEAEAAAAAHAEQVRNKNKKFSNLRNKKYMVPVDILNEYPDGEYWVIDQATRDAAIALKETLNEFNIQAEVTGIRKGPVITMFEILPAPGVKLSKIVGLQDNIALRLAASSVRIVAPIPGKHAVGIEVPNAKRNIVSFKEIIENELQREEKKMEIPVVMGKDITGEAQTVDLVQMPHLLIAGATGSGKSVCVNSIILSILYQLHPAECRLMLIDPKIVELKLYNDIPHLLTPVITDSKKAFQALQYCIYEMERRYACLDSMGVRDIRSYNKRVKEKNVAQEYMPYIVVVIDEYADLMTTTGKELESTVARLAAMSRAVGIHLVLATQRPSIDVITGLIKANIPSRIAFMVASKTDSRIIIDMVGAEKLLGKGDMLYSGVVDPFPIRMQGAFISEEEVESVVEYVKSFGEPDYIDDEIFFEEEEDAGASLFSDGDDPLYEKALEIVYQQGKASASFIQRRLKIGFNRAARLIDEMEHHGVVGPANGSKPRELVRDFSA

SEQ ID NO: 71349 - DNA, 1359 bp, Unknown
  Obtained from environmental sample
  misc_feature (1)..(1359): n is a, c, g, or t
ttgggttttatcatcagcgtaacaaaatggaaatacaaacatgtcggcgatttactgattgggttcggcttcttgttcctaggtctttatttcctttctcacggaatagaaaattcaaatagtctttttgattttgcggcaatcggaacaatcagagaaaacagaattctcgcggtcttaatcggcttgggcgtcggattggtgatgaccataattattaattcatcttccgcggcggtaacattaataatgacgcttgcctttcaggatgttataacttatgaaatggcagccggcatggtattgggttccaacgtaggcactaccatcaatgcggttcttgccggtatcgccggaaacaccgaatcaagacgcgcggctctcgcccatgttctgtttaatgttctgggacttatctgggcgcttccgctgttattcccattgcttagacttgtcgattctatttttccgggaaacccgacggcggcaggtcccggcaattccgcgatacctgttcatctggcggggcttcatactttattcaacataataaatacaattatcttcctacccttcgtaaaacaatacgcaaaattaatctccttccttattccctacaaaaagcaggaagagaaaagcgaacattacaaatttgcgtatatttccgcgggcaacaccggttcgcctgaacttaatatccttcgcgcggaaaaagaaatcagcgacatggctgggattgtctcttttatgtattcccgtttttatactgtgttacggagcttgcgcgaagaggacagtaacgacaaagaggataccgccgagttgtgtacggaattgttaaaaaaagaagaatacattgatgaaatgcgcgaaacgctaaccaattttttaattgaatgttcccgcgtaaaactaaatccaaagaccgaaacccgcgttacatatttaatgcaagtaattgtcgcgcttgaatcaatgagcgatgaatgttacagtatcagccgtttgctggaaaaaagcgtcggcaagaattgcatttttaaagacaaggaaatggacgagcttattccctatgtaggaaaagtagaggaatttttaaacctgcttgaaaaccagcttggacgtaatccgtcgtcggaactgaaaatacgcgccgcggagttggaaaaccaaatcgacaaagaacgtaagaagctgcagaagctcggacgcaagcgaattgaggcgggcggcaatgtaaaagccgaattgctttttatcgatcttgtccgcagaatagaaaaacttggggattattgtttcgagatttcagaagaaaacactctcaagaaatggataaacaatattattaccagataa

SEQ ID NO: 71350 - protein, 452 aa, Unknown
  Obtained from environmental sample
  DOMAIN (24)...(190): Na+/Pi-cotransporter
  misc_feature (1)..(452): Xaa is any amino acid
MGFIISVTKWKYKHVGDLLIGFGFLFLGLYFLSHGIENSNSLFDFAAIGTIRENRILAVLIGLGVGLVMTIIINSSSAAVTLIMTLAFQDVITYEMAAGMVLGSNVGTTINAVLAGIAGNTESRRAALAHVLFNVLGLIWALPLLFPLLRLVDSIFPGNPTAAGPGNSAIPVHLAGLHTLFNIINTIIFLPFVKQYAKLISFLIPYKKQEEKSEHYKFAYISAGNTGSPELNILRAEKEISDMAGIVSFMYSRFYTVLRSLREEDSNDKEDTAELCTELLKKEEYIDEMRETLTNFLIECSRVKLNPKTETRVTYLMQVIVALESMSDECYSISRLLEKSVGKNCIFKDKEMDELIPYVGKVEEFLNLLENQLGRNPSSELKIRAAELENQIDKERKKLQKLGRKRIEAGGNVKAELLFIDLVRRIEKLGDYCFEISEENTLKKWINNIITR

SEQ ID NO: 71351 - DNA, 1803 bp, Unknown
  Obtained from environmental sample
  misc_feature (1)..(1803): n is a, c, g, or t
atgtcagataacgaaaaaaacataccgttacgaagcgaaatcgccgcaaacgacacatgggatttgtcaaaactttttacaagtgatgaagaatggaacaagtctcttgcggaatttgaaaaaatggcggaaaagatttcttcttttcagggaactttgggcaaatccgcggttcatcttgccgattatgccgatttttcaaacagccttaacctgttgggagagcggcttggcaattacgcttttttaagacaaagcgaagatgaaggatcgtcaaccgcgcgcacaatggtcggaaaaataacgatggcaagcgcgaaagcaagcgccgccgcctcatgggaaaaccccgaaatacttgcaattccgcaaaaagacatggagacttttttaactcatgaaaggatagcgaactaccgtatttacttgcaaaaaattctgcgctacagaccgcacattttaagcgacaaagaagagcgaattatcgctcttcacgctgaaggcgagggggcggtaagcgacgctttttccgtactcacaaacgttgattttaacttcggcatgattgacactccggaaggcaaacgccctctttcgcaatggtccttctcggtattcatggaaagcggcgaccgcgatttgcggcaaagggcgtatcaaactttctacggctgtttcgacgcgcacaaaaccgttatcgcaagcctgtactccggttcggtcaaacaggacgtgataaacgccagaataagaggcttcccttccgcgcgcgccgcgtcccttttcgccgatgacgtaagcgaggctgtctacgacaacttgatatccgcagtcagcggcaacctcgatgtattgcaccgctattacagtcttcgcaaacgagcgttaaaagtgcaggaacttcgccactacgacgtatacgctcctcttgtccccgccgctaaaaaaaccacaaactggaacgaagcagtcaatcttgtaagcgccgccctctctccgttaggtgacgaatatgtctccactctgcgcggcggactcctcggcaggtgggcggatcgttacgagaacaagggcaaacgctcaggcgcgttttcttcgggatgttttacaggcgacccgtatattttgatgaactacaaggaagattcaatccgagacgttttcactctagcccatgaaggcggtcattcaatgcactcatggtactccgcccgtaacaacccgtttccgcactacaattacacgatattcgaggcggaagtagccagcacttttaacgaagaactgttattccgctatctggtaaaacaagccgacagcaaagaattgcgtctataccttgtaaacaaacgcgccgatgacttattggcaactctataccgccaaaccatgtttgccgaatttgaaaaaataacccaccagcttgaagaaagcggcgttccgctgaccgtagaaattctccgcggcgaataccgcaaacttttagaaaaatatttcggaccggaaatgaaacttgaagaaacaagcgatcttgaaagtttgcgaatcccgcacttctaccgcgcgttttatgtgtacaaatacgcaacaggagtctccgccgcattagcgttagcggatcgtgttctctcaggcggcgaaaaagaaaggcaagactattttactttccttaaatccggcggctcacgcttccctatcgagtcattaaaagccgcaggtgtagacatgagcagtcccaaacctgtaaacgccgcctgcgccgtattcggcaagcttgttgatgagcttgaaaaattgctgtaa

SEQ ID NO: 71352 - protein, 600 aa, Unknown
  Obtained from environmental sample
  DOMAIN (118)...(186): Oligopeptidase F
  misc_feature (1)..(600): Xaa is any amino acid
MSDNEKNIPLRSEIAANDTWDLSKLFTSDEEWNKSLAEFEKMAEKISSFQGTLGKSAVHLADYADFSNSLNLLGERLGNYAFLRQSEDEGSSTARTMVGKITMASAKASAAASWENPEILAIPQKDMETFLTHERIANYRIYLQKILRYRPHILSDKEERIIALHAEGEGAVSDAFSVLTNVDFNFGMIDTPEGKRPLSQWSFSVFMESGDRDLRQRAYQTFYGCFDAHKTVIASLYSGSVKQDVINARIRGFPSARAASLFADDVSEAVYDNLISAVSGNLDVLHRYYSLRKRALKVQELRHYDVYAPLVPAAKKTTNWNEAVNLVSAALSPLGDEYVSTLRGGLLGRWADRYENKGKRSGAFSSGCFTGDPYILMNYKEDSIRDVFTLAHEGGHSMHSWYSARNNPFPHYNYTIFEAEVASTFNEELLFRYLVKQADSKELRLYLVNKRADDLLATLYRQTMFAEFEKITHQLEESGVPLTVEILRGEYRKLLEKYFGPEMKLEETSDLESLRIPHFYRAFYVYKYATGVSAALALADRVLSGGEKERQDYFTFLKSGGSRFPIESLKAAGVDMSSPKPVNAACAVFGKLVDELEKLL

SEQ ID NO: 71353 - DNA, 1350 bp, Unknown
  Obtained from environmental sample
  misc_feature (1)..(1350): n is a, c, g, or t
atgagcgattttaatccaaaagaattgtcggatttcgcaaagcattatggctttcattataaatacataaaccccgacgctattgtaaaagacgtattaaaagagatggaaaagggacttaacggcaaagaatcaagtcttcctatgattccgtcatatattacccccattacaagcattcccccgcttaaaacagttctcgctctggacgcgggcggaaccaatttaagggctagccttgttcattttaacgaaaagggcgaagctgtcgcgcagggaataaaaaaaataccgatgccgggaacatacggacaagtaaacgaggagcaattcttcgagataatcgcaaatgttacattgccgctgttaacagaaacaaatatagagggtattgggtttacgttttcctatcctatggaaattaccaaagacgctgacggaatacttttatcgttcagcaaggaagtggacgcccccgacgtaatcgggaagtcaatcggcaaaggactgcgcaaggctcttgccgcaaaaggctgcaattattccggtcccattgttctgttaaacgatactgtcgctaccctgctctccggtcttgtatcaattcctccggacggcgagacaacacggacgcgcgttgattttaacgcggaaaacggtcctgttatcggatttattttaggaacgggttttaacaccgcctaccctgaaaccgttattccaaaaataggttttaattcttcttctccgcaaattatggtatgcgaaacaggaaatttcgccgtccgctgtctaggcaagctggacaaagaatttgacagcacgacaaaaaatcccggcgtatattttcttgaaaaggcaacggcgggagcctatcttggtccattaacattgcacattcttaaacaggcgataaaagataaagttttaaaatttaaaaaatccgatgaacttttgaatatgccccatcttgaaacaagattcttaaatgagtttgcccacgctcccctgtcaaatcagggaccgcttggctcgctctttgccgccgatgaaactggcgctctcgcctcagtccaatacattacgtcgctggttacagaacgaggcgctctattttcggcggcagtgttagccgcaactattatcaaggcgggcggcaaatatgagccgtattcgcctgtccgcgtcgccgtagagggaacgacatacatgatttacaaaggaatgcgccgctctcttgagtcgtaccttcatcaaatattgtttaaggaaaaacctcgtccgtatattgtctctcctgtagaacaggcaagcctttacggagcggcggttgcggctttgtcaaaataa

SEQ ID NO: 71354 - protein, 449 aa, Unknown
  Obtained from environmental sample
  DOMAIN (220)...(447): Hexokinase
  misc_feature (1)..(449): Xaa is any amino acid
MSDFNPKELSDFAKHYGFHYKYINPDAIVKDVLKEMEKGLNGKESSLPMIPSYITPITSIPPLKTVLALDAGGTNLRASLVHFNEKGEAVAQGIKKIPMPGTYGQVNEEQFFEIIANVTLPLLTETNIEGIGFTFSYPMEITKDADGILLSFSKEVDAPDVIGKSIGKGLRKALAAKGCNYSGPIVLLNDTVATLLSGLVSIPPDGETTRTRVDFNAENGPVIGFILGTGFNTAYPETVIPKIGFNSSSPQIMVCETGNFAVRCLGKLDKEFDSTTKNPGVYFLEKATAGAYLGPLTLHILKQAIKDKVLKFKKSDELLNMPHLETRFLNEFAHAPLSNQGPLGSLFAADETGALASVQYITSLVTERGALFSAAVLAATIIKAGGKYEPYSPVRVAVEGTTYMIYKGMRRSLESYLHQILFKEKPRPYIVSPVEQASLYGAAVAALSK

SEQ ID NO: 71355 - DNA, 1704 bp, Unknown
  Obtained from environmental sample
  misc_feature (1)..(1704): n is a, c, g, or t
ttgagcttgaggtttttgtccacggagctttgtgtatcagcgtttcgggcgtctgcctcttttcccagtatctggtggaaatccgcaaaccgggggatgtgtactcaggcgtgcagaagactttaccgccccgccgctcacggatcaactctggataaggaaggggaaagcggatacttcttcagcccgaacgatttacagcttttggagcgcgtgccggatttggcggcagtgggaattaacgccttaaagatcgaggggcgtatgaaaagcgcgagctatgtgggcgcggtggtttccgcttaccggcttgtggtggacgctgtctctaacggcggcgaagaaaaaattaagcgaagcatagaacaggggcgggagattttgcgtaacgatttcgcgcgtccaaagacgcggtatttctttgacggcaaaacttccgccgccggtttagactggcttaatccggcgcaggacggcggcacgggtatcagtcttgggacaattcttaaagtgaaggggtcaggcggcgaaagacgcgcactcgtctgccctccgcaggggatgtccctgtcggcgaaggattcggtgcgtatacaccgcagcgacgactcggacagggttacgcacaagatcgcttttgttaagccggacggctcccattactggatttccgctcccgaaggctccctgggcgacagcgtctacctgatacagacaaaggaaatgcgaaaacgttacgcgccaataattgcggataataaagggggaaaggggccgggaagggataaggctccgtctgttcaaatacaagcggaacaaccgcatacgcgcaaaaaacatggttctgattttccggagggactgtacatagccgtctcaaaaccggaagatttctacattgtgcagtcttccaggccgcagcgggtaatgcttaccctttcccggaaaaacgcaagatatctgttagatgacactaaaccgcccctgccgtttaaacccgctgaagttattttaacgttagacccgtggtttccccaggatatcgccgaatacgaaaacggaaaaacggcgcaggaaatagagcggttaaccgaaaaaggctataatcaatatgtgttgaataatcccggacatttttcactgttcagggagcatgaaaatgtaaaattgatagcgggaccgtggctttatacgtttaattcgtgggcgctttcatttgtttcgtctctgggagtagacgcctttgtttcgccgctggaaaacaacaggcagaatttggaacggacattgggtatggaaagcagaaaaaaagaagacaaaggcggcagaaaacggcaaagcaagaatgtgttaaactctaaattttttattacggtttttgcgtggactcctttattcaacataagggcaaatcttggcaatatttttaattttgattcatttgcagataacatggacgaagaatttttacttgaaacaagtcccgaaggttcgcgcgtttacccgaaaaaatatttttctattaccgataaaattccttttttaaaagaggcgggattcgggcgttttattattgatttatcggggcaggtattaaaaaaatcaaattaccgcgatttgatgcgctctgttaacgataacgccccgctgcctcaatcaagccgttttaactggaaagacgggttttacgcgagtaaggtttaa

SEQ ID NO: 71356 - protein, 567 aa, Unknown
  Obtained from environmental sample
  DOMAIN (1)...(147): Peptidase family U32
  misc_feature (1)..(567): Xaa is any amino acid
MSLRFLSTELCVSAFRASASFPSIWWKSANRGMCTQACRRLYRPAAHGSTLDKEGESGYFFSPNDLQLLERVPDLAAVGINALKIEGRMKSASYVGAVVSAYRLVVDAVSNGGEEKIKRSIEQGREILRNDFARPKTRYFFDGKTSAAGLDWLNPAQDGGTGISLGTILKVKGSGGERRALVCPPQGMSLSAKDSVRIHRSDDSDRVTHKIAFVKPDGSHYWISAPEGSLGDSVYLIQTKEMRKRYAPIIADNKGGKGPGRDKAPSVQIQAEQPHTRKKHGSDFPEGLYIAVSKPEDFYIVQSSRPQRVMLTLSRKNARYLLDDTKPPLPFKPAEVILTLDPWFPQDIAEYENGKTAQEIERLTEKGYNQYVLNNPGHFSLFREHENVKLIAGPWLYTFNSWALSFVSSLGVDAFVSPLENNRQNLERTLGMESRKKEDKGGRKRQSKNVLNSKFFITVFAWTPLFNIRANLGNIFNFDSFADNMDEEFLLETSPEGSRVYPKKYFSITDKIPFLKEAGFGRFIIDLSGQVLKKSNYRDLMRSVNDNAPLPQSSRFNWKDGFYASKV

SEQ ID NO: 71357 - DNA, 621 bp, Unknown
  Obtained from environmental sample
  misc_feature (1)..(621): n is a, c, g, or t
atggaattactcgctcccgcgggctcgcctgaggcgcttgatgccgctgtcggcgaaggcgcggatgccgtttacctcggcttgaaagactttaacgcccgcttaagaagcgctaattttacttactcgcaatttgaggcggctttgcgcgccctgcgcagaatagggaaaaaggtctatgttaccgtaaacacggtttttgaacagcgcgaagcggacagaatgtaccagttcttaaaatatctagcgggacatgggccggacgcgcttattgttcaggatttcggtgtcgcggcgatggtaaaatctgaatttccttctttgcggcttcacgcttccactcagatgaatatcgcttcgggaagaggggcgaacgccttatccaggcacaatttttcgcgcgtggttttggcgcgggaactttcacttgaggagctaaaaggtattaaaaacgaaactaatcttgagcttgaggtttttgtccacggagctttgtgtatcagcgtttcgggcgtctgcctcttttcccagtatctggtggaaatccgcaaaccgggggatgtgtactcaggcgtgcagaagactttaccgccccgccgctcacggatcaactctggataa

SEQ ID NO: 71358 - protein, 206 aa, Unknown
  Obtained from environmental sample
  DOMAIN (72)...(206): Peptidase family U32
  misc_feature (1)..(206): Xaa is any amino acid
MELLAPAGSPEALDAAVGEGADAVYLGLKDFNARLRSANFTYSQFEAALRALRRIGKKVYVTVNTVFEQREADRMYQFLKYLAGHGPDALIVQDFGVAAMVKSEFPSLRLHASTQMNIASGRGANALSRHNFSRVVLARELSLEELKGIKNETNLELEVFVHGALCISVSGVCLFSQYLVEIRKPGDVYSGVQKTLPPRRSRINSG

SEQ ID NO: 71359 - DNA, 573 bp, Unknown
  Obtained from environmental sample
  misc_feature (1)..(573): n is a, c, g, or t
atgactacaaccaaaacaccatcgaagaaaaacgcaagatcagccaaaaaacccgcccgtaagaaatccaggaaagtaacaatagatgatgtatggaaaactattgatgaaatagggaaagctcaaaaagagacccagcgcattgtcggagatttgggaaacagattcggcgatatagcggaacattttttaactcccgctttacggaaaaaattcgataaattcgggtttgccttcgggaaaattagccgtaacctggaatgggaaaacgaaaaacttaattttttaatggaatttgacgcttttcttgaaaacggaacacaggcaatgattgtcgaggtaaaggcaaaattggacaaaaatgatattgacgaacaaatcaaccgcatggaaaaattacgccgttatgccgatttaactcatgacaccagacaattctattgcgccatggctacaatggccgccaaaaaagaagttataaaatatgctctggaaaatgggttttatctgattatgccatccggggaagatgtaaaggtaacggcgccggtatccaagccgaggttctggtaa

SEQ ID NO: 71360 - protein, 190 aa, Unknown
  Obtained from environmental sample
  misc_feature (1)..(190): Xaa is any amino acid
MTTTKTPSKKNARSAKKPARKKSRKVTIDDVWKTIDEIGKAQKETQRIVGDLGNRFGDIAEHFLTPALRKKFDKFGFAFGKISRNLEWENEKLNFLMEFDAFLENGTQAMIVEVKAKLDKNDIDEQINRMEKLRRYADLTHDTRQFYCAMATMAAKKEVIKYALENGFYLIMPSGEDVKVTAPVSKPRFW

SEQ ID NO: 71361 - DNA, 1044 bp, Unknown
  Obtained from environmental sample
  misc_feature (1)..(1044): n is a, c, g, or t
atgcgggtatttctgagcgtctatcccggctttactctggcaatccccatggaagcggtcgcttcaatgatgttgtacaaccaggaaacggaaaagaccgtacagtatgagccgaaaagccggtgtacctttatttcccttccatggttgttcaatatgcgcgatcagcctgttccccacggcgttattctgagggaatggaacagcaaagaaaacaaggtcgttctgctgaccgccgaagtaaaaagcgtcattgaaatccccgataatgaattttaccccataccaaaatcattggccgctctgcgcttttccgcggtattcagcggtataaaattttcggataatcctgttcttcttttaaatattaaacagttacttgaagttatacaaaatgaacagtggaaaacagaaagtaaacccaatcccccggaacctcaaccgagccccgcggcggtttccgaaccttctcctccgccgccggataaaattgttgaagaacctctggcaagtcccgcggtggtttccgagccttctcctccgccgcccattgaagttattgaagaaccgtcaacaagtccggcggtaactttagagccttctccctctacgctcaatgaagtcattgatgaacccccagcaagtcccgcggcggcggctcccgagcctcctcctccgccggataaagttgttgaagaacccccaataagtagtcctgcggaaacttccgagccttcctccttggcgctagacgaagttcttgaaccttgtgaaattattgaagaacccccaacaagtcccgcggtgactattgaggtttatcctccgccccatgaagtcattgaagacattgaagtttgtgaaatcattgaaggtattgaagtttgcgaagttgttgaagatattgaagtttgtgaaatcattgaagatactgaagcttgtgaagttattggagatattgacgaaccgccaagtcctatggggacttccgaaactttttccctgacgctcaatgaagctattgaactttgcgaaattatctga

SEQ ID NO: 71362 - protein, 347 aa, Unknown
  Obtained from environmental sample
  misc_feature (1)..(347): Xaa is any amino acid
MRVFLSVYPGFTLAIPMEAVASMMLYNQETEKTVQYEPKSRCTFISLPWLFNMRDQPVPHGVILREWNSKENKVVLLTAEVKSVIEIPDNEFYPIPKSLAALRFSAVFSGIKFSDNPVLLLNIKQLLEVIQNEQWKTESKPNPPEPQPSPAAVSEPSPPPPDKIVEEPLASPAVVSEPSPPPPIEVIEEPSTSPAVTLEPSPSTLNEVIDEPPASPAAAAPEPPPPPDKVVEEPPISSPAETSEPSSLALDEVLEPCEIIEEPPTSPAVTIEVYPPPHEVIEDIEVCEIIEGIEVCEVVEDIEVCEIIEDTEACEVIGDIDEPPSPMGTSETFSLTLNEAIELCEII

SEQ ID NO: 71363 - DNA, 759 bp, Unknown
  Obtained from environmental sample
  misc_feature (1)..(759): n is a, c, g, or t
atgagcagttacaagctgaataatttacttgctgaccggggggcgaagaaaatataccgtgacggtgacagggtgataaaactcatgggcgaggaataccccgcgcctgacgttctttctgaagcgcacaaccttgccgcggtgggagaaaccgccctcaaggttccccgcctggtagaggtaacgaaaatagacggcaagtgggcggtagtgtgggaatatgtcgcgggaaccactcttgcccagcttatggaaaaaaacaaagacaaggaactgcaatatcttgaacgctttgttgacatccagcttgacatgcaccgccatagcgcgacaaggcttccgcggcttaccgaaaaaatggagcgcaagataaaaacctccagccttgacgcgaccgcccgctatgaaattttgggaaggctggcaagtatgcccaaacacaccaaactctgccacggcgattttaacccaagcaacattgttatcaccgacaaggacgaggcttacatcatcgactggtcccatgccacccagggcaacgcctcggcggacgcggcgcacacttatatgttattctggctttcggggaacgctgcgttggcggaagaataccttctgctgttctgcaaaaagagcgacacggcagtacagtacgtggaaaagtggctgtctattgtggcggcctcgcagctccccaaagcaaaaccggaagacaaaggcttattactgagttgggcgaatgtggtggagtacgaatga

SEQ ID NO: 71364 - protein, 252 aa, Unknown
  Obtained from environmental sample
  DOMAIN (60)...(186): RIO1 family
  misc_feature (1)..(252): Xaa is any amino acid
MSSYKLNNLLADRGAKKIYRDGDRVIKLMGEEYPAPDVLSEAHNLAAVGETALKVPRLVEVTKIDGKWAVVWEYVAGTTLAQLMEKNKDKELQYLERFVDIQLDMHRHSATRLPRLTEKMERKIKTSSLDATARYEILGRLASMPKHTKLCHGDFNPSNIVITDKDEAYIIDWSHATQGNASADAAHTYMLFWLSGNAALAEEYLLLFCKKSDTAVQYVEKWLSIVAASQLPKAKPEDKGLLLSWANVVEYE

SEQ ID NO: 71365 - DNA, 1176 bp, Unknown
  Obtained from environmental sample
  misc_feature (1)..(1176): n is a, c, g, or t
atgggaaaaaaacgagcttacatcgtcaccgacacattcctgtacgaaaacggttacaccaaaacgataaccgaaaaactggacagcatgggcattgtccacgaaaccttttttgatgtcgcccccgatccgacattagcctgcgcgaaaaaaggcgcggcgcagatgagcgcgtttaagcccgatgtgattatcgccatcggcggcggctcggcaatggacgccggcaaaatcatgtgggttctctacgaacacccggatgcggattttgaggatatggcgatgcgcttcgccgacattcgcaaacgggtttatacctttcccaaaatgggggagaaggcgtactttatcgccatacccacctccgccggaacaggcagcgaggttacgccctttgccgtcatcaccgacgagaccaaaggcatgaagtatccgctggcggattacgaattgttacccgacatggcgatagtggacgcggatgtgcagatgaacgcgcccaagggactcaccagcgcgtccggcattgacgcggtgacacacgcgctggaagcctacgcctcagtcatggcgaccgactacaccgacggcctggcgatacaggcgctcaaggtgatctttgaatggctgcccgccgcctataacgaaggcgcggcaaacccaacagcgcgggaaaaaatggcgaatgccgccactatagccggcatggcttttgccaacgccttcctcggcgtgtgccactcgatggcgcataagctcggcgcgttccaccacctgccccacggtattgccaacgccctcatgatctgcgaagtgcttcgctataacgcctgcgaggttccgccgaaaatgggaagcttccctcaatatgatcatcccaaaaccctttcccgttatgcgcaaatcgcggacgcgttgaatcttggcggttcaagcgaagaggaaaaacttgaaaaattgatcatgcccgtggaaaagctgaaagagcagatagggatcaagaaaactatcaaggattacggcatagatgaaaaagattttcttgcccgccttgacgacatgagcgaacaggcctttgatgatcaatgtaccggcgcgaatccccggtatcccttaattgaggaaatcaaaaagatgtacctcaatgtttattacgataagaaggagaaggtgtaa

SEQ ID NO: 71366 - protein, 391 aa, Unknown
  Obtained from environmental sample
  DOMAIN (1)...(376): Iron-containing alcohol dehydrogenase
  misc_feature (1)..(391): Xaa is any amino acid
MGKKRAYIVTDTFLYENGYTKTITEKLDSMGIVHETFFDVAPDPTLACAKKGAAQMSAFKPDVIIAIGGGSAMDAGKIMWVLYEHPDADFEDMAMRFADIRKRVYTFPKMGEKAYFIAIPTSAGTGSEVTPFAVITDETKGMKYPLADYELLPDMAIVDADVQMNAPKGLTSASGIDAVTHALEAYASVMATDYTDGLAIQALKVIFEWLPAAYNEGAANPTAREKMANAATIAGMAFANAFLGVCHSMAHKLGAFHHLPHGIANALMICEVLRYNACEVPPKMGSFPQYDHPKTLSRYAQIADALNLGGSSEEEKLEKLIMPVEKLKEQIGIKKTIKDYGIDEKDFLARLDDMSEQAFDDQCTGANPRYPLIEEIKKMYLNVYYDKKEKV

SEQ ID NO: 71367 - DNA, 1269 bp, Unknown
  Obtained from environmental sample
  misc_feature (1)..(1269): n is a, c, g, or t
atggcgagaacgcctacaagacgaaaaacctgcggcataatcgaggatgaccccgtgtccggcatcaccaggatagccgaacccatcggccttgtggcggcggtcattcccaccaccaaccccacatccacggcgattttcaaggcgctcatctgcctgaaaacccgcaacggcatcatcatctcgccgcacccccgcgccaagactagcacctgcgccgccgcgaaaatcgtgctggacgccgctgtcgccgcgggcgcgcccgagggaatcatcggctggatagacgagccgagccttgaaatgaccaacatggtgatgaaagaggccgacatcatccttgccaccggcgggccgggcatggtcaagtccgcctactcctccggcaagcccgccatcggcgtggggtcgggtaacgtgcccgccatcattgacgacagcgcggatatacttctggcggtgaactcaattatccattcaaaaacttttgacaacggcatgatctgcgcgtctgagcaatcggtaatcgccctgcaaagcgtttatgatcaggtgaaagccgaattcaaacgccgcggctgttatttccttacgcctgaagaaaccgagaaggtacgcaatacgattattgttaatggatcgcttaactcaaaaatagtcgggcagaaggcggcgaaaatcgcggagcttgccggcgtgaaggtcgacgaagcaacgaagatactcatcggcgaagtggaaagcgtggagctttcggaagagttcgcccacgaaaaactatcccccgtgttggcgatgtacaaggcgaaagattttgacgacgcgctggacaaggccgaccatttgataagggatggcggctacggccacacagccagtgtattccttaacccgcacacaggggcggacaaactcgccgccttcagcgcccgcatgaagacctgccgcatactgctcaacacgccgtcggcgcatggcggcatcggcgacttgtacaacttccgcctaaggccctcgctcaccctgggctgcggcagttggggcggcaattcagtttcagataacgtcggcgtcaaacacctgttaaatattaaaacactggcggcaaggagggaaaatatgctgtggttccgcactcccgaaaaagtatatatcaagaggggatgcctccccgtggcattagacgagcttaaaccgttatgggaaaaaaacgagcttacatcgtcaccgacacattcctgtacgaaaacggttacaccaaaacgataa

SEQ ID NO: 71368 - protein, 422 aa, Unknown
  Obtained from environmental sample
  DOMAIN (1)...(367): Aldehyde dehydrogenase family
  misc_feature (1)..(422): Xaa is any amino acid
MARTPTRRKTCGIIEDDPVSGITRIAEPIGLVAAVIPTTNPTSTAIFKALICLKTRNGIIISPHPRAKTSTCAAAKIVLDAAVAAGAPEGIIGWIDEPSLEMTNMVMKEADIILATGGPGMVKSAYSSGKPAIGVGSGNVPAIIDDSADILLAVNSIIHSKTFDNGMICASEQSVIALQSVYDQVKAEFKRRGCYFLTPEETEKVRNTIIVNGSLNSKIVGQKAAKIAELAGVKVDEATKILIGEVESVELSEEFAHEKLSPVLAMYKAKDFDDALDKADHLIRDGGYGHTASVFLNPHTGADKLAAFSARMKTCRILLNTPSAHGGIGDLYNFRLRPSLTLGCGSWGGNSVSDNVGVKHLLNIKTLAARRENMLWFRTPEKVYIKRGCLPVALDELKPLWEKNELTSSPTHSCTKTVTPKR

SEQ ID NO: 71369 - DNA, 1521 bp, Unknown
  Obtained from environmental sample
  misc_feature (1)..(1521): n is a, c, g, or t
ttgaacgttctctatgagcatgacggcgcatttatgaaacccggcgacaggggcaacccattgaacccggacaaaaaatggcgctttattcccgaccggcaattagccgcaaaaatcgccgccggggatgcagtccccgccgccgccggaatgatactcggttcagtaaaagaaacggaaagcattacctgtaaaataatggttccgcctaatacaagcggcggcaatattaccgaattaaaaagcgaaggcgactataccgtctcacaaataatagcgaaaaccagcatgggtgaggaaatccccgtcgcgcaatggtggcctgtacggacaagccgccccgtttcctcgcgcctgccgccggaccagccgcttatcacgggcgagcgcgtcatagacattttctttccgttgtccaaaggcggaaccgcggcgattcccggcggtttcggcacaggcaaaaccatgacccagcacgctgtggcaaaatggtgcgacgcggacgtaattatctacataggctgcggagagcgcggcaatgaaatgacggacgtgcttacggaatttccggaacttcaggatccgcgctcggggcgcagtttaatggaaagaaccctgcttattgccaacacgtcgaatatgccggtggcggcgcgtgaggtttcaatttacacgggggtaacgctggcggagtactaccgcgacatgggctaccatgtggcgattatggctgactccacaagccgctgggcagaggcgttacgtgaactttccggccgcatggaagaaatgcccgccgaggagggattccccgcttatcttcccacgcggcttgcggaattttacgaacgcgccggcagggtgcgcaccctctgcggaacagaaggttcggtttcgataataggggcggtctcccctccgggcggcgatttctcggagcctgttacgcaacatacaaaacgttttatccgctgtttctgggctttggacaaagacttggccaacgcccggcattatccggcgataagctggacagacagctattcggaatacgccgaggaagtccaacactggtgggaaaacgtaaacccactgtggtcgcaagtgcgcaaaaaatgcatggatcttcttaaacaggaacagaagttagctgaaattgtaagactcataggacaggataccctgcccgacgaacagaagctgattctttacacagcgcaaataatcaaagacggttttctgcagcaaaattcttttgatcaggtagatatgtactgcgttcccgaaaaacaggtaaggcttctggaaataataatggaattttacgatcgcgcccgcacatgcattcagctcggcgcgcctatgacaaaaatatcggcgacgggcttaaaagagggaatgtcccgccttaaaagcactgttaaaaacgactctcttggcgattttaacgagtttgacggaaaaatgcgttatacgcttgaagaattggagagaacttaccgtacaaggggcgcggcgtga

SEQ ID NO: 71370 - protein, 506 aa, Unknown
  Obtained from environmental sample
  DOMAIN (367)...(505): ATP synthase alpha/beta chain, C terminal domain
  misc_feature (1)..(506): Xaa is any amino acid
MNVLYEHDGAFMKPGDRGNPLNPDKKWRFIPDRQLAAKIAAGDAVPAAAGMILGSVKETESITCKIMVPPNTSGGNITELKSEGDYTVSQIIAKTSMGEEIPVAQWWPVRTSRPVSSRLPPDQPLITGERVIDIFFPLSKGGTAAIPGGFGTGKTMTQHAVAKWCDADVIIYIGCGERGNEMTDVLTEFPELQDPRSGRSLMERTLLIANTSNMPVAAREVSIYTGVTLAEYYRDMGYHVAIMADSTSRWAEALRELSGRMEEMPAEEGFPAYLPTRLAEFYERAGRVRTLCGTEGSVSIIGAVSPPGGDFSEPVTQHTKRFIRCFWALDKDLANARHYPAISWTDSYSEYAEEVQHWWENVNPLWSQVRKKCMDLLKQEQKLAEIVRLIGQDTLPDEQKLILYTAQIIKDGFLQQNSFDQVDMYCVPEKQVRLLEIIMEFYDRARTCIQLGAPMTKISATGLKEGMSRLKSTVKNDSLGDFNEFDGKMRYTLEELERTYRTRGAA

SEQ ID NO: 71371 - DNA, 1410 bp, Unknown
  Obtained from environmental sample
  misc_feature (1)..(1410): n is a, c, g, or t
gtgagaggcattgaatacaggggcttaaagcggatagaaggcccggttgtaattaccgaacgcagccgaaatgtcgggtttaacgatatggtggcggtctacggccgcgacggcgggaaaagattcggaagagtgctggatttaagcgaaaaactgacggcgattcagatattcggcaacagcacggggctttccgcggacgacacaagaattgaatttctggacaaaccgatggagcttcgcgtcggaaccggccttatggggcgggtttttaacgggcttggggagccgattgacggatacggaagcatcttttcgtcaaaaacccgcgatattaacggccttcctataaatccgtacgcccgcacttacccgcgcgactttattcaaaccggaatttcctcgatagacggaatgaacaccctcatccgaggacagaagcttccgatattttcaggtaacggtcttcctcataaccgtcttgccgcgcagattgtgcgtcaggcgaaaattctttcttttgacgacagcgaagaggcgaaagcctctcagcagtttgtaattgttttctgcgcgatgggaattaaaaacgacgtagcccgcttctttctcgataattttgagcaatcgggagttctttcaagggttgtcgtgttcctttcgctcgcggattctccttcgcttgaaaggcttatcgccccgcgctgcgcgttaaccgccgcggaatatcttgcttacgaaaaaaacatgcacgtccttgtcgtaatgaccgacatgacaaattactgcgaagcgttacgcgaagtttcctcgatacgcggggaagtgccgagccgcaagggctaccccggctacctttattccgaccttgcctcgctttacgaaagagctggaaaaattaaagaggcgaccggctcaattacgcagataccgattctttccatgcccaatgacgatatcagccatcctataccggacttgtccggttacataacggaggggcagattgttcttgaccgcgagcttttccagcgcggcatatacccgcccgttgccggtcttccaagcctttcccgcctgatgaaggacggaatagggcccggcatgacaagagaagaccacaaagacgtgtctagccagctttttgccgcttacgcgaaggttaaacaggtgcgaaacctagcctcaattatcggagaggaagagctatccgcagatgataaaaggtatttaaaattcggagaaaagtttgagcaaattttcctgatacagggagaatatgaaaaccgcgacataggccgcactctggatctaggctggaaagtgcttgcggatcttcccagagaggaattactgcgcgttaaagaagaatttattgaaaaatatttagagccggcggcaaggatgtaa

SEQ ID NO: 71372 - protein, 469 aa, Unknown
  Obtained from environmental sample
  DOMAIN (9)...(75): ATP synthase alpha/beta family, beta-barrel domain
  misc_feature (1)..(469): Xaa is any amino acid
MRGIEYRGLKRIEGPVVITERSRNVGFNDMVAVYGRDGGKRFGRVLDLSEKLTAIQIFGNSTGLSADDTRIEFLDKPMELRVGTGLMGRVFNGLGEPIDGYGSIFSSKTRDINGLPINPYARTYPRDFIQTGISSIDGMNTLIRGQKLPIFSGNGLPHNRLAAQIVRQAKILSFDDSEEAKASQQFVIVFCAMGIKNDVARFFLDNFEQSGVLSRVVVFLSLADSPSLERLIAPRCALTAAEYLAYEKNMHVLVVMTDMTNYCEALREVSSIRGEVPSRKGYPGYLYSDLASLYERAGKIKEATGSITQIPILSMPNDDISHPIPDLSGYITEGQIVLDRELFQRGIYPPVAGLPSLSRLMKDGIGPGMTREDHKDVSSQLFAAYAKVKQVRNLASIIGEEELSADDKRYLKFGEKFEQIFLIQGEYENRDIGRTLDLGWKVLADLPREELLRVKEEFIEKYLEPAARM

SEQ ID NO: 71373 - DNA, 945 bp, Unknown
  Obtained from environmental sample
  misc_feature (1)..(945): n is a, c, g, or t
atgaaaaacattggattcattttattattgttattaaccgcgcaaatggttatcgcgcaggatcagcctcagaaaaaagacgaattttcaacttcgtctgagcttactttacaggcctcaactatgcccgggttaaaactgggatttaccgaacattttttcattccttttatgcagggagaaagcgatctgacaaaagacaacaacataaacattgcgctgacgggggaaatatcccctgtttcgcttaactgtcttgccgaagcggtctggacgcctatcgcgttttttcaaattatcgccggcggcagaataggttcaggatggatctttgagcttttcggcaaacattcgtacggaatcgggattatcagaccagacgctgagggcaaggttgaacataccggaaaagcgtttgacggtttgctttggaaagcgcaagccggcgccgttcttcaggcggatttagccgcggtaattccgggagactggaatcatgtagtcgcaaggacttaccatgaaattaactacagaggttacaccgcggcttctaaatacgaatcatggtcttatgaagacgacaacggatatccgggagaaaactgtaacggttttaattattacagtaattttcttttgggttatcaaatgcccattttcctcaatatggcggcgcttcttgcggaagcggatctttatttatacgatacgcccggccgctcaaaatggggggacgatttgatacgctggacttttggcttattattaaattttaccataacaaaaaaaatcgatattgcagttcttacccagttctggacgcggaggaactttctggaagataactggcagaacttatattaccgcagaaggacattggacacttccaacccgattcatttggaatttttccgcgtagccgccgctttaactttgaggttatag

SEQ ID NO: 71374 - protein, 314 aa, Unknown
  Obtained from environmental sample
  SIGNAL (1)...(19)
  misc_feature (1)..(314): Xaa is any amino acid
MKNIGFILLLLLTAQMVIAQDQPQKKDEFSTSSELTLQASTMPGLKLGFTEHFFIPFMQGESDLTKDNNINIALTGEISPVSLNCLAEAVWTPIAFFQIIAGGRIGSGWIFELFGKHSYGIGIIRPDAEGKVEHTGKAFDGLLWKAQAGAVLQADLAAVIPGDWNHVVARTYHEINYRGYTAASKYESWSYEDDNGYPGENCNGFNYYSNFLLGYQMPIFLNMAALLAEADLYLYDTPGRSKWGDDLIRWTFGLLLNFTITKKIDIAVLTQFWTRRNFLEDNWQNLYYRRRTLDTSNPIHLEFFRVAAALTLRL

SEQ ID NO: 71375 - DNA, 870 bp, Unknown
  Obtained from environmental sample
  misc_feature (1)..(870): n is a, c, g, or t
gtgaataaaaatattctttgttttatattcatggtttttcttggattcagtatatttgcggaagaaaatgaagaagtaaatacggaaataaatgcggaagtaaatgacaatttcagccgcccgtcgttaaaattagtgtttcatgagttagggtggaatatattacattcatttacctgtaattatgggatgaattttattggggcgggtcttggaacatgggtattcatcgagactgacattgactggaaatggcgtaatattgcctacaataacacatggctgtccgattcgggacggcccgggctgtatataggttatgttgttcccgcaataacgccgatttttacttatacattgggatggtttacaaaagatgataagctccaaataaccggcatggcgttactgcaaacgcttatgataatgctggccgttcaaacgcccttaaaaatgattaccggcagggctttgcccggtattgttaccgaactcgaccacacaagaagccttcgtaccgacaatttcagcggtgaatttgagtggtttaataaaaatcccattgggggctggccaagcgcgcataccgcaaacgcgtttgcggcggcggcgacaatatcggaaatatattcggaaaatttatggttaaaaatcggagcgtattcttatgccgcgataataggctttggcgttacggtaaacgtacattgggcgtcagaggcgttagcgggcgctttaatcggatacgcggtaggcagtaccgtaggaaaaagttataaaaaattaatggaaaataaatcaaataattcagaaaataatgtgtcattctatatttatccgaacagcataggaatgataataagaatataa

SEQ ID NO: 71376 - protein, 289 aa, Unknown
  Obtained from environmental sample
  SIGNAL (1)...(20)
  DOMAIN (132)...(264): PAP2 superfamily
  misc_feature (1)..(289): Xaa is any amino acid
MNKNILCFIFMVFLGFSIFAEENEEVNTEINAEVNDNFSRPSLKLVFHELGWNILHSFTCNYGMNFIGAGLGTWVFIETDIDWKWRNIAYNNTWLSDSGRPGLYIGYVVPAITPIFTYTLGWFTKDDKLQITGMALLQTLMIMLAVQTPLKMITGRALPGIVTELDHTRSLRTDNFSGEFEWFNKNPIGGWPSAHTANAFAAAATISEIYSENLWLKIGAYSYAAIIGFGVTVNVHWASEALAGALIGYAVGSTVGKSYKKLMENKSNNSENNVSFYIYPNSIGMIIRI

SEQ ID NO: 71377 - DNA, 4173 bp, Unknown
  Obtained from environmental sample
  misc_feature (1)..(4173): n is a, c, g, or t
ttggcggagggaaaagtccccgaaggcattccggctcttgtaacgggaaacgaaggtcgatttatgttcgatgtaagcggcactttagagccgttatgcgtcgaagccgctctgcgaagtcttggaattaaagcagacgcagtggtcagcatgggcggagaagaccttattgtctattctttggattccgacggcaaaataattaacagtttttcaggtaataaatgcgcaagcggaacgggcgaattcttaaaacaacagcttgcccgtatggacatgactctggacgatatcgacaaagttcccgacaccgccaaagtgtacgccctttcaacgcgctgttccgtattcatgaaaagcgattgtacccacagactcaataagcgtgaggcgacaaaggacgatatcgtactgtcgctttccgacgtaatggcggttaaagttatcgacttcttaaaacgcgccaaagtaacgtcgggcagggtagcgctcacgggcggcatcactcttaaccgtcatattatccgctttatccgcgagaaagctccgaatatcgaatttatcatccccgacaccgcccccgtttttgaagcgttaggcgcggcggttatggcgttgcagaccggaagcaaactgccttccgccgacaatctgcttagggcaaacgatgtccgctttggatcattggaagcgttacgcgattggaaagacaaagtaaaagtttttgaaaaaaccgacggcaaagtgcaagtcggacgcaaatacattcttggcgttgacggcggttctaccaccaccaaagcgtgtcttgtagacattgaaacatttgaaatcaccgcaagccattacggacgcactcacggcgatcctgttaaggcgcttaaagaatgtctttccgttattcaatctaaaatcatcgccgacacaggcgataaaaaagttgatatttgccttgtttcaacaacaggttccagccgcgaaatactgggcgtgtttttggaaacgccgggcgtatataacgaaattatagcgcactctgtcggcacgacatattttgataaagaagtagaaacaatttttgaaatcggcggacaggacgcaaaatatgttcttcttaagaacggcgtgcctatcgactacgcaatgaacgaagcctgctctgcgggaacaggttcattcttggaagaatccgccgcgggagatttgtcaattcacagcgcaaaagatattggtcccatagcgttaggcgcgccttcgccgtgtaaattcggcgaacactgctccgcgtttattaacagcgatatccgcaaagcggtgcagcagggcgcgggcagggaaaacattaccgccggaattgtatgttccatagtatcgaattatcttaaccgtgtcgtcggaaaccgcacaatcggcggcaaaattttcctgcagggcggcgtcgctaaaaatccggcagttcctctcgctttcgctatgctgttgaacaaggaaatccttgttccgccgtcgcccgaacttatgggctgtttcggcgttgcgttacttgcaaagcgcaaaagagacgacgggcttcttgcggagcaagcaatcgttcttgacgacatcattaaccgtgagattggctatgagcgcgtctttacctgccagtcctgcgaaaacctttgcccgatacaagtgttaaacgtaaacgatcataaatatatgttcggcggacgctgtaacaaatatacgaatatgcgcaagcaggtaaaagatgtgcctgtgtttgattatgtcgaaaaacggcagaaaatgttatttgaggaatttgccgcgcctgtaaacggcgaacaaacatacaagcatgattatgttgtcggcattccgcgagcgttttccgtgcatacgctttatcccctttacagttggttcttccatgagttgggaataaaaacattcctttctacggaagtagcccacgcgggagtagcgagagctgaatcgacctactgcttccccgccgaaatagcgcacggagcgatacaggattgtttggataaaaaagccgattatgtgcttctgccgcatttccgcgatatgcccagttatgaggaaaaagtacacgcaaacttttgtccgataactcaagcgcttccttattacatgggaaaagctttccccgacatcgataaaaagaaatggcttccgcttgttgtaagttttaagttcggcgaaggaaaagcgctcgaattgttttgcgagatgacaaaacttttaggcatcggcgaagcggaaacaaaagcggcgtttgataccgcgtgggcgaaacagaaaagttattttgaagcggcggaaaaaatgggacttcaagcgattgaagaagcgcgcaaagcggatcgacctgttatcgccgtattgggcagaccgtacaacgcgttcacgcccgaagcgaacatgggtattccgcgcaagtttacaacacgaggctattcaatcgttccgtttgacattttgccgttccgagacgaagttatcttcccgaatatgtactggttctacggtcagcaggacttaaaagcggcgaagctcctcaaaaaagaagacaacatttatcttacatttgtttcaaacttttcgtgcgctcccgactcgttcattctccattatgtgaaatggatgatggggcaaaaaccgttcctcgtgcttgaattggattcccattcagccgacgccggagtcgatacccgtgttgaggcgttcctcgacatcatcgacggttaccgcgcgaagaaaaatcagtttgaagacgagcgttacgacaacggaatgaggtttgtctgtgaaaaaatgtattcgggcgaattcgatttgcgcatagacaatataaaaacaggagagagaatccccgttatagacaataagagggtaaaagttctgctctccaacatgggaaatatttccaccgagtatatgggagccgccattcgcagtttgggcattaacgcggaagcgatgcctgtggcgacggcaaaaacaattcaggcggcgcgagctcacgcgtccggtaaggaatgtgtgccaagtcatttagtcttgggcagcgcattggaatttttcttcagcgacaagtaccgcaaagacgagttgtatcttctctttgtgccgataacgacaggtccctgccgtacggggcagtattatgtcttctacgaaaatcttttccgcgatctgcgccttgaaaacgtagtggtctttatcctttccgcggataattcatacacggagcttggtccaagtttcgcgaaagagatgtggaaagggatagtgttatccgactacttaaaagacattcaatgttctctcttggcggcggcggttgatcccgtaaaagcggaaaaagattttgaacattcatggcgcaaagttatgcacgccgtagaacacaaccccaaagcgctgtggaaagaattaaaacatgtcgcaacagatgtaaaaaagataccgctaaaacgaaaaataacggattgcccgcgcgtattaattgtaggcgagatttatgtgcgccgcgacgattttgccgtgggcgaattaatcgaacttatgagcgagaggggtattgttgtaaaagtcgccggcataagcgagtggattcactaccttgattttgtccgtgagtacgctcttaaaaaacttattaaactgcaaaaaccgggtacaagacttttctccaaaccgtctaaagaccttaaaaaacttcagattgaagaatggtggaaacatcatatcgagaaaaaagtcctcgccattttggaaccgacaggtttaattcccgaaaccccgcacgatatgcgccatatcatgaagtacacgcaggaacattttgtcaatcttgaactcaattcggaaatagccgtttcttccggttccgcggcggcggcgatggacgaaggttattcgggtatcgtgaacataagtccgtttgcctgtcttatcggacgtgtaattgaaggactgttcactccgtgggcgagagaacgcaactacccgatactttccgtggaagtagacggcaaccttctgccgccgaatatcgtcaacaagttaaatattttcatggttaacgtattgcgctttaagggcggcaatgatctttcaacgttagttgacaaagccgataggggagagtccgcgtga

SEQ ID NO: 71378 - protein, 1390 aa, Unknown
  Obtained from environmental sample
  DOMAIN (257)...(516): BadF/BadG/BcrA/BcrD ATPase family
  misc_feature (1)..(1390): Xaa is any amino acid
MAEGKVPEGIPALVTGNEGRFMFDVSGTLEPLCVEAALRSLGIKADAVVSMGGEDLIVYSLDSDGKIINSFSGNKCASGTGEFLKQQLARMDMTLDDIDKVPDTAKVYALSTRCSVFMKSDCTHRLNKREATKDDIVLSLSDVMAVKVIDFLKRAKVTSGRVALTGGITLNRHIIRFIREKAPNIEFIIPDTAPVFEALGAAVMALQTGSKLPSADNLLRANDVRFGSLEALRDWKDKVKVFEKTDGKVQVGRKYILGVDGGSTTTKACLVDIETFEITASHYGRTHGDPVKALKECLSVIQSKIIADTGDKKVDICLVSTTGSSREILGVFLETPGVYNEIIAHSVGTTYFDKEVETIFEIGGQDAKYVLLKNGVPIDYAMNEACSAGTGSFLEESAAGDLSIHSAKDIGPIALGAPSPCKFGEHCSAFINSDIRKAVQQGAGRENITAGIVCSIVSNYLNRVVGNRTIGGKIFLQGGVAKNPAVPLAFAMLLNKEILVPPSPELMGCFGVALLAKRKRDDGLLAEQAIVLDDIINREIGYERVFTCQSCENLCPIQVLNVNDHKYMFGGRCNKYTNMRKQVKDVPVFDYVEKRQKMLFEEFAAPVNGEQTYKHDYVVGIPRAFSVHTLYPLYSWFFHELGIKTFLSTEVAHAGVARAESTYCFPAEIAHGAIQDCLDKKADYVLLPHFRDMPSYEEKVHANFCPITQALPYYMGKAFPDIDKKKWLPLVVSFKFGEGKALELFCEMTKLLGIGEAETKAAFDTAWAKQKSYFEAAEKMGLQAIEEARKADRPVIAVLGRPYNAFTPEANMGIPRKFTTRGYSIVPFDILPFRDEVIFPNMYWFYGQQDLKAAKLLKKEDNIYLTFVSNFSCAPDSFILHYVKWMMGQKPFLVLELDSHSADAGVDTRVEAFLDIIDGYRAKKNQFEDERYDNGMRFVCEKMYSGEFDLRIDNIKTGERIPVIDNKRVKVLLSNMGNISTEYMGAAIRSLGINAEAMPVATAKTIQAARAHASGKECVPSHLVLGSALEFFFSDKYRKDELYLLFVPITTGPCRTGQYYVFYENLFRDLRLENVVVFILSADNSYTELGPSFAKEMWKGIVLSDYLKDIQCSLLAAAVDPVKAEKDFEHSWRKVMHAVEHNPKALWKELKHVATDVKKIPLKRKITDCPRVLIVGEIYVRRDDFAVGELIELMSERGIVVKVAGISEWIHYLDFVREYALKKLIKLQKPGTRLFSKPSKDLKKLQIEEWWKHHIEKKVLAILEPTGLIPETPHDMRHIMKYTQEHFVNLELNSEIAVSSGSAAAAMDEGYSGIVNISPFACLIGRVIEGLFTPWARERNYPILSVEVDGNLLPPNIVNKLNIFMVNVLRFKGGNDLSTLVDKADRGESA

SEQ ID NO: 71379 - DNA, 855 bp, Unknown
  Obtained from environmental sample
  misc_feature (1)..(855): n is a, c, g, or t
gtgacaagacttgaaagatgcatagattcgttccttgaaaattatgaagcttacggcatggttaatcattccggcgtaatgaatcttcccggaagggaaagcgttgacagcatagtacacggtcttgaagaattgcttttccccggttttttggaaaatataagcactgaaagagaatctttgcggaaaaacacggcaaaaaaaataaaaaaaatatctttggctttaaggagcgaggtagaaaaaagtattgtattttccatgcggcgcgagactttaaattgcaagcatgaaacttgcagggcggcagccgcgcttgttgttgaagaattttttgaggaactgccgaaaatcagagttattttagaaagggatttggacgctgcggtgcgcggagaccccgcggcaaagagcgccaacgaagtgattctttcctatcccggttttcaggcgattaccgttaacagaatggcgcattttttatggacgcggcaggttcccataatcccgcgaatgatgagcgagcttgttcacggacggacaggcatcgacattcatccgggcgcgcaaatagacgaatcattttttattgatcacggaaccggtgttgtaatcggagagactacgataatagggaaaaatgtgaaaatttatcagggtgtaacgcttggcgctctttccgtaaaaaaagaggaaagcgatcacaaacgccaccccactatagaagacgatgtaacaatctacgctaacgcgacgattcttggcggagaaacggtaataggcaaaggcagtgttatcggcggcagtgtgtggataacacagtctgtgccgccgggaagtaagatttataagtag

SEQ ID NO: 71380 - protein, 284 aa, Unknown
  Obtained from environmental sample
  DOMAIN (59)...(154): Serine acetyltransferase, N-terminal
  misc_feature (1)..(284): Xaa is any amino acid
MTRLERCIDSFLENYEAYGMVNHSGVMNLPGRESVDSIVHGLEELLFPGFLENISTERESLRKNTAKKIKKISLALRSEVEKSIVFSMRRETLNCKHETCRAAAALVVEEFFEELPKIRVILERDLDAAVRGDPAAKSANEVILSYPGFQAITVNRMAHFLWTRQVPIIPRMMSELVHGRTGIDIHPGAQIDESFFIDHGTGVVIGETTIIGKNVKIYQGVTLGALSVKKEESDHKRHPTIEDDVTIYANATILGGETVIGKGSVIGGSVWITQSVPPGSKIYK

SEQ ID NO: 71381 - DNA, 1203 bp, Unknown
  Obtained from environmental sample
  misc_feature (1)..(1203): n is a, c, g, or t
atgaaattacaaaccttagttattaccgctgtattggcggtttttattcaacaggcagctttcgcgcaaagggcgccatacgctgaaaattatataagaaccggagcggattattacagcaaaggggatttaaataaagcgatagaatgttttattgcggcaaaaacagcttttgaagaaaacggagccagagaacatcctctttatttctcaacaatagatattttaggaaacatatattttgacacaggtgattacgccaaagccgaaccatattatcttcaatcaaaagccattaaagaaaaaatatttggtaaggaacattcatcttacatggatatattaatcagattgacgcatttgtacgtttattcaaatgactacgaaaaagcaattaattacgctctggaggtaaaatctttacaggaaaaagcattcggaaaggaagattcaagatatgccgaaacattaggtactttgggattcctgtatggcaaaacaaaaaattatgataatgctataaaatataattcggaagcgttaagtattcgggaaaaaactttaggaaaaaatcatccttattatattgaatcattagaacaactgggcggattatattactttttagatgactatgcaaatgctgaacgctatttatcagagttaaaaaccatacaagaaaataaacttggaaaaaatcatcatgattacggtgtcattgtaaacaatttgggaatgttatatgtcaagatgggtgattatgtaaaagccgaacgctgtttattagaattgaaatctatcaaagaaaaaaatccggggaaaaagcatcctgattatttagccgcattaaataacttgggaatggtatatcaattaatgggtaattataaaaaagctgaaacctgtcttcttgaggtaaaatccattgatgaaagaacacatggaaaaaatcacccggattacgctacaacattagtcaacctgggagctgtatattccagtatgggtaattattcaaaagccgaaaaatgttttttggaagcaaaaactattcgggaaaaagcattaggtaaagaacatcctgatcatattatgctggcagaaaaacttggagaattatacaataaaatgggcaacagcgctaaagcggaacaatatcttttagaggcaaaaactatacaagaacaagctcagagtaattaa

SEQ ID NO: 71382 - protein, 400 aa, Unknown
  Obtained from environmental sample
  SIGNAL (1)...(22)
  DOMAIN (280)...(313): Tetratricopeptide repeat
  misc_feature (1)..(400): Xaa is any amino acid
MKLQTLVITAVLAVFIQQAAFAQRAPYAENYIRTGADYYSKGDLNKAIECFIAAKTAFEENGAREHPLYFSTIDILGNIYFDTGDYAKAEPYYLQSKAIKEKIFGKEHSSYMDILIRLTHLYVYSNDYEKAINYALEVKSLQEKAFGKEDSRYAETLGTLGFLYGKTKNYDNAIKYNSEALSIREKTLGKNHPYYIESLEQLGGLYYFLDDYANAERYLSELKTIQENKLGKNHHDYGVIVNNLGMLYVKMGDYVKAERCLLELKSIKEKNPGKKHPDYLAALNNLGMVYQLMGNYKKAETCLLEVKSIDERTHGKNHPDYATTLVNLGAVYSSMGNYSKAEKCFLEAKTIREKALGKEHPDHIMLAEKLGELYNKMGNSAKAEQYLLEAKTIQEQAQSN

SEQ ID NO: 71383 - DNA, 4746 bp, Unknown
  Obtained from environmental sample
  misc_feature (1)..(4746): n is a, c, g, or t
atgatgaacgccgttaacaatatcgccgccgcgcttgcggctaccgggtcaggtaagtccgagggggggcttatcaaggctactgttgtgcgcgggcccagcggcgagggggtgtttaccctgcgcctctccggggggcgggagatcggcgtgcaggtgcagcagtccgaagcgggcggggcggcgcttgagccggggcagaaggtgcttctcagcccgtctgacgggaagatatttatccctacggcggatgcggccgcggccgagcaaccgacgcagtcgcagcagtgggcgcaatcgcagcaaccgacccagatgcggcaggcggcgcagatgttgcttcagcaaatacagggcggcggcgatctgttcgtctcgggcaagcaacaggcggaaagcgcggttgacgggggaggcgaggccgggggcgacggagcgaagggtgcgccgccggcgggtcaggacggtcttgccaaaatagtcggatttaaggtcgtgtcggagggggaggcgcacgccgacgggatctacagggccgacgccgccggacacatccttgaagggccggcggacggcgaggcgcccataaaggacttcgctgcggtgcggctcagcaccgtgaacgggcggcagatagtcaccgtgcttgccggcgacgggttgcaggcggccattgaggagctgcgcggcagttttgagagtccgctgttgcgggcgttaccccctgagctgctgaaagatattttcaatgaacgcggcttcatagacacggatacgctgaaggcgctggatgccgcgttggtaaatcgcaatctctcaatagacgcctcgtcgcaacttcagatggagcgtatcgggcagtggttgcgtatcgcgcttgacaatccgggaatggctcaggagcttgttgaccgcatacccgcgcttggggcgaaggacgcggcgggattgcttgagttgatcgggcgccttagtaacggcgtggcgccggagagtttttttgccacggggaatacgctcccgcggatcgggacgaatatcgttggcggagccgaattgctccaaaatcttgtgaagtccgcgttttcggcggcgccgagcgcccttctgaatttggtcaaacatattgacgcgtcaagcgtcgtgttaggcgctcagttgccgccgaccgaggcggcgcgtgtcgtccgcgagatcacaaacgccctgccggcgcaagccgccgcgaaacccggatccctgcatgacgcggggcagctgtcgccgcgtgttttggaaacgaacgtttctccggctccgaaaacacagaccccggcgtcggcggtgccgcagatacgcgtcggatactcggaactcaccgaagtgacggtacgggtgttgctgggcggcgggaaggctgacgcggcggcggtcggggagaggataagcgcccttagagaagccgtggagcggataccggtcgcaccaagcggtcaaggtcgtgatatggcggtaagagagggcgtgagcgtggtaagcggtaatagggcggagagcaacgcggcgtcagcaaatacgcagtccgcagtcggtcggttgtcggtaccggcgaacgcaacgaatgtcaacgtcgccgccaaggcgccggacgcttccacacgtatcaacgcgcaactcgcggttcatagagcgtcttccgtaccgtcgggcgatatcaacgcaaatgtgggtagcggtaacgccaaggctgcgaatgctaatagcgctgcgaacgcttttcccgccgttaatagagggtttgtacctcaacagccgtatgcgccgcaggcgggtggggttggtactggtgtcggtacaggcggtgttaatacaagcaacatcaatacaagcggtattaatacgaacaataacaatgcaaacagtactaacgcaacttttgataataggaatattggcggtgatgtcggtatcaataaatctatgcccgccgatagtgttcgcggtactagtattaacgcaggcggtattaatgcgaaagatgtcaactctacggacaatcagaatatacgcggcaatgatattggcgttaataggcctggagcggttgatgttccacgcgatgtaaaccggtcgggcggtgttggaattaatcccaatattaataataatatcaataataggcctgctgataatgttggcggcgcgggtgttaataaggcaagcggtattaatacgaatagtatcaattctgcggacaatcaaaatatacgtaacgatgccggtatcggagctaatagacctatatccgccgataattcacgcggtgtcagccaatcgagcggcgtgggtatcaatattaataacagtactaatagtaatgtcaagccggtcgataattctttaggcgggagtatcaacactaacgatatcaataggggcggtatcaattccgccgataatcaaaatatacgcaacgatgccggtgttaacaataagcaaggtatttttgataatcttcgcggtgttaatactaatagcaatgccaagccggtcgataattttggcggcatgggcgccaacgcgcatggtgttaatacgagtagtgccaatgctacggacaatcaaaatatgcgcggcgatgccggtatcggcgttaataggtatatgccggccggagattcgagcggtgtcaatacttctagcggtaccggtattaatacaaccggtacggcatcggttaacgttccggcaatcaaggagagttgcctgtctatagtggacacgctgaggtcttccgtagctcccattctgcgtgagcttacgcaacgcggcgaaataggagccggcggcggagcgttgctcatagggcttgtcagggacgcggtgtcgtcgcttgacgaggcgttgcgcccgttggttcgcagcgagcggccggtcccgtcggagttttacgaacgcgtggccacaggggcagggcatcggatcagcgcagaggcgaagaacgcgctcttctcgcagatcggatcggcgcaggcgctgatacgggacgcggtggaggcggcggagggcgccaatgccgccggtgttaacgctagtattaaacccggtgttaatccgagcgcaagtttaggtattaacgcaagcgttcgcgctagcgttagcccgaatattaacactattgccaatgttaatactaatattaatccaagcattaattccaatattaatccgacggtcaatcccaatgttaattccggtgtcaattccagtattaatcttggtactaataaggttaccgatctaggcgctaatcccaatattaacgtcggtgtcaatactggtattaatgccaatattaatcctattgtcaattctggagttaatccaaatattaataccaatgttaacgctaatgtcaattccggtgttaatcccaatattagcccaagcgtcaatactaatgtaagtacaaaagttaatcccagtattaatcccggcgtcaatgataatgtcaatccaaacgttaatcctaatattaacctaagcgtcaatactaatgtaagtacaaacgttaatcccaatattaaccccggcgtcaatgctaatgtcaatccaagcgttaatcccaatattaattccggtgttaattccaatgtcaatcccgatgttaataagattgtcaactctaatatcaataccaatgttaatactaaccctaataccaatgtttccaacgcgaatatcaatcccgacgcgaatgtaagtgccgcccccagctccggcggtcggcccgatgattttttacagatagcgcgccgtatatgggcgaacacagaaaaattgcgtgccggattccgagaggccttctcctcgcttgatttacagaaccgcgcctcgccgcttgataagcccgccgacgattctaccgccggcaccgtcaggcgcagcgccgatacattgcgtaccgaaatgctnttagacgtctcgcgggcgttgcgtgacgttttctcttctgttgacgaactacaggagatcgtttctcagttgtcaagcgggcaaaaggcgttacccgaagtggaagccgcgctgcttcgtgcggtgcagacgcttgagcatcaggcgcgtcagagcggcgcggatgttatggagcggctgaaggacgtgctaagggagttaaaccgcttgcaggccgacgcggcgcgggcacaagagcagggcgccgccggcgcgacgcgatccgctcccgccgacgccatccgcgccgcggcgttgaccgcggcgcgcagtctggaaaacctgcaactgctctcaacccaaacgcgcaccgccgagaccgagcagcacctgctcgccctgcccgccaagatcggcggggagtggacggaggtgcagatcaaattcgtaaaggagcgaaaaaaagataaaggagaggccaaagacgggcacgtgtcgatatacctaaacgtggccccatccgtgttgggacaggtcacggcgcacttagactaccatccgcccaacctgaaactggcgttccaattcgagaagccggaggtgacccgttggttcaggcagcagtcaggcgagttgagggaagcgctgtcgcaagccggattgcccggtacggtgttggaatttcacaataggcggcctgtcggtagcgaatcgcctattccgacgcgcccgccgataggtgttgacggcgacgggattgatcaggcggacgggtttgagattaaaaacgggcgggtggattttaagatatga

SEQ ID NO: 71384 - protein, 1581 aa, Unknown
  Obtained from environmental sample
  SIGNAL (1)...(22)
  misc_feature (1)..(1581): Xaa is any amino acid
MMNAVNNIAAALAATGSGKSEGGLIKATVVRGPSGEGVFTLRLSGGREIGVQVQQSEAGGAALEPGQKVLLSPSDGKIFIPTADAAAAEQPTQSQQWAQSQQPTQMRQAAQMLLQQIQGGGDLFVSGKQQAESAVDGGGEAGGDGAKGAPPAGQDGLAKIVGFKVVSEGEAHADGIYRADAAGHILEGPADGEAPIKDFAAVRLSTVNGRQIVTVLAGDGLQAAIEELRGSFESPLLRALPPELLKDIFNERGFIDTDTLKALDAALVNRNLSIDASSQLQMERIGQWLRIALDNPGMAQELVDRIPALGAKDAAGLLELIGRLSNGVAPESFFATGNTLPRIGTNIVGGAELLQNLVKSAFSAAPSALLNLVKHIDASSVVLGAQLPPTEAARVVREITNALPAQAAAKPGSLHDAGQLSPRVLETNVSPAPKTQTPASAVPQIRVGYSELTEVTVRVLLGGGKADAAAVGERISALREAVERIPVAPSGQGRDMAVREGVSVVSGNRAESNAASANTQSAVGRLSVPANATNVNVAAKAPDASTRINAQLAVHRASSVPSGDINANVGSGNAKAANANSAANAFPAVNRGFVPQQPYAPQAGGVGTGVGTGGVNTSNINTSGINTNNNNANSTNATFDNRNIGGDVGINKSMPADSVRGTSINAGGINAKDVNSTDNQNIRGNDIGVNRPGAVDVPRDVNRSGGVGINPNINNNINNRPADNVGGAGVNKASGINTNSINSADNQNIRNDAGIGANRPISADNSRGVSQSSGVGININNSTNSNVKPVDNSLGGSINTNDINRGGINSADNQNIRNDAGVNNKQGIFDNLRGVNTNSNAKPVDNFGGMGANAHGVNTSSANATDNQNMRGDAGIGVNRYMPAGDSSGVNTSSGTGINTTGTASVNVPAIKESCLSIVDTLRSSVAPILRELTQRGEIGAGGGALLIGLVRDAVSSLDEALRPLVRSERPVPSEFYERVATGAGHRISAEAKNALFSQIGSAQALIRDAVEAAEGANAAGVNASIKPGVNPSASLGINASVRASVSPNINTIANVNTNINPSINSNINPTVNPNVNSGVNSSINLGTNKVTDLGANPNINVGVNTGINANINPIVNSGVNPNINTNVNANVNSGVNPNISPSVNTNVSTKVNPSINPGVNDNVNPNVNPNINLSVNTNVSTNVNPNINPGVNANVNPSVNPNINSGVNSNVNPDVNKIVNSNINTNVNTNPNTNVSNANINPDANVSAAPSSGGRPDDFLQIARRIWANTEKLRAGFREAFSSLDLQNRASPLDKPADDSTAGTVRRSADTLRTEMLLDVSRALRDVFSSVDELQEIVSQLSSGQKALPEVEAALLRAVQTLEHQARQSGADVMERLKDVLRELNRLQADAARAQEQGAAGATRSAPADAIRAAALTAARSLENLQLLSTQTRTAETEQHLLALPAKIGGEWTEVQIKFVKERKKDKGEAKDGHVSIYLNVAPSVLGQVTAHLDYHPPNLKLAFQFEKPEVTRWFRQQSGELREALSQAGLPGTVLEFHNRRPVGSESPIPTRPPIGVDGDGIDQADGFEIKNGRVDFKI

SEQ ID NO: 71385 - DNA, 987 bp, Unknown
  Obtained from environmental sample
  misc_feature (1)..(987): n is a, c, g, or t
gtgccggcggtagaatcgtcggcgggcttatcaagcggcgaggcgcggttctgtaaatcaagcgaggagaaggcctctcggaatccggcacgcaatttttctgtgttcgcccatatacggcgcgctatctgtaaaaaatcatcgggccgaccgccggagctgggggcggcacttacattcgcgtcgggattgatattcgcgttggaaacattggtattagggttagtattaacattggtattgatattagagttgacaatcttattaacatcgggattgacattggaattaacaccggaattaatattgggattaacgcttggattgacattagcattgacgccggggttaatattgggattaacgtttgtacttacattagtattgacgcttaggttaatattaggattaacgtttggattgacattatcattgacgccgggattaatactgggattaacttttgtacttacattagtattgacgcttgggctaatattgggattaacaccggaattgacattagcgttaacattggtattaatatttggattaactccagaattgacaataggattaatattggcattaataccagtattgacaccgacgttaatattgggattagcgcctagatcggtaaccttattagtaccaagattaatactggaattgacaccggaattaacattgggattgaccgtcggattaatattggaattaatgcttggattaatattagtattaacattggcaatagtgttaatattcgggctaacgctagcgcgaacgcttgcgttaatacctaaacttgcgctcggattaacaccgggtttaatactagcgttaacaccggcggcattggcgccctccgccgcctccaccgcgtcccgtatcagcgcctgcgccgatccgatctgcgagaagagcgcgttcttcgcctctgcgctgatccgatgccctgcccctgtggccacgcgttcgtaa

SEQ ID NO: 71386 - protein, 328 aa, Unknown
  Obtained from environmental sample
  misc_feature (1)..(328): Xaa is any amino acid
MPAVESSAGLSSGEARFCKSSEEKASRNPARNFSVFAHIRRAICKKSSGRPPELGAALTFASGLIFALETLVLGLVLTLVLILELTILLTSGLTLELTPELILGLTLGLTLALTPGLILGLTFVLTLVLTLRLILGLTFGLTLSLTPGLILGLTFVLTLVLTLGLILGLTPELTLALTLVLIFGLTPELTIGLILALIPVLTPTLILGLAPRSVTLLVPRLILELTPELTLGLTVGLILELMLGLILVLTLAIVLIFGLTLARTLALIPKLALGLTPGLILALTPAALAPSAASTASRISACADPICEKSAFFASALIRCPAPVATRS

SEQ ID NO: 71387 - DNA, 741 bp, Unknown
  Obtained from environmental sample
  misc_feature (1)..(741): n is a, c, g, or t
atgaaaaccaaactttcaaccgccatcctgttccttgccgccgccctgccggcgctcgccgccccccagttcgaccgcgagatcgtcaaaacgtccaaaggagacgtggagatagcatgcgtcgggcacgcctccctgatcctcacattcggcgggaaggtaatccacatagacccgtggtcggcaaaggccgactactccgcgctacccaaggccgacgcggttctcatcacgcaccagcatgccgaccacttagacactaccgcgttaaaacttataaaccaaaaatcgacagtctacataatgaacgcgaagaccctcgagacgtggaaaccggagtcgtcggttgtcctgtcaaacgggcagtcaaccgatatcttcgggattcgcatagacgccgtccccgcctacaacatcaagcataagcgccccgacaccggcttgccctttcacccgaagggcgagggcaacgggtacatattgacaatcggcgacaaaaaaatctacgccgccggggacacggagaacatcccggagatgaaagcgctgaagaatatcgacatagccttcctgcccatgaacctcccgtacacaatgacgcccgaaatggtcgcggacgcggctaaagggttcaagcccaaagtcctgtatccataccactacggcgagaccaaaaccggcgagcttacggaacttctcaaaggaactcagggcgttgaagtcaggatacggcgcttttga

SEQ ID NO: 71388 - protein, 246 aa, Unknown
  Obtained from environmental sample
  SIGNAL (1)...(20)
  DOMAIN (42)...(220): Metallo-beta-lactamase superfamily
  misc_feature (1)..(246): Xaa is any amino acid
MKTKLSTAILFLAAALPALAAPQFDREIVKTSKGDVEIACVGHASLILTFGGKVIHIDPWSAKADYSALPKADAVLITHQHADHLDTTALKLINQKSTVYIMNAKTLETWKPESSVVLSNGQSTDIFGIRIDAVPAYNIKHKRPDTGLPFHPKGEGNGYILTIGDKKIYAAGDTENIPEMKALKNIDIAFLPMNLPYTMTPEMVADAAKGFKPKVLYPYHYGETKTGELTELLKGTQGVEVRIRRF

SEQ ID NO: 71389 - DNA, 951 bp, Unknown
  Obtained from environmental sample
  misc_feature (1)..(951): n is a, c, g, or t
ttgaatattccgtggaagaaaaacgccgcactattcatatccggtcaggccttgtcgtacttcggcacgatggtcgtccagtatgccatcttttggcatatcaccctgaagagcaagtccggcggcatgatgacgctattcgcgcttatcgggcttctgccgatgtgcgtcatctccccgttcgccggggtctgggccgataggtacagccgcaaacgcatcatcaacatcgcggacgcctcggtcgccctcttcagcctgatcgccgccgtcatgctgacgctggggatagacagctacgcaatgctcttcgtctgcgccctggtccgcggtctcggcaccggcgtacagaatcccgcggtcaacgccttcatcccgcagatcgtgccgagggaacaccttacgcgggtaaacggcatacaaggcggcatacagtcgttcgtggccctggccaccccgatgatcgccgccgcgctgatggccgccgccccgctccagacgctgttcctcatagacgtcgccaccgctatcataggcataagcatcgtcctgttcttcgtaaaaatccccgagtgggggcgaaccgcgccggtgcgaaaagacaccggctacctgcacgagttccgagaggggataaagtacatccgcggccacggctatttgctaagaatgatcgccgtctccgccgccttcatgttccttgccgcccccgccggactgctgacgcctctgcaatcggtaagaaaattcggcgacgaggtctggcgcctctcggccatagaggttgctttctcctccggcatgatggccggcggcatcctgataggcgcgtggggcggcctgaaaaaccgcgtctacacaatggcgctctcgtgcggcctatgcgggctgctggacatcgccctgggcgtcgtccctcattctggccctacatcgcaaatatgggactga

SEQ ID NO: 71390 - protein, 316 aa, Unknown
  Obtained from environmental sample
  SIGNAL (1)...(19)
  DOMAIN (12)...(316): Major Facilitator Superfamily
  misc_feature (1)..(316): Xaa is any amino acid
MNIPWKKNAALFISGQALSYFGTMVVQYAIFWHITLKSKSGGMMTLFALIGLLPMCVISPFAGVWADRYSRKRIINIADASVALFSLIAAVMLTLGIDSYAMLFVCALVRGLGTGVQNPAVNAFIPQIVPREHLTRVNGIQGGIQSFVALATPMIAAALMAAAPLQTLFLIDVATAIIGISIVLFFVKIPEWGRTAPVRKDTGYLHEFREGIKYIRGHGYLLRMIAVSAAFMFLAAPAGLLTPLQSVRKFGDEVWRLSAIEVAFSSGMMAGGILIGAWGGLKNRVYTMALSCGLCGLLDIALGVVPHSGPTSQIWD

SEQ ID NO: 71391 - DNA, 339 bp, Unknown
  Obtained from environmental sample
  misc_feature (1)..(339): n is a, c, g, or t
gtggctcgcagcgtttacggaggtttggcgctcctcttcccgcctcgcgacgtgcccaacatcttccggtgcgcggaggcgtccggcgttaccggctgctccttgcagctcacggtcggttccatgatgtttgccagggagagaaacgtggcttttatcgcggccaaggcgccctccctgcaaatgcgtactcttgccgcgcgcttcaaaaagcatttggtgtggataccactctcaaccttttcaaccgagacgctcacgcgtatgcggcgcttccacgtgctgaacggcaagcacgtgagggcttgggcctcgcggttcataggagacgagctatga

SEQ ID NO: 71392 - protein, 112 aa, Unknown
  Obtained from environmental sample
  misc_feature (1)..(112): Xaa is any amino acid
MARSVYGGLALLFPPRDVPNIFRCAEASGVTGCSLQLTVGSMMFARERNVAFIAAKAPSLQMRTLAARFKKHLVWIPLSTFSTETLTRMRRFHVLNGKHVRAWASRFIGDEL

SEQ ID NO: 71393 - DNA, 1590 bp, Unknown
  Obtained from environmental sample
  misc_feature (1)..(1590): n is a, c, g, or t
atgagaatatccccgaagattgatatggttccgattgtccacggcgcggagatgttcgcccgcgaggcgcggcgcctttgctcggaaaataagtacgactgtatcgccgtagatatttcgccggtcttccaagatgatttggcggaggcggtggacgagttgccgctgatatcggcgcttatcgcattccgtcaagaaatatacggcgacggttcaatcggtattgatgatgatgatgatgatatatcggagccggccggttactatcttcccattgacccgtgcgacgcgatgatcgagggtatccgtcaggctcggcagagacgcataccgttccactgcgtcggggcatacacgctacgttcacaactgcagtttaatatggtaccgatgcctgacgagtattccatcaataaaatcggatttgacgcttacacgctcttgtgccgcaaagcggtgagccatatgtttcgcgcggaagtattggatcatgacgtatcggatatacggcacgagtacgaggcttttctatcgtggtacatcgaaaattttcttgacgatgcggaaagcgtaaccgataacttacgcgaattgcagaagcgatacgacaatatcctcgccatcattcacatatcgcgcttcgacgcggttatgaagatgttcaacgataaatctatacggcgtgacgatacggacgccgccacagtcgaacaaccttacgcaattataaagcggtacataaaccccgaccacctctacttcgccctgagcgaactcccgtttgtcgccgccaagtcgcagcttgagcgccaaaatccgttcgcagcgccgatggatcctacggacgcggtaaaggacttatttattgacacacgcgaaaactattacgacaatcgcgagcagacgctccacctgtcgcccgtgagaattcaagccgccctgacctatttgcgcaacctcacggtaatgtcgggacggctcatacctactctattcgatattgtagaggcggctaaaggggtaggcggcaacgcctacgccattcgcgtcctcaagaacgccaagtactacccgtttttgcctatggtaaacgacgacgcgatagtcaacgtgggtatagacagaatttcgctgagagaaaacacgtaccccgactcggagcgcgaggtttacggcgcgtcgaacctattccgcgatacagaactcttttggcgcaaacttgacataaagcccgaccccacgcttatgcaaaaaaaacgctaccgctactcgtgggaccctcgcggcgtgtgctcgcacgtaccggaggatacgcgcatagagggcttcaacgagcacgtgcgcaataaagcggcgcggattctcaccgagagcatggcgcgcagcgaaaaatttacctcctccgtaaaggacggcattgacatacgcgaaacgctgcgcaactggcatacgggcagcgtgtacgtgaaagagcttccgccggctaagaacaaggttgacactgtcattattgtttcgacgacgaccatgacgacctctatccgaaccgttcgacatggtacgccgagcacaaggaggagtctacgctga

SEQ ID NO: 71394 - protein, 529 aa, Unknown
  Obtained from environmental sample
  misc_feature (1)..(529): Xaa is any amino acid
MRISPKIDMVPIVHGAEMFAREARRLCSENKYDCIAVDISPVFQDDLAEAVDELPLISALIAFRQEIYGDGSIGIDDDDDDISEPAGYYLPIDPCDAMIEGIRQARQRRIPFHCVGAYTLRSQLQFNMVPMPDEYSINKIGFDAYTLLCRKAVSHMFRAEVLDHDVSDIRHEYEAFLSWYIENFLDDAESVTDNLRELQKRYDNILAIIHISRFDAVMKMFNDKSIRRDDTDAATVEQPYAIIKRYINPDHLYFALSELPFVAAKSQLERQNPFAAPMDPTDAVKDLFIDTRENYYDNREQTLHLSPVRIQAALTYLRNLTVMSGRLIPTLFDIVEAAKGVGGNAYAIRVLKNAKYYPFLPMVNDDAIVNVGIDRISLRENTYPDSEREVYGASNLFRDTELFWRKLDIKPDPTLMQKKRYRYSWDPRGVCSHVPEDTRIEGFNEHVRNKAARILTESMARSEKFTSSVKDGIDIRETLRNWHTGSVYVKELPPAKNKVDTVIIVSTTTMTTSIRTVRHGTPSTRRSLR

SEQ ID NO: 71395 - DNA, 960 bp, Unknown
  Obtained from environmental sample
  misc_feature (1)..(960): n is a, c, g, or t
atgcgtttccaccatatagtcggatgcaccatggataaaatcgtcgtagacaatgtagagttagccctggcccaccccgtagcaaccaccgcagagtggatcggccagtcagagcctatgcgtcagttactcgcctgctggatcaccgtagacaaacgcgatctgccgctaacgccgcgcatcatcggctacccgggtatcggcaaaaccaccctcgccatagccgcggcgcgggcgcgggggcaagacgtctacataatgcagtgcaccgccgacacccgccccgaagaccttctggtcacgccggtgctctccgaacaaggcaagatatcctaccacgcctcgccgctcctcaccgccgccgtcagaggcgccgtggccatcctagacgagggaaacaggatggcggagaagtcgtgggcgtcgctcgccggactattcgacaaccgcagaatggcggagtcggtcgtcgccggaataaccgtatgcgcccatccggatttcagggcggcgataacgatgaacgaggactcctccactttcgagatacccgactacattatgtcccgcctgcaacccggaataaaaatacccttcccggtgagggaagacgagatgaaaatactctcctacagtctccccttttcgagcggcgaaatattagatatgtgcgtagactacctgcaaaaggcgcacgggcttgacctgtctttctcggtgcgcgacggaataaacatcatacgctacgcgctcaaactcaaggagagcgacaagggcgcggacacaagcgaactcttcatcagggcggtgagccagatactcggagaagacgccctcgacatagacaaattggcgcagactcgcaaaaggcagggcgacataccgtccatgaacctcggcgatttcttcttttccgatgacgaagacctcaacccggactccgaaaaggggtggggttga

SEQ ID NO: 71396 - protein, 319 aa, Unknown
  Obtained from environmental sample
  DOMAIN (61)...(193): ATPase family associated with various cellular activities (AAA)
  misc_feature (1)..(319): Xaa is any amino acid
MRFHHIVGCTMDKIVVDNVELALAHPVATTAEWIGQSEPMRQLLACWITVDKRDLPLTPRIIGYPGIGKTTLAIAAARARGQDVYIMQCTADTRPEDLLVTPVLSEQGKISYHASPLLTAAVRGAVAILDEGNRMAEKSWASLAGLFDNRRMAESVVAGITVCAHPDFRAAITMNEDSSTFEIPDYIMSRLQPGIKIPFPVREDEMKILSYSLPFSSGEILDMCVDYLQKAHGLDLSFSVRDGINIIRYALKLKESDKGADTSELFIRAVSQILGEDALDIDKLAQTRKRQGDIPSMNLGDFFFSDDEDLNPDSEKGWG

SEQ ID NO: 71397 - DNA, 609 bp, Unknown
  Obtained from environmental sample
  misc_feature (1)..(609): n is a, c, g, or t
gtggatcggccagtcagagcctatgcgtcagttactcgcctgctggatcaccgtagacaaacgcgatctgccgctaacgccgcgcatcatcggctacccgggtatcggcaaaaccaccctcgccatagccgcggcgcgggcgcgggggcaagacgtctacataatgcagtgcaccgccgacacccgccccgaagaccttctggtcacgccggtgctctccgaacaaggcaagatatcctaccacgcctcgccgctcctcaccgccgccgtcagaggcgccgtggccatcctagacgagggaaacaggatggcggagaagtcgtgggcgtcgctcgccggactattcgacaaccgcagaatggcggagtcggtcgtcgccggaataaccgtatgcgcccatccggatttcagggcggcgataacgatgaacgaggactcctccactttcgagatacccgactacattatgtcccgcctgcaacccggaataaaaatacccttcccggtgagggaagacgagatgaaaatactctcctacagtctccccttttcgagcggcgaaatattagatatgtgcgtagactacctgcaaaaggcgcacgggcttga

SEQ ID NO: 71398 - protein, 202 aa, Unknown
  Obtained from environmental sample
  misc_feature (1)..(202): Xaa is any amino acid
MDRPVRAYASVTRLLDHRRQTRSAANAAHHRLPGYRQNHPRHSRGAGAGARRLHNAVHRRHPPRRPSGHAGALRTRQDILPRLAAPHRRRQRRRGHPRRGKQDGGEVVGVARRTIRQPQNGGVGRRRNNRMRPSGFQGGDNDERGLLHFRDTRLHYVPPATRNKNTLPGEGRRDENTLLQSPLFERRNIRYVRRLPAKGARA

SEQ ID NO: 71399 - DNA, 576 bp, Unknown
  Obtained from environmental sample
  misc_feature (1)..(576): n is a, c, g, or t
gtggtcgagcaatttcatcgccgagatgctgttcagacgatgggcgccgagaggatgggcgacccggggacctggcccaagggggcggcggcggtgggcgcgtggtgggagtccagggggctgccgggcaaaccgcagataataaacggctccggcatgggcggggagcgcgcgtcgctgccgcgaaacgccatcgaggacgacgactcctccggcgccccgcctaagaacgataatcgggtgagcccggcgcagatcgtccagctgctgacctacgtgtctaagcagaagaactactaccccgactacgtggcctccctgtcgtcggcgggcgtggacggcacgctgcgctcgcgtttccagcggtcgaagcttcgggggattataagggcgaaaacggggacgctcaattcggtgaaagtcagcactctggccggttacatgttcctggagagcaagacctacgcgttcgcggtattttgcagaaacgtagggccgaatcagtatgataactggataatgcaggagcaaatactggaggctgtggcgaggaatacggagtggagcggcaggtag

SEQ ID NO: 71400 - protein, 191 aa, Unknown
  Obtained from environmental sample
  misc_feature (1)..(191): Xaa is any amino acid
MVEQFHRRDAVQTMGAERMGDPGTWPKGAAAVGAWWESRGLPGKPQIINGSGMGGERASLPRNAIEDDDSSGAPPKNDNRVSPAQIVQLLTYVSKQKNYYPDYVASLSSAGVDGTLRSRFQRSKLRGIIRAKTGTLNSVKVSTLAGYMFLESKTYAFAVFCRNVGPNQYDNWIMQEQILEAVARNTEWSGR

SEQ ID NO: 71401 - DNA, 822 bp, Unknown
  Obtained from environmental sample
  misc_feature (1)..(822): n is a, c, g, or t
gtgaaagaaggcgccgacttccccccgtggaagtccgatttacatatcttccaatttatctttgaaatagattcaaaccttgaaaaattacagcttattgaaaaaaatctttcagaggcaagccagcttcagtattttcagcttttattctttttatgcgcgcttatcatcagtattgttcttgcgttgtgggcgctttacagcaggtttgaaaaggcggtaatcaaagaacggcaaagccttgccttttcccacctaacgatagaaggtcttgaggcggaacgcaggcgcgtatcccgtgaactgcacgacaccgtactgccgctggttcaagacgcgcaagtttccgcgctcattcgctcaatctgcgtggaattaatgcctcccgattttgcgcggctctcccttaatgactctttggcgggattatgcgttcaattcactaaacgctcaaggatagagtgcgcttgttccatagaggacgggcttacttttgcggcgtatagccccgaaagacaactccatatctatcgcatggttcaggaatcttttaccaatatcgaaaaacactcaaaagccggacgggcggctttggtagtccgtcgtttaaatggaaatattttaatttgcgtttctgacgacggagagggcttaaaaggcgtacccatatccgccgacggtattccgtcaggagcgggattaggcataaagagcatgcgccagcgggcggatattttgggggcgaaacttgactttataagcgaaagcggcaacgggcttatggtaagaattgaacttgagagggattctaatcgtgattaa

SEQ ID NO: 71402 - protein, 273 aa, Unknown
  Obtained from environmental sample
  DOMAIN (171)...(269): Histidine kinase-, DNA gyrase B-, and HSP90-like ATPase
  misc_feature (1)..(273): Xaa is any amino acid
MKEGADFPPWKSDLHIFQFIFEIDSNLEKLQLIEKNLSEASQLQYFQLLFFLCALIISIVLALWALYSRFEKAVIKERQSLAFSHLTIEGLEAERRRVSRELHDTVLPLVQDAQVSALIRSICVELMPPDFARLSLNDSLAGLCVQFTKRSRIECACSIEDGLTFAAYSPERQLHIYRMVQESFTNIEKHSKAGRAALVVRRLNGNILICVSDDGEGLKGVPISADGIPSGAGLGIKSMRQRADILGAKLDFISESGNGLMVRIELERDSNRD

SEQ ID NO: 71403 - DNA, 936 bp, Unknown
  Obtained from environmental sample
  misc_feature (1)..(936): n is a, c, g, or t
ttgaacccgaaaacaaaaacgcaagcgcaaacgcaagcgatgcaatcgcagcaatcgcagcagtcaggactgatactactcaataaaaaacccggcgttacttcttttgaagcgttaggtgaagtaaaacgcgccctaggaacgggaaaggtaggacacaccggaactttggataaattcgctcaaggacttttactggttcttacaggcagggcgctcaggctcaccccttggttttcgcactgcgacaaacagtaccgtgggcgtatccgctttggcgcggagaccgacaccctcgaccctgagggcaatgtaatcgcggaagcgcagccgccttcgcgcgagagcgtagagcaggctattaaaatatttaagggcgatataatgcaaaaaccgcctgttttttccgctatccacataaacggacagcgcgcctcaaaacttgcccgaagcggcgagcttcccgaaatgaaagaaagagccgtaaccatttacaaccttgaactggtagaatggcagcctccttttgccgacatttttgttcactgttcaagcggcacttacatacgctccctcgcaagagacatcgccttgtcggcaggcagcagggcgcacttgtcctcgctgttacggacacaagtcgcctccttttccctcgacatggcagatgacgcaatttcctctgcgcgccccatagacaaatccgtaatcgccgcgcttggattgccgcggtacgaggtaacgcccgcggaagccgaaaatatttcccacggcaaactccttgcgccgattcttgaagagaaagaaatattttcacataactcgctttcaacgcacaatgcggcggatatttccgcggctgtattttgcggggaaaatcttatcgctgttgtagaaaaaaccggcgaagtgtggaaatacggatgtgtgttgtaa

SEQ ID NO: 71404 - protein, 311 aa, Unknown
  Obtained from environmental sample
  DOMAIN (43)...(189): TruB family pseudouridylate synthase (N terminal domain)
  misc_feature (1)..(311): Xaa is any amino acid
MNPKTKTQAQTQAMQSQQSQQSGLILLNKKPGVTSFEALGEVKRALGTGKVGHTGTLDKFAQGLLLVLTGRALRLTPWFSHCDKQYRGRIRFGAETDTLDPEGNVIAEAQPPSRESVEQAIKIFKGDIMQKPPVFSAIHINGQRASKLARSGELPEMKERAVTIYNLELVEWQPPFADIFVHCSSGTYIRSLARDIALSAGSRAHLSSLLRTQVASFSLDMADDAISSARPIDKSVIAALGLPRYEVTPAEAENISHGKLLAPILEEKEIFSHNSLSTHNAADISAAVFCGENLIAVVEKTGEVWKYGCVL

SEQ ID NO: 71405 - DNA, 423 bp, Unknown
  Obtained from environmental sample
  misc_feature (1)..(423): n is a, c, g, or t
atgccggctttcagaacggaacgtcttggtcagacgatacaggaaaaaataggttcgctgattcttgaaggcaaaataaaagattcccgcgttaacacatttctttctattacaaaagtagacgtatcaagagatctgtcctttgccgacgtttatgtttcagacattcgcggtaaaataaacgaaaaagaagtggaaggcttgcaaagcgcggcgggttttattcaatcccagcttggagctgcaatgcacatcagaaaaatcccgcgccttcgtttccacgccgataaaagcataggcgaaagttttgatataataaagaaaatagaggaactagttgaacccgaaaacaaaaacgcaagcgcaaacgcaagcgatgcaatcgcagcaatcgcagcagtcaggactgatactactcaataa

SEQ ID NO: 71406 - protein, 140 aa, Unknown
  Obtained from environmental sample
  DOMAIN (5)...(109): Ribosome-binding factor A
  misc_feature (1)..(140): Xaa is any amino acid
MPAFRTERLGQTIQEKIGSLILEGKIKDSRVNTFLSITKVDVSRDLSFADVYVSDIRGKINEKEVEGLQSAAGFIQSQLGAAMHIRKIPRLRFHADKSIGESFDIIKKIEELVEPENKNASANASDAIAAIAAVRTDTTQ

SEQ ID NO: 71407 - DNA, 393 bp, Unknown
  Obtained from environmental sample
  misc_feature (1)..(393): n is a, c, g, or t
ttgcagagccgaaagttctacaaatattgtttgtccgccccaatcttcgggcataagtccaagctcggaaagctggctttttaccctgtcgggattcgcttcaggtttgtcaattttatttacggcgacaataatcggcactttcgcgtctttcgcgtgattgatagcctcgattgtttgcggcataacgccgtcgtcggcggctacaacaaggacaacaatatccgttatctgcgcgcctctcgccctcatacgcgtaaacgcttcgtgaccgggcgtgtcaaggaaggtaagagcgccgtgcggagtttcaaccatgtacgcgccgatatgctgagtaatgccgccgaattcgcccgacactacgtccgatttacggatagcgtccaataa

SEQ ID NO: 71408 - protein, 130 aa, Unknown
  Obtained from environmental sample
  misc_feature (1)..(130): Xaa is any amino acid
MQSRKFYKYCLSAPIFGHKSKLGKLAFYPVGIRFRFVNFIYGDNNRHFRVFRVIDSLDCLRHNAVVGGYNKDNNIRYLRASRPHTRKRFVTGRVKEGKSAVRSFNHVRADMLSNAAEFARHYVRFTDSVQ

SEQ ID NO: 71409 - DNA, 2214 bp, Unknown
  Obtained from environmental sample
  misc_feature (1)..(2214): n is a, c, g, or t
atgaatcaaacggagtcaacacagacggccgcaactgcggcggcgttccttttcccgctcgacgggcgcgaaatcgctatcgggcgcgacacgtcgtgcgacatcaaactcatgggcgtaggggtgtcgcgccgccacgccgttgtgcgttgcgacgcggcgcgtccgctcgtcatagactccggcagcacctgcggcacctccttagacgatacgcccgttacagaagcggttctgcgcagcgattcggtactgacgataggcgtaaacgtgctgcgggtttacatagacgatgtctcgatcagcttcacgcttttgaactccggcggcgacgactcggcgcttggcggcgcggagggcggcgtcataaggatcgggcgcgacacggaaaacgatatttgcctgccgcaccccatggtgtcccgctttcacgccgtcgtcaagaaagacgccgacgggctttcagtcattgatcagggcagcgccaactcaacttatgttaacgggcgctcggtggggacgcgctcgcttcgcgaaggcgacgtcgtacacatcgggccttttaagttctacgttaagggcggagagttgcgtcgggccgacgacctgagcaagatacgtatagaggcccgcgcgctgggggtgaggctgggcgccaagaggctcttggacaacgtcaacttgactatagaaccgggcgacttcgtcgcgctgttagggccgtcgggcgccgggaagtctacgctttgcaaggtgctgtcaggacagctcgccccgacgaacggacggctcttcatgaacggcttccccgcggctaaattcggcgctgtcttcgcccgcagcatgggttacgtgtcgcagcagatactgctacggccggagttgaccgtgtgggagacgctctccgaccaaagcctgatacgcctccccggcgacagcaccgagaaggaacggcgttgccgcgccgccgaggtgctcgaactcatggaactcacggataggcgcgatacgcgcgtatcgaacctgtccggcggcgaggcgcggcggctgcacgtgggcgtggagcttttggcgtcgccctccgtggtaatcctcgacgaaccactcgccggacttgacccgggacttatagggaagttcatgcagattttcaggcgcataagcgacagggggcacacgctcatcctcatcacgcatacgcttgagcggcttgaactgtgcgacaggctggtgtacatacaggcgggcaagatgctgttctccggcgcgccgagcgccatttgcgggcattttaacgtctcgtccatatcgcaggtctacgagcgttccggcgccggcgggttgggggccgacgccgacggaggacggcccgcgggcgtcgcggcggcgcccgcttacaccgcgaccgcctccggacagggcttgccgcgccgcgattgggcggcggcgctgcgccacccgctgacggcgctgcggtttttctcccgccagacgggggcgcttacggcgcggtacgcaaaggtgtacgtgagggataggcgcaacatgctgcttttgatggcgcaaacgccgctaattacgctgcttctgggctttgtctacaagatgtctataatgcagttcccgataagtttttacttctgcctcgcggttacgggcatctgggtgggcgggcttgacgcggtacgcgaggttgcggcggagttgccgctcttggcgcgggaggcaaggtgcgggatgaaccgctgggcgtacattatagctcggatagccgtcgccgccgccctttccgccgcgcaggcgctgctgtttacggtatccgcggtcattatcttcaggcagttggagttttcgtgcccgttgctcgtgttgctttacgcggcaatcttctccggcaatcttttggggcttgccgtgagcgcgtgcagcggcggcgtggggcgggctatcagcacgctccccatagtcctcattccgcagatattcttttcgggcatactggtcatgttcgagcacatggcggagctagggcaacagatttcccgtctgacaatatcgcgtccggtcttcgggattatgaagaaggtcttctttttggataggccgcttttccggcatagcgagtggatagagttaattttgctttgcgccgggctaattattatattttggatagcgctcaggagccgcaccggccgccgcggcgcatcttag

SEQ ID NO: 71410 - protein, 737 aa, Unknown
  Obtained from environmental sample
  DOMAIN (496)...(698): ABC-2 type transporter
  misc_feature (1)..(737): Xaa is any amino acid
MNQTESTQTAATAAAFLFPLDGREIAIGRDTSCDIKLMGVGVSRRHAVVRCDAARPLVIDSGSTCGTSLDDTPVTEAVLRSDSVLTIGVNVLRVYIDDVSISFTLLNSGGDDSALGGAEGGVIRIGRDTENDICLPHPMVSRFHAVVKKDADGLSVIDQGSANSTYVNGRSVGTRSLREGDVVHIGPFKFYVKGGELRRADDLSKIRIEARALGVRLGAKRLLDNVNLTIEPGDFVALLGPSGAGKSTLCKVLSGQLAPTNGRLFMNGFPAAKFGAVFARSMGYVSQQILLRPELTVWETLSDQSLIRLPGDSTEKERRCRAAEVLELMELTDRRDTRVSNLSGGEARRLHVGVELLASPSVVILDEPLAGLDPGLIGKFMQIFRRISDRGHTLILITHTLERLELCDRLVYIQAGKMLFSGAPSAICGHFNVSSISQVYERSGAGGLGADADGGRPAGVAAAPAYTATASGQGLPRRDWAAALRHPLTALRFFSRQTGALTARYAKVYVRDRRNMLLLMAQTPLITLLLGFVYKMSIMQFPISFYFCLAVTGIWVGGLDAVREVAAELPLLAREARCGMNRWAYIIARIAVAAALSAAQALLFTVSAVIIFRQLEFSCPLLVLLYAAIFSGNLLGLAVSACSGGVGRAISTLPIVLIPQIFFSGILVMFEHMAELGQQISRLTISRPVFGIMKKVFFLDRPLFRHSEWIELILLCAGLIIIFWIALRSRTGRRGAS

SEQ ID NO: 71411 - DNA, 573 bp, Unknown
  Obtained from environmental sample
  misc_feature (1)..(573): n is a, c, g, or t
atgaaaaccggtaaaatatttgtattctcggcgccgtccggcgctggaaagtccacaattttgagccaccttgcggaaacggtgcccaatctcgtgtactcaatctcggccaccacgcgcaaaccgcgtgtcggcgagagggacggggtgcactacttctttatgaccaaggaagagtttgaggccaaggcggctaagaacgagtttgccgagtggcagcaagtgttcggcaactactacggcacgccgcgcgccttcatagactcggtggcggctaccgggcgccatattcttatggacatagacgtcttcggaaagaagaagttcgacgcggcgtacccggaggccgtcgggatacttatagttccgccctccgtggaggcgcttgaggcgcggcttcgggcgcgcggtaccgacgacgaggcgacgataaaattgcggctcgagaaagctcgcaccgagatggcgttcgcgcgttccgagggcaagtacgagtacgagatcgtgaacgacgatttagagaccgcggaggccgagacggcggcgcttataaggacgattatcggcggatga

SEQ ID NO: 71412 - protein, 190 aa, Unknown
  Obtained from environmental sample
  DOMAIN (39)...(143): Guanylate kinase
  misc_feature (1)..(190): Xaa is any amino acid
MKTGKIFVFSAPSGAGKSTILSHLAETVPNLVYSISATTRKPRVGERDGVHYFFMTKEEFEAKAAKNEFAEWQQVFGNYYGTPRAFIDSVAATGRHILMDIDVFGKKKFDAAYPEAVGILIVPPSVEALEARLRARGTDDEATIKLRLEKARTEMAFARSEGKYEYEIVNDDLETAEAETAALIRTIIGG

SEQ ID NO: 71413 - DNA, 549 bp, Unknown
  Obtained from environmental sample
  misc_feature (1)..(549): n is a, c, g, or t
atgctaagtgagaaaatgaacaagaaaccgcctgcactaggcgagtctttatttgaccgcgtgattgaggacgggtgttactatgtcgataagacgctgtttataaaggatatactggacaacagagcgaatgttctcctatgtactcgtccgcgtcgtttcggtaagacgctgaatcagacgatgctgaagtgtttctttgaggacacggcgccgataggcggcaaggacacgcgggcgttgtttcgcgggctgaagatagaggaagcgggggagcggtacatggagcgtcaggggaagtatccggtgatatatctgagtttcaaggatactaagtctttaaattttgacgggtcgtacggcatgttggtgggttggattgccagagagtttgagcggcacgcctacgccgctgaaaaaatatcagatgattataatagggatttgtttaagaaattgtctaaaagcgccggttccatcagtgattaccgttggtcgttgaggtttttgtgcgagtgttggagaactaccacggcaagagaccgataa

SEQ ID NO: 71414 - protein, 182 aa, Unknown
  Obtained from environmental sample
  misc_feature (1)..(182): Xaa is any amino acid
MLSEKMNKKPPALGESLFDRVIEDGCYYVDKTLFIKDILDNRANVLLCTRPRRFGKTLNQTMLKCFFEDTAPIGGKDTRALFRGLKIEEAGERYMERQGKYPVIYLSFKDTKSLNFDGSYGMLVGWIAREFERHAYAAEKISDDYNRDLFKKLSKSAGSISDYRWSLRFLCECWRTTTARDR

SEQ ID NO: 71415 - DNA, 1773 bp, Unknown
  Obtained from environmental sample
  misc_feature (1)..(1773): n is a, c, g, or t
gtggccgccccttttacgacgattaaaaccgaaacaaggtggtggagatttttgattatgctaattacgaacacgaacaagaaaccgttgccgataggcgaatctcgttttgaccgccttattgaggacgggttttactatgtcgataagacgctgtttatcaaagaactgatggacatgagagacgtggtcactctctacacccgtccgcgtcgtttcggcaagactttgagccagacgatgctcaagtgtttctttgaggacacggcgccgataggcggcaaggacacgcgggcgttgtttcgcgggctgaagatagaggcggcgggggagcggtacatggctcatcaggggaagtatccggtgatatatctgacgtttaaggatacgagggccgacactcttgaagacgcgttaaataaattaaagaaatgtatagctcaagaatttgagcggcacgcctacgttcttgaaaaaatacccgacgattataataggaatatatttaaggaactgtctgaatgtgcgggttccgtcgttgacaatcaagaatcgttgaggtttttgggcaattacttggagaaatatcacggtaagagaccgataatcctgattgacgagtacgatgtaccgctggaaaacgcgtggtctcgcggtttctttcgggaggttgttaattttatacgtgatctctttagtgttgcgctaaaggacaactcgtacatggagtttgccgtgatgaccggatgtctgagagtttccaaagagagcattttcaccggtctcaacaatctggcggtgtattcggttttcacacgtgattttgccgaacatttcggctttacgcaaaatgaggtggacgctatgctgaaatactacgatatggaggacaatgcgcagatcgtcagggagtggtacaacggatatgtgttcggcgatacggagatatataatccttggagttgcttgaaagttgtgagatcttggattgtggacaaaaatattaatccgcaaccctattgggtaaataccagcggtaataatatcattcgcgatatgatagacaagatgggttttaaaataaggcccgacctcgaaaccctgatggccggcgggacggtctcggcgctagtgcacgaggatgtgacttttgatggagtgtatagtgataccgataatatctggaacttcttattcttcaccggctacctgaaaaagaaaaatgtcgaaaaaaagtcggttgactacttaggaagagtaatcttagatttggagattccaaacagagagttgcgtattatctttgatgaaaaaataaaggaatggtttaacgagagcataaaagcgaaagaccttagcgtatttttcaacgccgttctgagcggggaagcggagactttccaaaaggagttgtccgagcttcttgccggtagcataagcttcatggacagcgccgagaatttttaccacgggtttatggtgggagtgttgtcttggttggaaggatatgaggtaaaatccaacagagagagcggaaacgggcgcagcgatttggtcttgtacagtgccaacggtgtggacaacaaggcggtcatattcgagttcaagttggcaaaagaatttggcgaactgcctgaagcgtgcgaaaaagccattaagcagatagaggaaaataattacgccggcgattggggtaagaaaggctatacggacattatcaagtacggaataggttttcacaggaaaaggtgtatggtgaggaaagggaattag

SEQ ID NO: 71416 - protein, 590 aa, Unknown
  Obtained from environmental sample
  DOMAIN (27)...(589): Protein of unknown function (DUF1703)
  misc_feature (1)..(590): Xaa is any amino acid
MAAPFTTIKTETRWWRFLIMLITNTNKKPLPIGESRFDRLIEDGFYYVDKTLFIKELMDMRDVVTLYTRPRRFGKTLSQTMLKCFFEDTAPIGGKDTRALFRGLKIEAAGERYMAHQGKYPVIYLTFKDTRADTLEDALNKLKKCIAQEFERHAYVLEKIPDDYNRNIFKELSECAGSVVDNQESLRFLGNYLEKYHGKRPIILIDEYDVPLENAWSRGFFREVVNFIRDLFSVALKDNSYMEFAVMTGCLRVSKESIFTGLNNLAVYSVFTRDFAEHFGFTQNEVDAMLKYYDMEDNAQIVREWYNGYVFGDTEIYNPWSCLKVVRSWIVDKNINPQPYWVNTSGNNIIRDMIDKMGFKIRPDLETLMAGGTVSALVHEDVTFDGVYSDTDNIWNFLFFTGYLKKKNVEKKSVDYLGRVILDLEIPNRELRIIFDEKIKEWFNESIKAKDLSVFFNAVLSGEAETFQKELSELLAGSISFMDSAENFYHGFMVGVLSWLEGYEVKSNRESGNGRSDLVLYSANGVDNKAVIFEFKLAKEFGELPEACEKAIKQIEENNYAGDWGKKGYTDIIKYGIGFHRKRCMVRKGN

SEQ ID NO: 71417 - DNA, 3294 bp, Unknown
  Obtained from environmental sample
  misc_feature (1)..(3294): n is a, c, g, or t
ttgacgacgggcgaccaatatgaaatcagcgtgtcgccgcccgactccgtgctgttcggttccttgcaggcgccgtacacgcagccggtcgctaagactgtgacgatactcaatacgggtaccgttccggttgcggtaagtttgaagacggatgacgcgccgtcgttcaccgtcagccagttgtctaggacgacgataccggtcggttccacggcgacctttacggtgcgtccgaatgccggtctgcccgccgggaagacttacgacgacgagagtatagtgatctcgtacgtcgataaagatgctccgaacggttatgttaaagcatggtatttatatccttggttcaaggtgacggaagcgccggtaatcgagatcaccaagcatcccaaggagatcacgacggtgtccatcggcgctatcgacgacactcttaatgttgcggccaagattaaccgatcgggcgccgagcttaagttcgtgtggtacaggccgaccacggcggttaccaccggcggtacggcggtgaagacggagacgttggtggcggagaaggcgggtgtgtcggtagtctccacattcccgttgccgacgaatctcacggcgggaacgtactactactacgttgtggtatcgtccgccggagcgcaggaggtcaagtcgatagttgcgacggtgacggcctcttctatcaaggtgacgccgctggagccgtttgtgccggtggtatggaaggacgaagagggccgtctgtacaagcagcccgcggcgcagacggtcagggtcaccaacatgggaaccggcgcgattacgctggagcagcccaagacgagcgtgacggcttcgagctatatcataagccagctgtcgtctacaagcgttgcgaagggttcttcggtgacctttaccgtgcgtcccagagcggatttggagctgggcgggcccgctaaagataaggacactacgttcttggagaagataacgatacgcggcaacagcggcgctatcgggacggtggacgcgtcgttcaccatgtatagggagaagacggtgaagatcagcctgtcgaagctggagtcgttcggctctctgccggcgccgtacaagcagccggctatgcagacggttatcatcaccaacataggtaccgaaccggttacgctggatccgccggagaagccggagtcgaagtactttgagaccggggtgctgataaggacgatagacggtttgcccatgcggaagggcgaccttctgacgaacggggccaaggcgacctttacggtgcgtccgctatccggactgttaggcgacggcggcgaagagaatgacggcgtatacgatgagtggatcgacgtcacggccaacgatactaatatgtttgccgagtcctatacggcaagcgtgttggcgaagttcagggtggagggcgatatgctcttggagataagcgcctctccgctcacgaccttcggccacgtatactctacgccgtacacggtgccggatcagcagatagtgaccatacgcaacaccggtaagggcactatcaagaatctgaccctgtccccggtgaagaattacacggtagggcagctgtcgtccaccactcttcttgtaggcggctcggcgacctttaccatccgtcctatcgccgacttgccggtgggcaaccacgacgaggagataaaggtgagcggcgtcggttccaccgttgacggcgacactgttgtgagcacgatcgtctatccgacgttcgcggttgcgccggttcgcacgatcatcgcctcggtgcccgatgttttcggccccgtttacgacgtgccgtacgttcagcccgccgcgcagaaggttgtgataaccagcacctgcgacagcgcggttacgctgtatgagccgaggtcgtccacgaactcgtcggattacattatcggcaagctgtctaagttgacactcgaggcgaacggcgacacggcgagtttctccgtgcggccgagggcggatttggacttcgggatttacaccgatgagctgataatagcttgcggcccaggcggcgccagcgttacggtgccgctgtccttcacggtggataacaagaacccgacgtacaagatctccttgtcgcgtgatacgctgaagttcggttccatgaagccgccgtactcgcgtcctgcggcgcagagcgtcaccgtcacgaacacgggttccggcagcgtgaatttgaatgagctaccggcgtttgataattacgatgtcgagctgtcgacgagaatcctccccaaaaagggttctcaggcgaccgttaccgtccgtcccaaggctgatttgaagcaagggaatcacaatgagaagattgtgatagagggcgccgacaatgtcgcggcgacgataacggccctgttcagcgtagactccgcggctgtcttcacggtaacgttcgacgcgctgggcggctgggtggatcagtcgtccgccgtgaccggcgcggacggcaagctgagcggcctgccgataccttcgcgttacggctacgccttcgtaggctggttcaggtcgatgaacggcggagccgcggtgaccacgagcacggtatttgccgcggacgccgtgatctacgcccgctggagcgccgaatcgagcggcccgtacgccgtaacgttcagcgccggcgccaacggcgcggtggccgcctctgtcgacggctactacatagcctccggcgaagaggtgcagggcggccgaaacgtcgtcttcaccgccacccccatagagggctacgaggtggtccgctggacggtcaacggcatagtgctggtagacaccgcgaggacgtacacgcttacggagatatcgaaggcgaccgacgtgatggcctctttcaacaagatatcgccgataacgatagcctcccccgaccgcgaactccccggcgcgaacaaggacgcggaggtatccgcgatagcccccgtcccgtcgctctccgccgagctgacggccggcccgaacccagccataatgtcgcaaaacggttcgataagcttctaccgccacggcagccgtgtagcctacacgacgctcacagtctacgacgcgtccggcagcgtggttaaaaagctacgcgtaatagacaacgccgtaggcagccagctgaagcgcaaggtgagcacgtggaacctacgtgacaacaccggccgcaaagtggccgccggcacgtacgtggtgaagggagtaatcaagaccgccaacggcaagaaggaacgcgtgtcgcttgtggtaggcgtagcgcggtaa

SEQ ID NO: 71418 - protein, 1097 aa, Unknown
  Obtained from environmental sample
  misc_feature (1)..(1097): Xaa is any amino acid
MTTGDQYEISVSPPDSVLFGSLQAPYTQPVAKTVTILNTGTVPVAVSLKTDDAPSFTVSQLSRTTIPVGSTATFTVRPNAGLPAGKTYDDESIVISYVDKDAPNGYVKAWYLYPWFKVTEAPVIEITKHPKEITTVSIGAIDDTLNVAAKINRSGAELKFVWYRPTTAVTTGGTAVKTETLVAEKAGVSVVSTFPLPTNLTAGTYYYYVVVSSAGAQEVKSIVATVTASSIKVTPLEPFVPVVWKDEEGRLYKQPAAQTVRVTNMGTGAITLEQPKTSVTASSYIISQLSSTSVAKGSSVTFTVRPRADLELGGPAKDKDTTFLEKITIRGNSGAIGTVDASFTMYREKTVKISLSKLESFGSLPAPYKQPAMQTVIITNIGTEPVTLDPPEKPESKYFETGVLIRTIDGLPMRKGDLLTNGAKATFTVRPLSGLLGDGGEENDGVYDEWIDVTANDTNMFAESYTASVLAKFRVEGDMLLEISASPLTTFGHVYSTPYTVPDQQIVTIRNTGKGTIKNLTLSPVKNYTVGQLSSTTLLVGGSATFTIRPIADLPVGNHDEEIKVSGVGSTVDGDTVVSTIVYPTFAVAPVRTIIASVPDVFGPVYDVPYVQPAAQKVVITSTCDSAVTLYEPRSSTNSSDYIIGKLSKLTLEANGDTASFSVRPRADLDFGIYTDELIIACGPGGASVTVPLSFTVDNKNPTYKISLSRDTLKFGSMKPPYSRPAAQSVTVTNTGSGSVNLNELPAFDNYDVELSTRILPKKGSQATVTVRPKADLKQGNHNEKIVIEGADNVAATITALFSVDSAAVFTVTFDALGGWVDQSSAVTGADGKLSGLPIPSRYGYAFVGWFRSMNGGAAVTTSTVFAADAVIYARWSAESSGPYAVTFSAGANGAVAASVDGYYIASGEEVQGGRNVVFTATPIEGYEVVRWTVNGIVLVDTARTYTLTEISKATDVMASFNKISPITIASPDRELPGANKDAEVSAIAPVPSLSAELTAGPNPAIMSQNGSISFYRHGSRVAYTTLTVYDASGSVVKKLRVIDNAVGSQLKRKVSTWNLRDNTGRKVAAGTYVVKGVIKTANGKKERVSLVVGVAR

SEQ ID NO: 71419 - DNA, 780 bp, Unknown
  Obtained from environmental sample
  misc_feature (1)..(780): n is a, c, g, or t
gtggaagaagaaccgctggaaataaaaaagcggattggctacttgccggaaaatgtgccgctctacggcgatttaaccgttgatgaatatttgaattttgcggcggatgctcgttttattccgatacaggatcgccctgcggcaattaacgcaagccttgaagcgtgcggactgacaaattaccgcacccgcaaaatagagacgctttccaaagggtatcgtcagcgtacggggcttgctcaagccattcttcacgatccgcctattctaatccttgacgaaccgactaccggtcttgacccgaatcagattatagaaattcgttctcttattaaagaacttggaaaacgcaagactgtaattctttccacgcatattttgcaggaagtggaggctgtctgcaatcaggttttgattattaacgacgggcgtattgcggcgcagggcagtcccgaggaaattgccggaagcatgaaaggcggcgacacttgggaattaatcctgaaaggcgcaggctattatgccgatacaggcgctgtcagcggaaaactgtcggcgttaggcaacatttccaatatgtctacggaaaacgctgaagacggatgcgtttgcgctaatttctttattcctgagacgcatgacggcgcaagcgcgggagagcgtattttcgattgggctgtttcgcagaacttgaaaatactcggtatgagcagaaaaaaaatcagtatagaagacatctttgtaaaacttacaagcgatgaaaaggagcgcaataaatga

SEQ ID NO: 71420 - protein, 259 aa, Unknown
  Obtained from environmental sample
  DOMAIN (1)...(143): ABC transporter
  misc_feature (1)..(259): Xaa is any amino acid
MEEEPLEIKKRIGYLPENVPLYGDLTVDEYLNFAADARFIPIQDRPAAINASLEACGLTNYRTRKIETLSKGYRQRTGLAQAILHDPPILILDEPTTGLDPNQIIEIRSLIKELGKRKTVILSTHILQEVEAVCNQVLIINDGRIAAQGSPEEIAGSMKGGDTWELILKGAGYYADTGAVSGKLSALGNISNMSTENAEDGCVCANFFIPETHDGASAGERIFDWAVSQNLKILGMSRKKISIEDIFVKLTSDEKERNK

SEQ ID NO: 71421 - DNA, 636 bp, Unknown
  Obtained from environmental sample
  misc_feature (1)..(636): n is a, c, g, or t
ttggcttgcgcaatctggctgttctttttccaacggtatttttcgatggatcaggctacgttacgcccgtatttcggcatattgccgataatttttatttttgtcgttccggtgatcaccatgaaaagctgggcggaggaaagaaaaacgggcacggttgaattgcttttaacaatgccgtttacggaatgggatcttgtattggggaaattcttttcagccttcggtatgcttgccgttatgctgattttaacatttccggttccgataagcctgtcaagtcttggaagttttgacgccggaacagttttttgcgaatatcttggagcattcttactgtgcgccagcgcgaccgctttgggtttattgctgtccagcctttccaaaagtcagggcggcgcgttcttgggaacagcggttgttttaatggcggtaatgctgataaataatattacatttgtatttaatcttccgcagtggcttgcgcaaggtattaactttttttcgcttacctttcattttgaaagtttttccaaaggtttgattgattcaagagaccttgcgttctttattttgagcgcggcgttgtttttatttatcaacacaagggttatccttttcaggaaatggagataa

SEQ ID NO: 71422 - protein, 211 aa, Unknown
  Obtained from environmental sample
  misc_feature (1)..(211): Xaa is any amino acid
MACAIWLFFFQRYFSMDQATLRPYFGILPIIFIFVVPVITMKSWAEERKTGTVELLLTMPFTEWDLVLGKFFSAFGMLAVMLILTFPVPISLSSLGSFDAGTVFCEYLGAFLLCASATALGLLLSSLSKSQGGAFLGTAVVLMAVMLINNITFVFNLPQWLAQGINFFSLTFHFESFSKGLIDSRDLAFFILSAALFLFINTRVILFRKWR

SEQ ID NO: 71423 - DNA, 1629 bp, Unknown
  Obtained from environmental sample
  misc_feature (1)..(1629): n is a, c, g, or t
atgacaaaaaaacaagttacaattattaccgcgttatctgttatcgcttttattctcgcgctaatggtcagcggtcgtttatggctgcgccttgatcttacaaaaaacaaggcgtatacgatttctaaagtttcgcgtaaccttcataaagaattatccgatcccgttaatattacttattatatttccaataagctgaagacgataactcctgtgccgggtgagattgaagacacgttaagagaatatgccgcctattcaaagggaaaaatccgccttacagtgcgcgatccgttgaaagcgggattatcaaaagccgacgagcttggtcttcaacctaggcaggtgcagaccgtagagcaggataacgcaagtcttgttaccgtatattcgggcatagttatcgaataccttgacagaatggacgtacttccgtgggttatctccacggatacgcttgaatacgatttaacatccagaatacgctctcttgttaacgacagcgaacgctggataggagtgcttgtaggcgacagtttcagacaatggagagaggatttcagttacctgtcctctacgttagacgaagccggttacagagtgcgtttgctttctgttggcgatgaaatttccgaaactatccccgcgctttttgtgcttggtggagccgaggatttagacgactggacgctttaccgtattgacagatacattcaacagggcgggaaagttctttttgcggtaaagggagtgtacatagatactgtttccggttcaatagaaccaagacttcagcgcggtcagacgttattcgaaatgatcgcttcttacggcgtaatcataagacaggagctagctctggatcgcaacgcgcttacattgcagtaccagacaagagcgcctaacggagcaatccagtacagaattatgcgttatccgctttggattggcgttttaggcgataacggaaatgaaaaacatcccgtatgctccgctttttccggtcttgatctttactgggcaagtccgttggaattagctccgcctccttccgtagaagctgtttctctttttacaagctctccgcaaggctgggctatgagggaggctttttataccaaccctgaaatagcctatatgcttgagatggaagcgaatgaaacaaagggcgtaaaaattcttggagccgcgttaacgggaactttcccgagtttttacaagggaagccccaaacccgtgcatgaaggttcaggagaagaacttcccgatatgccggattacgcgaaagaatcgcggataattgttgtcggggatacggattttgccacgaatatgatcaatgctactcaggcaagacacaatcttgatttccttctgcgcgccgcggactggctttccaatgacgacgatataatcggtataagaaacagacagccgcagacagggcgtctggataaaatagccgatccaagaagcaaggcggtagcgataaaatttattcaaattataaatatcggtcttattccgctcttggtaattattgcgggtctgtttctttcgtcaagacgtaagaaactcgcgcaaattgccgaattaaaaaacgtaaaggagaaagacgatgacgtataa

SEQ ID NO: 71424 - protein, 542 aa, Unknown
  Obtained from environmental sample
  SIGNAL (1)...(25)
  misc_feature (1)..(542): Xaa is any amino acid
MTKKQVTIITALSVIAFILALMVSGRLWLRLDLTKNKAYTISKVSRNLHKELSDPVNITYYISNKLKTITPVPGEIEDTLREYAAYSKGKIRLTVRDPLKAGLSKADELGLQPRQVQTVEQDNASLVTVYSGIVIEYLDRMDVLPWVISTDTLEYDLTSRIRSLVNDSERWIGVLVGDSFRQWREDFSYLSSTLDEAGYRVRLLSVGDEISETIPALFVLGGAEDLDDWTLYRIDRYIQQGGKVLFAVKGVYIDTVSGSIEPRLQRGQTLFEMIASYGVIIRQELALDRNALTLQYQTRAPNGAIQYRIMRYPLWIGVLGDNGNEKHPVCSAFSGLDLYWASPLELAPPPSVEAVSLFTSSPQGWAMREAFYTNPEIAYMLEMEANETKGVKILGAALTGTFPSFYKGSPKPVHEGSGEELPDMPDYAKESRIIVVGDTDFATNMINATQARHNLDFLLRAADWLSNDDDIIGIRNRQPQTGRLDKIADPRSKAVAIKFIQIINIGLIPLLVIIAGLFLSSRRKKLAQIAELKNVKEKDDDV

SEQ ID NO: 71425 - DNA, 1149 bp, Unknown
  Obtained from environmental sample
  misc_feature (1)..(1149): n is a, c, g, or t
atgggaataaaaaataaaaaatccggaagtccgtctgccggcggctcagttattgccgctctttgcatcattatctatctttttgcgttagtccagggggcagtcagaatctatttaagcatggacgatcgtaaatttaaggcggaacaggaattttccggtattgccgaccttgccctgtccgcgggaattcaaggctttatggatgaaaggtttgttaactcgattaacaaggctctttcttccagcaaaagccttgaagcgattataattaccggtcccaatggcggaaacgcttttgaaaaaaaacaagggtacgctgtttcatgggtaaacgattcaccaagatttaaaaacaaattttattttttgcgggaaaatctttacagacctctggcgcttcccgacgtacgcaacgcgaatattaaggctgtagccaatgcttttgattacgccgaatcttcaaaaataatgaaagatactttattgatcattctgataggattcaccctttctttctttacgttcttcttacaatcgttaatgggaaaaagcaaaaccgaaacagtttatataaaaactcccgaatccgcaagaagcgtctccgttaaaaatgacgattatgatttttcttctgccggaggacctaaaggactttactctccgcgaacgggactcggctgggaagaatacacaagggaaagacttgattccgaattacaccgctgttcttccacagaaaatgatcttacgcttctcttaatggaatttacagacgcaatagaagagagaatattcatacaggcggcaaaagaagcttcgtctttctttgccggcaaagatttgatttttgaacacggagaaatgggttttgccgtaattcttccgggcgcgggttttgaggcggctatcgccaaatcggaaaaattttatcagcgcattatgaaaagattcccgaacagttacatgaaagcatgcggtctttgcatagggctttcctcgcgctcaggcagattagttaacaccgacagacttatactggaagcttcggaagcgcttaaaaaagcaaagagcgacacaaagacaaagataatagcgtttaaaagcgatctggaaaaatacagggcttttattgcgtcccaaaactag

SEQ ID NO: 71426 - protein, 382 aa, Unknown
  Obtained from environmental sample
  misc_feature (1)..(382): Xaa is any amino acid
MGIKNKKSGSPSAGGSVIAALCIIIYLFALVQGAVRIYLSMDDRKFKAEQEFSGIADLALSAGIQGFMDERFVNSINKALSSSKSLEAIIITGPNGGNAFEKKQGYAVSWVNDSPRFKNKFYFLRENLYRPLALPDVRNANIKAVANAFDYAESSKIMKDTLLIILIGFTLSFFTFFLQSLMGKSKTETVYIKTPESARSVSVKNDDYDFSSAGGPKGLYSPRTGLGWEEYTRERLDSELHRCSSTENDLTLLLMEFTDAIEERIFIQAAKEASSFFAGKDLIFEHGEMGFAVILPGAGFEAAIAKSEKFYQRIMKRFPNSYMKACGLCIGLSSRSGRLVNTDRLILEASEALKKAKSDTKTKIIAFKSDLEKYRAFIASQN

SEQ ID NO: 71427 - DNA, 828 bp, Unknown
  Obtained from environmental sample
  misc_feature (1)..(828): n is a, c, g, or t
atgcaaataagagattattcattgcccgcgggctggtatccgcgcgaaaaaggcgaagtttccgcgtttttatcggattttgacaataaaaaacgctcttcccgcgccgtaatcatgccccacgcgggctggtattacagcggcagaaccgccgctcttggggctgcaagccttcagcgggacgccgaaaccgtagttattttaggcggtcatttaggagcggaaaatccgcccctnttcgccatggaagacgctgtaagaaccccctttggctccatgcccatagacaccgatttgcgctccgctttgttaaaagagattggtggcgcaaaggacggttatcgcgataacaccatagaagttcttttgccaatggcgcattatttttttccaaaggcgaatttgttgtggctacgccttcccgcctcaatttcatcctttgaaagcggaaaaaccctatcgcgaattgcggcgaaattaaaccgcaaaataacggtctttggttccacggacttaacccattacggacgcaattacggcttttcgccgcatggcggcggagaggcaggcctgcgctgggttcgcgaagtaaacgacgcttcttttataaaggcggtggaatccggggatggcgaagaagtcctgcgccgtgctgaggaggattattcttcatgttcagccggcgctgtgttgggcgcgatgggttttgccgaggaggaaggattgcaaaaagcgcggcttttggcgtatgccacaagcgctgatgtggataagagcgtggttcccgattcatttgtggggtatgcggcgtttgcgtttgatgagtga

SEQ ID NO: 71428 - protein, 275 aa, Unknown
  Obtained from environmental sample
  DOMAIN (8)...(272): Protein of unknown function DUF52
  misc_feature (1)..(275): Xaa is any amino acid
MQIRDYSLPAGWYPREKGEVSAFLSDFDNKKRSSRAVIMPHAGWYYSGRTAALGAASLQRDAETVVILGGHLGAENPPLFAMEDAVRTPFGSMPIDTDLRSALLKEIGGAKDGYRDNTIEVLLPMAHYFFPKANLLWLRLPASISSFESGKTLSRIAAKLNRKITVFGSTDLTHYGRNYGFSPHGGGEAGLRWVREVNDASFIKAVESGDGEEVLRRAEEDYSSCSAGAVLGAMGFAEEEGLQKARLLAYATSADVDKSVVPDSFVGYAAFAFDE

SEQ ID NO: 71429 - DNA, 825 bp, Unknown
  Obtained from environmental sample
  misc_feature (1)..(825): n is a, c, g, or t
atgcacgatcatcttgaccgttatgcgtcaatggaagactacattgacgacaaaaaaaatatttaccgaggacaggattcaaactgcgttacggtagccggagacgatgattggggaaaaagtttcctctctgaaacaaaagcgcgcaaacttatccgctcccacaagcaggaaatatcctccgcgttaagcgatgaacaaagcggcggttgtatcgactcaagcgggcgaggcattgcccgtcttctcaacttccggggagtacccgatgaaattacggaattggttccgcagaagatacttacacccggcagtcatcaaaaaataaatatgctctccgcggctcttgcggttttcgccctcggcggaaaagcgcaaacaatccgcgccgccctttcaaccttccccggaatagaacaccgtttagagtttttccatgaatcaaacggaatccgctattacaacgacagcgccgccacaatccccgaagccgccgccgcctgcatcgaagcattaacagagccgtctatgcacggaggactcatcctagtaacaggcggcaccgacaaaaaccttgactttacccctcttgcaagagccgccaaaaaagcaaaatcaattatcctgcttgaaggcacaggcagtgaaaaacttatccccttcttacgcgaaaacggcgtctcttacagcgaaccatttaacgatttagacaaagccgttcactgcgcgatagagaaagcgtccggcgcggacattatcgcgctttctccggggtgcgccagctttgnaatgtttttgaatgagtttgatcgtgggaggaagtga

SEQ ID NO: 71430 - protein, 274 aa, Unknown
  Obtained from environmental sample
  DOMAIN (138)...(220): Mur ligase family, glutamate ligase domain
  misc_feature (1)..(274): Xaa is any amino acid
MHDHLDRYASMEDYIDDKKNIYRGQDSNCVTVAGDDDWGKSFLSETKARKLIRSHKQEISSALSDEQSGGCIDSSGRGIARLLNFRGVPDEITELVPQKILTPGSHQKINMLSAALAVFALGGKAQTIRAALSTFPGIEHRLEFFHESNGIRYYNDSAATIPEAAAACIEALTEPSMHGGLILVTGGTDKNLDFTPLARAAKKAKSIILLEGTGSEKLIPFLRENGVSYSEPFNDLDKAVHCAIEKASGADIIALSPGCASFXMFLNEFDRGRK

SEQ ID NO: 71431 - DNA, 957 bp, Unknown
  Obtained from environmental sample
  misc_feature (1)..(957): n is a, c, g, or t
atggaaaaggtggccctcgaaaaatcgcctaggatcgccgtctacacgcccactggaaagcgcccgtgggacgacgccgtcacgctggcgctcacctacgccgagattccgttcgataaggtgtacgacagagaggtgctcggcggaaagctcaaggactacgactggctccacctccaccacgaggacttcaccggccagtacagcaaattccacggcagcttctcgcacgtcgcgtggtaccaaaagcagcgcttggagctcgagacgctcgccaaccaactcggctttaagaaggtaagcgagtgcaagaaggcggtggcgctgactatccgtaagtacgtggaggccggcggcttcctcttcgccatgtgcagcgccacgaacaccctcgaaatcgcgctggcggcgcttggcgccgacatcgccgaccaagtctacgacggcgacggcgtagacccagactacaggaagaagctcaacttcgccaactgcatggcctttgaaaacttcaccgtatatacggacccgtactacccgtcattctgcaatatagacgtgaaccaggtgaacacgccgaaccgtctgccggcgcgggacttcgccctctttgacttcagcgccaagctcgaccccgtccccgcaatgctcaaccagaaccatacggacgtagttaaaggctaccacggtctgctgaccaccttcaaccgcgacgtagtcaagaagagcgtggtgattctcggcgagacccccggcaccaagatggtgaactacatacacggcatagtggggcaggggcagttcacctacttaggcgggcacgacccggaggactacacccacgcggtgggcgacaagccgactatgcttgagctccacaaaaattctccggggtataggctgatcctgaacaacgttctcttccccgcggcggagaagaaagagaaaaagacctga

SEQ ID NO: 71432 - protein, 318 aa, Unknown
  Obtained from environmental sample
  misc_feature (1)..(318): Xaa is any amino acid
MEKVALEKSPRIAVYTPTGKRPWDDAVTLALTYAEIPFDKVYDREVLGGKLKDYDWLHLHHEDFTGQYSKFHGSFSHVAWYQKQRLELETLANQLGFKKVSECKKAVALTIRKYVEAGGFLFAMCSATNTLEIALAALGADIADQVYDGDGVDPDYRKKLNFANCMAFENFTVYTDPYYPSFCNIDVNQVNTPNRLPARDFALFDFSAKLDPVPAMLNQNHTDVVKGYHGLLTTFNRDVVKKSVVILGETPGTKMVNYIHGIVGQGQFTYLGGHDPEDYTHAVGDKPTMLELHKNSPGYRLILNNVLFPAAEKKEKKT

SEQ ID NO: 71433 - DNA, 1305 bp, Unknown
  Obtained from environmental sample
  misc_feature (1)..(1305): n is a, c, g, or t
atgcgcaaccgccgcgaggtatacgcgtggtgcctctacgactgggcgaattcggccttcgtcctcaccgtggtctccggcttcttcccgttattttttaagggctactactgcggcgcccaagcgagcgttgtggagaccaccgtccgtttgggcgtagggaacaccgtggccggagcagccatagcgctgctgtcgctgacgctgggcgccgttgccgacgccggggcggggaagaggcgtttcctgttctttttcgcggcaatcggcgcgttgagcgccgcgttgttattctttgtaggccaaggcgcgtgggtgccggcgcttcttctgtttatactgggcaacatcggcttctcgtgttcgaatcttttttatgactcgctgctgattgacgttgcggacggcgagaacatggacttggtatcgagcataggctttgccttcggctatatcggcggcgtcatactcttcggctttaacgtatggatgatggtcaaacctgagaccttcgggcttagcggctgggcggacgccgtgaagatatcttttctgtcggtggcggtatggtgggcggttttctcaatcccgcttttcctatttgtcaaagagaagaaccgcaaagcgtcaacgcgtaaaaaaatcgttacggccgtaaaggatacggccggtacggtaaaaaagactttcttggcgataatacgaagaaaagagctactgctgtttttgatcgcgtattggttgtattatgacggtataaacacattcatacggatggctgtggacttcggcctgtcgataggcttcggtccagaatccctaatggcggcgttggttacaacgcagttgacggcctttccggcgtcgctgcttttcggttacctttccacaaaggcaggggcgggcaggatgatatttgccggtgtgctgatgtacctgtttataagcgtgataggttcgatatttatgcgtacggaaacgcacttcataatcttagccgcccttgtaggcttagcccaaggcggcatacaagccctaagccgttcatatttcggaaagttaatcccgcccggagaatcaacggaatacttcggtttctacaacgtggtaagccgtttagcggtgataggccccgcggtagtgggaatagttgcgatggcgtcaagaagcgccggagcatctgagaccatatcgtcaagaataggaatgtcggcgataggcttatttttcgcaataggactgataatgttaattgccggtgatgtttttaaaaactcaggcgtcaatacaaggcgtctaaaatga

SEQ ID NO: 71434 - protein, 434 aa, Unknown
  Obtained from environmental sample
  DOMAIN (16)...(386): Major Facilitator Superfamily
  misc_feature (1)..(434): Xaa is any amino acid
MRNRREVYAWCLYDWANSAFVLTVVSGFFPLFFKGYYCGAQASVVETTVRLGVGNTVAGAAIALLSLTLGAVADAGAGKRRFLFFFAAIGALSAALLFFVGQGAWVPALLLFILGNIGFSCSNLFYDSLLIDVADGENMDLVSSIGFAFGYIGGVILFGFNVWMMVKPETFGLSGWADAVKISFLSVAVWWAVFSIPLFLFVKEKNRKASTRKKIVTAVKDTAGTVKKTFLAIIRRKELLLFLIAYWLYYDGINTFIRMAVDFGLSIGFGPESLMAALVTTQLTAFPASLLFGYLSTKAGAGRMIFAGVLMYLFISVIGSIFMRTETHFIILAALVGLAQGGIQALSRSYFGKLIPPGESTEYFGFYNVVSRLAVIGPAVVGIVAMASRSAGASETISSRIGMSAIGLFFAIGLIMLIAGDVFKNSGVNTRRLK

SEQ ID NO: 71435 - DNA, 1278 bp, Unknown
  Obtained from environmental sample
  misc_feature (1)..(1278): n is a, c, g, or t
atggctgcaaccgacaccgacggcgcggcgcggagacggccgcgaccgcgcatcatcaacaatacctacaggccggacgccaaggtaggccggttcatgagcgcgctcgtgctcataggcatatcctacgggctttacagaggcgttcaggacaattacctcgcggagatgatccgcatcacgccgtttgaacgcggcatcgtcgagttcttccgtgaaattcccggtctgctgctgatacttgttttggcgctgatgtaccgattcgcggacagcaaggtcttcaaaatcggcgtcgctctgatggccggcggggccgtaggactcgtgcttacgagcagcggcggactcttcatgaccaagatcttcgtagtgctcttcatggtgctgtacagcgtgggcgagcacataatcatgcccgtacgggctactatctccatggacttggcgaagcaagataaggccggcgccgctttggggataacaggttccatcagccagctcggtaacatcgctggttttctcattgtggccgccatattcttcatactcggcaagctcgggttccacaggaccgatataataggctacagaatcgccttcggcttggcggcggcgctgatggtcgcggccgctcttgtctccgcggcgcttaaggaaaccacgctcaaatcgcaaagacggcgattttactttgcgaaaaaattcaaaaaattctacatgctcgaagtcttctacggcgcgagaaaacagatattcctcacgttcgcgccttatgtgctgatactccagtacggcgcggatccgtccataatgtcgcaactgtacgcggtatgcgccgcattcgggatgctttgcagcccgctggtcggcaagataatagaccgggtgggatataaggccgtcatggtcgcagatacgcttattcttattgtggtatgcctgctgtacggattctcgcatcgcctgtttccggcaggcatcgcgtttgtcgtcgtctgcggtaattttgttcttgattccgtcatatccatagcgagcatggcgagcaatatatatgtcaagcggatcgcggcgaatcaggaggaggttacggccacgctgtccacggggatatcggtgaaccatgtcataagtatttttatcgcgcttatgggcgggtggatatggaaggttacggggattgaggtgttgtttgcgttgtcggcgtttttcgggttggttaatagtttgtacgcggctacgattaggaaagacgaggaatatcgcgggggttaa

SEQ ID NO: 71436 - protein, 425 aa, Unknown
  Obtained from environmental sample
  DOMAIN (32)...(391): Major Facilitator Superfamily
  misc_feature (1)..(425): Xaa is any amino acid
MAATDTDGAARRRPRPRIINNTYRPDAKVGRFMSALVLIGISYGLYRGVQDNYLAEMIRITPFERGIVEFFREIPGLLLILVLALMYRFADSKVFKIGVALMAGGAVGLVLTSSGGLFMTKIFVVLFMVLYSVGEHIIMPVRATISMDLAKQDKAGAALGITGSISQLGNIAGFLIVAAIFFILGKLGFHRTDIIGYRIAFGLAAALMVAAALVSAALKETTLKSQRRRFYFAKKFKKFYMLEVFYGARKQIFLTFAPYVLILQYGADPSIMSQLYAVCAAFGMLCSPLVGKIIDRVGYKAVMVADTLILIVVCLLYGFSHRLFPAGIAFVVVCGNFVLDSVISIASMASNIYVKRIAANQEEVTATLSTGISVNHVISIFIALMGGWIWKVTGIEVLFALSAFFGLVNSLYAATIRKDEEYRGG

SEQ ID NO: 71437 - DNA, 1776 bp, Unknown
  Obtained from environmental sample
  misc_feature (1)..(1776): n is a, c, g, or t
gtggaacttttagtcacaaagatgaacggaaaagaggtgcccagacgcacctctctgcaaacgccgctctccatacggcagtcgtgcggctgcttcatcaaccccaaccacgcgcttgacagacgcacattctcaatcatccagcgcctgtccaacaacatagaccacctcaaagagcacctcacctccgagctgttctctttcgtggccatggagatgggcgcctccatagacgacgaagacctgagagagatcgcctcttctttcttcgacgaagtggaggggacgagaaccggcgtcttcctgtcggcgctcaaccgcatggtccgcgccgccacgctcgccgccgccgagagcaacgacatcctccaatggcagaagatactcgtaaccatacgcaagttcacaataggattggacgacgccaagaccgagaccgccgacaacctcctgcacgacagctacaacctgttcagcgaggcggccgcgaggcagcaggcccacaagcgcctgcaggcggagcaaaaggccgcgctcatgcgctcggtaggccactccatagcaaactccttcgacatacccacgctctcgcaagccattgtcaagatgttcccgaggctggatataaacaacttctcgctctcgctctacgacaagtcaacaaaggaatttctgaactccaaaccgataatcgcgctgcgccgcggaaaaaaagacatcccgacgcaagatatgttcttccccacaaaagacctcgtgcccggcgggctcagggattcggaacagccgtaccacgtgatcgttcagccgctgcacttcaagaacgaacaactggggatggccgtgttcaaggacgggccgctcaccggctacatctacgacatcgtgggcgaacacctgagcggcgctctgcagggcgcgctcctgatgaaaaaaacacaggagcaggccgtcactctcgaagaggcgaacaaggagctggaaaaactccggcagcaggagcatctgcgcctggaggcgatccaacgcgaactgcagataggccggacgatacaggagagctttttgccggagtccatgccgcagccggagggctgggagtcgcgagcgttcttcatgcccgcccgcgaagtctccggagatttctacgacgccttcgctctggaagacgggcgcatcgctttcgtgatagccgacgtctccggcaaggacgtgggggcggcgctcttcatgtccctgatacgcagcctgattcgcgccttctccgagcactccgccgagggcgcggccaatccgctcaacgccgtggaactgaccaaccgctatatcgtccaccaccaccacacctccaaggggcgcttcatgtacgccacgatgttcttcgccctcgtagaccccgaaagcggcgaggtggcttatatcaacgccggccacaaccccccggcgctactgcagccggagggcaaaatcgccaaatggctcccacccaccggccccgccgtgggggtgggcataaaggacgacctcaaataccgagaagagaaattaacgctgcaacccggcgagatgctgctgatgtacaccgacggcgtaatagaagctaaaaacgaaaagggcgagtttctccaacagaagagattcgcggaattgatagagaaaccttactcatcgctcgacgacgtggtcgacagggtgaaagacgccctgaaggagcactgcgccggcgcggatccctacgacgacgttaccatggtgggaatctatcggaagggttaa

SEQ ID NO: 71438 - protein, 591 aa, Unknown
  Obtained from environmental sample
  DOMAIN (389)...(590): Stage II sporulation protein E (SpoIIE)
  misc_feature (1)..(591): Xaa is any amino acid
MELLVTKMNGKEVPRRTSLQTPLSIRQSCGCFINPNHALDRRTFSIIQRLSNNIDHLKEHLTSELFSFVAMEMGASIDDEDLREIASSFFDEVEGTRTGVFLSALNRMVRAATLAAAESNDILQWQKILVTIRKFTIGLDDAKTETADNLLHDSYNLFSEAAARQQAHKRLQAEQKAALMRSVGHSIANSFDIPTLSQAIVKMFPRLDINNFSLSLYDKSTKEFLNSKPIIALRRGKKDIPTQDMFFPTKDLVPGGLRDSEQPYHVIVQPLHFKNEQLGMAVFKDGPLTGYIYDIVGEHLSGALQGALLMKKTQEQAVTLEEANKELEKLRQQEHLRLEAIQRELQIGRTIQESFLPESMPQPEGWESRAFFMPAREVSGDFYDAFALEDGRIAFVIADVSGKDVGAALFMSLIRSLIRAFSEHSAEGAANPLNAVELTNRYIVHHHHTSKGRFMYATMFFALVDPESGEVAYINAGHNPPALLQPEGKIAKWLPPTGPAVGVGIKDDLKYREEKLTLQPGEMLLMYTDGVIEAKNEKGEFLQQKRFAELIEKPYSSLDDVVDRVKDALKEHCAGADPYDDVTMVGIYRKG

SEQ ID NO: 71439 - DNA, 1233 bp, Unknown
  Obtained from environmental sample
  misc_feature (1)..(1233): n is a, c, g, or t
atggcagaagatactcgtaaccatacgcaagttcacaataggattggacgacgccaagaccgagaccgccgacaacctcctgcacgacagctacaacctgttcagcgaggcggccgcgaggcagcaggcccacaagcgcctgcaggcggagcaaaaggccgcgctcatgcgctcggtaggccactccatagcaaactccttcgacatacccacgctctcgcaagccattgtcaagatgttcccgaggctggatataaacaacttctcgctctcgctctacgacaagtcaacaaaggaatttctgaactccaaaccgataatcgcgctgcgccgcggaaaaaaagacatcccgacgcaagatatgttcttccccacaaaagacctcgtgcccggcgggctcagggattcggaacagccgtaccacgtgatcgttcagccgctgcacttcaagaacgaacaactggggatggccgtgttcaaggacgggccgctcaccggctacatctacgacatcgtgggcgaacacctgagcggcgctctgcagggcgcgctcctgatgaaaaaaacacaggagcaggccgtcactctcgaagaggcgaacaaggagctggaaaaactccggcagcaggagcatctgcgcctggaggcgatccaacgcgaactgcagataggccggacgatacaggagagctttttgccggagtccatgccgcagccggagggctgggagtcgcgagcgttcttcatgcccgcccgcgaagtctccggagatttctacgacgccttcgctctggaagacgggcgcatcgctttcgtgatagccgacgtctccggcaaggacgtgggggcggcgctcttcatgtccctgatacgcagcctgattcgcgccttctccgagcactccgccgagggcgcggccaatccgctcaacgccgtggaactgaccaaccgctatatcgtccaccaccaccacacctccaaggggcgcttcatgtacgccacgatgttcttcgccctcgtagaccccgaaagcggcgaggtggcttatatcaacgccggccacaaccccccggcgctactgcagccggagggcaaaatcgccaaatggctcccacccaccggccccgccgtgggggtgggcataaaggacgacctcaaataccgagaagagaaattaacgctgcaacccggcgagatgctgctgatgtacaccgacggcgtaatagaagctaa

SEQ ID NO: 71440 - protein, 410 aa, Unknown
  Obtained from environmental sample
  misc_feature (1)..(410): Xaa is any amino acid
MAEDTRNHTQVHNRIGRRQDRDRRQPPARQLQPVQRGGREAAGPQAPAGGAKGRAHALGRPLHSKLLRHTHALASHCQDVPEAGYKQLLALALRQVNKGISELQTDNRAAPRKKRHPDARYVLPHKRPRARRAQGFGTAVPRDRSAAALQERTTGDGRVQGRAAHRLHLRHRGRTPERRSAGRAPDEKNTGAGRHSRRGEQGAGKTPAAGASAPGGDPTRTADRPDDTGELFAGVHAAAGGLGVASVLHARPRSLRRFLRRLRSGRRAHRFRDSRRLRQGRGGGALHVPDTQPDSRLLRALRRGRGQSAQRRGTDQPLYRPPPPHLQGALHVRHDVLRPRRPRKRRGGLYQRRPQPPGATAAGGQNRQMAPTHRPRRGGGHKGRPQIPRREINAATRRDAADVHRRRNRS

SEQ ID NO: 71441 - DNA, 321 bp, Unknown
  Obtained from environmental sample
  misc_feature (1)..(321): n is a, c, g, or t
gtgacggcgcttccactcgctgccgccagatcactaagacctactttcgtacctgctcggcctgtcagcctcgcagtcaagcctccttgtgcctttacactcatgcgccgatttccaaccggcgcgaggagaccttcgcgcacctccgttactcttttggaggcgaccgccccagtcaaaccgcctgcctatcactgtccccggcccggattcacgggtcgggttagaaacctaatcaaacaagggtggtatttcactgttgactccacacaagctaacgcccatgcttcaaagtctcccacctattctacacatgtctaa

SEQ ID NO: 71442 - protein, 106 aa, Unknown
  Obtained from environmental sample
  misc_feature (1)..(106): Xaa is any amino acid
MTALPLAAARSLRPTFVPARPVSLAVKPPCAFTLMRRFPTGARRPSRTSVTLLEATAPVKPPAYHCPRPGFTGRVRNLIKQGWYFTVDSTQANAHASKSPTYSTHV

SEQ ID NO: 71443 - DNA, 303 bp, Unknown
  Obtained from environmental sample
  misc_feature (1)..(303): n is a, c, g, or t
gtgccaaaccttcccgtcgatgtggactcttggggaagatcagcctgttatccccggagtaccttttatccgttaagtgacggcgcttccactcgctgccgccagatcactaagacctactttcgtacctgctcggcctgtcagcctcgcagtcaagcctccttgtgcctttacactcatgcgccgatttccaaccggcgcgaggagaccttcgcgcacctccgttactcttttggaggcgaccgccccagtcaaaccgcctgcctatcactgtccccggcccggattcacgggtcgggttag

SEQ ID NO: 71444 - protein, 100 aa, Unknown
  Obtained from environmental sample
  misc_feature (1)..(100): Xaa is any amino acid
MPNLPVDVDSWGRSACYPRSTFYPLSDGASTRCRQITKTYFRTCSACQPRSQASLCLYTHAPISNRREETFAHLRYSFGGDRPSQTACLSLSPARIHGSG

SEQ ID NO: 71445 - DNA, 438 bp, Unknown
  Obtained from environmental sample
  misc_feature (1)..(438): n is a, c, g, or t
atgcttagacctccaacctatcaaccaggtagtcttcctggtacctttaggggggttaaacccccagggatggtttatcttgaggagggcttcccgcttagatgccttcagcggttatcccgtcccgacgtagctacccggcacttgcccctggcgggacaaccggtacaccagcggtcggtccatttcggtcctctcgtactaaaaacagctcctctcaaccatccaacgcccatggcagatagggaccgaactgtctcgcgacgttctgaacccagctcacgtaccgctttaaatggcgaacagccatacccttgggacctgcttcagccccaggatgcgatgagccgacatcgaggtgccaaaccttcccgtcgatgtggactcttggggaagatcagcctgttatccccggagtaccttttatccgttaagtga

SEQ ID NO: 71446 - protein, 145 aa, Unknown
  Obtained from environmental sample
  misc_feature (1)..(145): Xaa is any amino acid
MLRPPTYQPGSLPGTFRGVKPPGMVYLEEGFPLRCLQRLSRPDVATRHLPLAGQPVHQRSVHFGPLVLKTAPLNHPTPMADRDRTVSRRSEPSSRTALNGEQPYPWDLLQPQDAMSRHRGAKPSRRCGLLGKISLLSPEYLLSVK

SEQ ID NO: 71447 - DNA, 303 bp, Unknown
  Obtained from environmental sample
  misc_feature (1)..(303): n is a, c, g, or t
ttgtcttttttaaaatttcagagtaaaaatcaatatgccgatattaacgatatgaaaaagaattatttatttttagccattttgtttttgtccgtaattatcccttttcaattacaggctcaaggggcggacgttttccgtcaggaaggaatagcttcatggtatggcagggaatttgaggggcgcccaacagcgtcaggggaaatttttgacgcttcgcaaatgaccgcggctcatccaaacctgccttttggaacaatgctgtcgttacccatcaacataataaaaagagcgttacagtaa

SEQ ID NO: 71448 - protein, 100 aa, Unknown
  Obtained from environmental sample
  misc_feature (1)..(100): Xaa is any amino acid
MSFLKFQSKNQYADINDMKKNYLFLAILFLSVIIPFQLQAQGADVFRQEGIASWYGREFEGRPTASGEIFDASQMTAAHPNLPFGTMLSLPINIIKRALQ

SEQ ID NO: 71449 - DNA, 1452 bp, Unknown
  Obtained from environmental sample
  misc_feature (1)..(1452): n is a, c, g, or t
atggcggaacaaggacaatctaactatattgatacgctccagcagactcttattgcaaggaaagattggctggaaaagactgaagtggtaaaacttaaggacgagcttaggatatatcaaatttctttcgcttctttgtacaatatttatctgaaaaagaaagtaatagacgaagatccttataaacaagatacaaaaatcaatgaaattgaggctccggataccagtgttataccggaagcaaggaaagtagagcagctttccataagactttcaaattttgacaaccagcttgactatttggtcaatttttatcagttaagcgtggattatcttaatcttgaccgtataaaacgtattgtcgggcttatccggtacatagattgggttagtttaacgccggactcccagtctccaatgactaaaatggtctcggaaataaccagtcacgcaaaaaccggcgttgatccgcttaccttaagcattatcggtgaaagtctttctaaattatccaaaacaaccgcatcttcaatgaccatacttaaagatctcaatatctactatagagaaacatataaacttaatgtccgccaaagcgttacaaaagatatgtcggcgggggaagcgactcttgagcatatcaagaaaaaaatgcataccgaaatgccgggatcgcctttttacaaggaattaatagacgaaatcatcaaagaagattattccgaaagcagtatggaccttcgcgatacagtattgaacactttaagggtagttgataacaccaaacaaaaagcgcaaaaagccgttgtgaattttaaagctatacttcttgacggaattgttgttattggcggcgcgactaaatctattaccgaaattatcgctaaactgcaggaaaatcaatcggtgctggaaagccggaagaaaacattttttgaggcggtaaaagagttaataaggcaaattacaaacgccgagccggaagaagttatctacaatgtggaatctttggatcctacaaagggtattcccgttaaagaaagggtaaattttcatcaacttatggatgagttggataaaaagaataaaattttagccagctttgtacacggtcccgcgtataataaactttccaatatgaccgaagagcaaattattggttatctggaaaaaaatgttaaagatatgcaaacctatcacagaatattaacctctctggatgacttttttaaggcgaatgtacagccggatgcccgtaataaaattaagggtattaagcctgaattatcacagttaaagaatacttttataaaagccaaccaactgaggtatgagtacagcgctcaaatggaagctgacgagcagatgaaacggctgggagccgctcctgacgcgccccctccgcctcctccgggtcccgccgttgcgccgcctacgtcgtcaaaatcttaa

SEQ ID NO: 71450 - protein, 483 aa, Unknown
  Obtained from environmental sample
  misc_feature (1)..(483): Xaa is any amino acid
MAEQGQSNYIDTLQQTLIARKDWLEKTEVVKLKDELRIYQISFASLYNIYLKKKVIDEDPYKQDTKINEIEAPDTSVIPEARKVEQLSIRLSNFDNQLDYLVNFYQLSVDYLNLDRIKRIVGLIRYIDWVSLTPDSQSPMTKMVSEITSHAKTGVDPLTLSIIGESLSKLSKTTASSMTILKDLNIYYRETYKLNVRQSVTKDMSAGEATLEHIKKKMHTEMPGSPFYKELIDEIIKEDYSESSMDLRDTVLNTLRVVDNTKQKAQKAVVNFKAILLDGIVVIGGATKSITEIIAKLQENQSVLESRKKTFFEAVKELIRQITNAEPEEVIYNVESLDPTKGIPVKERVNFHQLMDELDKKNKILASFVHGPAYNKLSNMTEEQIIGYLEKNVKDMQTYHRILTSLDDFFKANVQPDARNKIKGIKPELSQLKNTFIKANQLRYEYSAQMEADEQMKRLGAAPDAPPPPPPGPAVAPPTSSKS

SEQ ID NO: 71451 - DNA, 1026 bp, Unknown
  Obtained from environmental sample
  misc_feature (1)..(1026): n is a, c, g, or t
ttgtcaaagatttgtttatgccttacaggcaagaccatcaagcaggatgttgatttattgagtaaataccgcaaatatgccgacttagccgagctgcgggttgactgccttgacgcgggagagcgtttatacatacgccgttttccggaactggcgggtattcccgttattctgacagtcaggcgcgatgttgacggaggctattttacaggcggcgaaggcgcaagattaaaattactcgccaacggacttgcctacgcaaacgccgacagccggtttaattttgcctacgttgatatcgaagaagattttaacgtgccgagccttgaagaagcggcgcgcacattcggaacaagaattatacgttcttgccacgatttagaaggaactcttaccgacattcccgcaaaaatgaaagcaatgaaacacgcgggagacgaaataataaaaatagcggtcgccgtaaaatccacccgcgatgtgttaaatgttttcagcgcttccggttcttttaccaatcaggataaaattcttatctgcatgggacactacggagtttattcaagaattcttgcggaaaagttcggctcttttttaacttactcaagcgcgttatctgaaagcgtcattcccggcgctcccggtcagttggatgtaaaagaactttccgaattataccatttccgcaaaataacaaaaaaaacaaaagtatacggcgtcattggcaacccgttaaaatccagtgttagcccctggttttttaacactattttcaatcttgaagaagtggatgccgtatacgccccatttccggtaacagatgtcggtgattttatggaacttgcaaaagaaattgatatacaggggctttcggtcacagtccctttcaggaaacggttcttccgtatcttggagaaaagtcggcgattgtacaatcaatcgaagcgtgcaataccttataccgcaaagatgatatatgggtcggcgaacataccgattacgccggattttcatcatcgctcttaa

SEQ ID NO: 71452 - protein, 341 aa, Unknown
  Obtained from environmental sample
  DOMAIN (240)...(310): Shikimate dehydrogenase substrate binding domain
  misc_feature (1)..(341): Xaa is any amino acid
MSKICLCLTGKTIKQDVDLLSKYRKYADLAELRVDCLDAGERLYIRRFPELAGIPVILTVRRDVDGGYFTGGEGARLKLLANGLAYANADSRFNFAYVDIEEDFNVPSLEEAARTFGTRIIRSCHDLEGTLTDIPAKMKAMKHAGDEIIKIAVAVKSTRDVLNVFSASGSFTNQDKILICMGHYGVYSRILAEKFGSFLTYSSALSESVIPGAPGQLDVKELSELYHFRKITKKTKVYGVIGNPLKSSVSPWFFNTIFNLEEVDAVYAPFPVTDVGDFMELAKEIDIQGLSVTVPFRKRFFRILEKSRRLYNQSKRAIPYTAKMIYGSANIPITPDFHHRS

SEQ ID NO: 71453 - DNA, 1242 bp, Unknown
  Obtained from environmental sample
  misc_feature (1)..(1242): n is a, c, g, or t
gtgtttgattatgtcttaacaaacggagttatagtctctccgggcaagaaagtacataccggtaatttaggaattaaaggtgaaaaaatagcttctccaagcggcgctgtaaaaatcaatctgaaggaaaaatcttttatttacccttctttaattaatacccacgatcatttacagggtaattaccgcccgcccgttggtccaaaaaagggaaatttttatcttacatggcttccctgggacaacgatttaaaagcgtcaaagacatttcaggaacgttcccagcttacgagagaagacctttacgccttgtcaggctacaaatgccttttttcaggcgttacaactgtgaacgatcattttccgcacagatttaacagccaaatattaccaaccctgccaatcagggcaattcaggaatactgtattgagcatgaatgttcctcgtatgatcttaaatggggcgacggcatagagatcgagcataaaagagcgaaagaaaataactggccctttattacccaccttagcgaaggttttgacaacgaagctatgcacggtattgaaaaactggaaaaattaaacgcgcttgatgaccactgtctgtttatccactgtatcgctctcagcgacgaggatataaaaaaagccgcaaaagcgggcgtaagcgtttcgtggtgcgggttctccaatatgttcatgtttaatacgactgcaaaagtgcggaaaatgatcaaagcgggtattaacgtaacaatcgggacggattcatcggctacaggttccgctaatcttcttgcggaaattaaatatgacagggaattgtatcaaaaactttacggggaagaccttcccgcgcaaaaaatcttcgagatggttacaattaattcggcaaaagcgttcagaatgaacgataaaacaggctctctggaagaaggaaagttaggtgacattttagtcttaaaggcaaaaaataacgatccttatgaaaaccttgtttccgccggcatgaaggatatagaattgcttgtgcttgcgggcaacccgatatacggcgaactgcgtttccttgatattttcaacggtgttctgcccgaaggctacacaaaaataaaagtcggtaacagagatatgtttgtaaagggcgatcccgccgggctttacaacgaagcaagaagaaaaatcggttttaagaaggtacttgattatctgccgtttgagccggcacaggaaggagcataa

SEQ ID NO: 71454 - protein, 413 aa, Unknown
  Obtained from environmental sample
  DOMAIN (46)...(320): Amidohydrolase family
  misc_feature (1)..(413): Xaa is any amino acid
MFDYVLTNGVIVSPGKKVHTGNLGIKGEKIASPSGAVKINLKEKSFIYPSLINTHDHLQGNYRPPVGPKKGNFYLTWLPWDNDLKASKTFQERSQLTREDLYALSGYKCLFSGVTTVNDHFPHRFNSQILPTLPIRAIQEYCIEHECSSYDLKWGDGIEIEHKRAKENNWPFITHLSEGFDNEAMHGIEKLEKLNALDDHCLFIHCIALSDEDIKKAAKAGVSVSWCGFSNMFMFNTTAKVRKMIKAGINVTIGTDSSATGSANLLAEIKYDRELYQKLYGEDLPAQKIFEMVTINSAKAFRMNDKTGSLEEGKLGDILVLKAKNNDPYENLVSAGMKDIELLVLAGNPIYGELRFLDIFNGVLPEGYTKIKVGNRDMFVKGDPAGLYNEARRKIGFKKVLDYLPFEPAQEGA

SEQ ID NO: 71455 - DNA, 996 bp, Unknown
  Obtained from environmental sample
  misc_feature (1)..(996): n is a, c, g, or t
atgccaaaaccagcgcaattccgttcaggttctcttatatactttaaaggcgatcccgcggataaaatttatattctgcaatccggaaaggtaagtctggtttatcaggacattgaaacaggagctgacgtaaaagactcggtgcagcccggcgaattcttcggagtaaaatcggcgttaggacgttatacgcgcgaagaaaacgccatggctctttcagataccagcgtaatgatatttacagttcccgaatttgaagccgtcgctatggctaattccagaataataatgaaaatgttaaaagttttttccaaccaaatgaggcgcgttcataaacaagtatccaaagttatggcaaaggaagaacagtcgcccgcggacggtctttttaacattggcgaattttatttaaagaacaaacgcttttctcacgcgaaacatattttcagccgttatctgacattttatccttctggaaaaaacgctattcaggcggcaaaaaatcttgagatagcggaaaacgcccttacccgttacggcgacggcaagggacccggcgtttccgtaagctccgccgttcctgtgggaacagccgcgcccacatcgcagaaagatttggataaagcaaacaagtcgtattatgacgctatcggacttgtttcgcaggggaaatatcaagaagcgtttatgacttttaaagtaattgtagacagtaaagtcgatcaggaatggacggcaaaagcgtcttttgaaatcggacgatgtttattccttatgaacaaatacgaagacagcattaaattttatacaaatatgctgactcagttcccgaaacatcccgaattaatcgaaactatgtttatcatgggtcagtgcaacgaaaaggtcggcagaaaagatcaggcggtggcgttctacaaaaaaataatttcaatgggcggagacgagtccactatcgaaaaagtaaagcgggcgttaagcgccttaggagcgtaa

SEQ ID NO: 71456 - protein, 331 aa, Unknown
  Obtained from environmental sample
  DOMAIN (246)...(279): Tetratricopeptide repeat
  misc_feature (1)..(331): Xaa is any amino acid
MPKPAQFRSGSLIYFKGDPADKIYILQSGKVSLVYQDIETGADVKDSVQPGEFFGVKSALGRYTREENAMALSDTSVMIFTVPEFEAVAMANSRIIMKMLKVFSNQMRRVHKQVSKVMAKEEQSPADGLFNIGEFYLKNKRFSHAKHIFSRYLTFYPSGKNAIQAAKNLEIAENALTRYGDGKGPGVSVSSAVPVGTAAPTSQKDLDKANKSYYDAIGLVSQGKYQEAFMTFKVIVDSKVDQEWTAKASFEIGRCLFLMNKYEDSIKFYTNMLTQFPKHPELIETMFIMGQCNEKVGRKDQAVAFYKKIISMGGDESTIEKVKRALSALGA

SEQ ID NO: 71457 - DNA, 648 bp, Unknown
  Obtained from environmental sample
  misc_feature (1)..(648): n is a, c, g, or t
atggctatggatttggccgcatttcagcgtttttcccgtacatttaaacaaggagaaattatattctccgagtttgagcttggcgatacattttatcttatccagtccggcagggtgcagcttgtaaaacttgtcggagacatcgaaagaactttggatattcttcaaccttccgaaatgttcggcgaaatggcaattttggaaaactctccccgctcggcgacagccatcgcccttgatgaattaaaagttttggaatttaactctcagaattttgaaatcctgctccttggaaatccgcagattgcattaaaacttttaaaaatgttctgcaaacgtatatacgattccaaacgccgctttatgattcttactttgccggagccgcaggcaaaaatcgcggacgtattccttatgcttgatgaaactcagcctgacattgacaagacgagcgagcggcgcgaatttaaaaccactgtggaaggagtagcgcactgggcgggaatgagcgtaaacgaagtacgggatattctcggtcattttgttaaccagcgtcgcgtggagattttcccggatcgcattaccgttaaaaacatcaatgacttctcgcgctttgtcagctccagacgcaacgcaagagccatttaa

SEQ ID NO: 71458 - protein, 215 aa, Unknown; identical to SEQ ID NO: 56120
  Obtained from environmental sample
  DOMAIN (12)...(101): Cyclic nucleotide-binding domain
  misc_feature (1)..(215): Xaa is any amino acid

SEQ ID NO: 71459 - DNA, 546 bp, Unknown
  Obtained from environmental sample
  misc_feature (1)..(546): n is a, c, g, or t
atggaaaataaaaaactccttgttttatcagattctcatggcaatattaacgcgctaagagcggtctttaaatgggcaaaagaccacatacccccgaatgacacaattcacgcggcggcatttcttggagacgggctctcggacttgcagtacacggcggacgcggaaggtttttacacggattggaaacttgtaatcggaaacaacgattacggaatacgaatgccggaagctttaacttttgaatttgcggaacgtctattttttatgtgccacggacatcgttatggtttatacggcggatataacatgctaataaatgcggcaataagttcaggagcggatgtcgcgctatgcggtcacagccacattccatacgataaagtaatgagcggcgttagaattattaacccgggaagcgtaggacgaccgcgaagcagggtaggcgcgacattcgctgttattgaatgttcgcctgataatccgttaattgtaaatttttatgggatagggtcacagggaaaaattaaggaaatgaaattatag

SEQ ID NO: 71460 - protein, 181 aa, Unknown
  Obtained from environmental sample
  DOMAIN (4)...(125): Calcineurin-like phosphoesterase
  misc_feature (1)..(181): Xaa is any amino acid
MENKKLLVLSDSHGNINALRAVFKWAKDHIPPNDTIHAAAFLGDGLSDLQYTADAEGFYTDWKLVIGNNDYGIRMPEALTFEFAERLFFMCHGHRYGLYGGYNMLINAAISSGADVALCGHSHIPYDKVMSGVRIINPGSVGRPRSRVGATFAVIECSPDNPLIVNFYGIGSQGKIKEMKL

SEQ ID NO: 71461 - DNA, 546 bp, Unknown
  Obtained from environmental sample
  misc_feature (1)..(546): n is a, c, g, or t
ttggcaaataaacctacacccggcttatgctttacagcagtatataaaactatctcgcgtacacttcgttcaaaagtgcgtgtacaatctccaataacaaataatgatgttgaagcaaatgcaatatgggatacaggcgcatcacgatcccttatcaccccggaaatagccgcaaaattagatttaaaacctgtttcaaaaactttgatggctacaccttctgataaaaatattcaaagtaatgtttatttactaaacgtccatcttccgaatagagctaaaattgttggtgtacaagcccttgaaggaactccaaatagctgcgatatgcttatcggtatggacgttatttctttgggtgattttgctgtaacaaattttaacggaaaaaccatgttttcatttcgtacgccgtcaatggctgaaattgattttacaaaacattcacatattgaaccaataagaaatgaaagtcacaagacaggaagaaatgatccttgcccatgcggaagcggtaaaaaatacaaacattgtcatggaaaataa

SEQ ID NO: 71462 - protein, 181 aa, Unknown
  Obtained from environmental sample
  DOMAIN (163)...(181): SEC-C motif
  misc_feature (1)..(181): Xaa is any amino acid
MANKPTPGLCFTAVYKTISRTLRSKVRVQSPITNNDVEANAIWDTGASRSLITPEIAAKLDLKPVSKTLMATPSDKNIQSNVYLLNVHLPNRAKIVGVQALEGTPNSCDMLIGMDVISLGDFAVTNFNGKTMFSFRTPSMAEIDFTKHSHIEPIRNESHKTGRNDPCPCGSGKKYKHCHGK

SEQ ID NO: 71463 - DNA, 402 bp, Unknown
  Obtained from environmental sample
  misc_feature (1)..(402): n is a, c, g, or t
atgagcgacattaagctagttcatgagtggttgaaatattctcagaatgacctaatatcagcaaaacatttatacgaagatttacacccaaagcagacagaaattgcatgttatctaagtcaacaatgtgcagaaaaagcgctaaaaggatacttactttacaaagataatgaaccgcccaaaacacataatttagttgaattatgtcaaatatgtataaattacgataattcgttcccagatatattggatgcttgtgccgatttaactccttatggcgttgcggtccgttatcctaatgaattggcaattgatgatgtgattgcaaaattggctataggcaaagcgcagagtatatatgatttttgtgttggaaagattcctaaaattattattaattaa

SEQ ID NO: 71464 - protein, 133 aa, Unknown
  Obtained from environmental sample
  DOMAIN (7)...(126): HEPN domain
  misc_feature (1)..(133): Xaa is any amino acid
MSDIKLVHEWLKYSQNDLISAKHLYEDLHPKQTEIACYLSQQCAEKALKGYLLYKDNEPPKTHNLVELCQICINYDNSFPDILDACADLTPYGVAVRYPNELAIDDVIAKLAIGKAQSIYDFCVGKIPKIIIN

SEQ ID NO: 71465 - DNA, 327 bp, Unknown
  Obtained from environmental sample
  misc_feature (1)..(327): n is a, c, g, or t
atgataaacgatgatattatcgcaattaaggataacattctcaatactgttggagaaacctgtgaaaaaattatattatttggttctcgtgcctatggaacccctcgcgaagacagtgattatgactttttcgtagtattaaaagatgatactgaaaaacctattttagtcctccaaaaaatttatcgcagtttggctaaaagaccaatgacgccatctattgatgtacttgcaaactataaatcacgctttgagtggcgcagtacacagccaaccatagagcgcagaatagccactgatggagtaatcttatatgagcgacattaa

SEQ ID NO: 71466 - protein, 108 aa, Unknown
  Obtained from environmental sample
  DOMAIN (6)...(104): Nucleotidyltransferase domain
  misc_feature (1)..(108): Xaa is any amino acid
MINDDIIAIKDNILNTVGETCEKIILFGSRAYGTPREDSDYDFFVVLKDDTEKPILVLQKIYRSLAKRPMTPSIDVLANYKSRFEWRSTQPTIERRIATDGVILYERH

SEQ ID NO: 71467 - DNA, 1344 bp, Unknown
  Obtained from environmental sample
  misc_feature (1)..(1344): n is a, c, g, or t
atgaatttccgtctacttgtaattgatgacgaaaaaaatatccgcaacggacttgccgaatctttgcaagaagacggatacgaagttgtgtgcgccgaaaacggcgacgaaggctggaatcgtttttgcagcggcgacatcgatcttgtaataacagaccttaaaatgcccggtttaagcggcgatgaactgttaagaaaaatactcgcccaagctcccggttttcctgtcatcgttttgacgggacacggaacggtagagaacgccgttaccgccatgagggaaggagcgtgggattttcttacaaagcccgtagacttggatcatctttcattaaaagtaaaacgagcgcttgacaaccgtgagctgtttttccagcaccgcagaatggaagaagaaatcgagcgcaaaaaacaatttaactcgataatcggcaactcacgcaatatgcgggatgtttttgacacgatcagcaaagccgctcccaccaaagcgtcaattttaataacgggcgaatcgggcgtaggaaaagaactggttgccgacgccatacacgatctttcccccagaaaagatcagccgcttgttaaagtgcattgcgccgccctcgctccctcgttacttgaaagcgaacttttcgggcatgaaaagggagcgtttacaggcgctgtttcgcagcgtaagggcaggtttgaacttgcatcgggcggaactttgtttttagacgaaatcggcgagattgatcaaaacattcaaattaaattactgcgtgttctgcaagacaagaaatttgaaagggtaggcggcgagcaggttgtagaaaccgacgtgcgtattgtagcagccaccaataaagacttaaaagccgaaatagaaaagggaaatttccgcgaggacttatactttcgcctaaacgtggtaaacatcaacgttccgccgttacgcgaaagaaaagacgatattcccctgatgacggcaagtttcttgaaggagatcgccgctgaaaacaacaaaaccatcgaaggcatccacgaaaaagcctatgcccggctttacgcctacgactggcccggcaatatccgcgagcttcgcaactgcattgaaagcgccgtggtcatgtgccgcaaaccgatcatcgccgttgacgatctgccccccgccctgcaatcttactctgacgatgaaggctgggtaaaggttcctctggattgcagtcttgaggaagatgaaaaaatcattatcaaagcggcgattggctatcacaagaacaaaactaaagccgccgaagtcctgggcatcgggcggaagacgctgcacaggaaaattctggaggatgagcaatga

SEQ ID NO: 71468 - protein, 447 aa, Unknown
  Obtained from environmental sample
  DOMAIN (166)...(314): ATPase family associated with various cellular activities (AAA)
  misc_feature (1)..(447): Xaa is any amino acid
MNFRLLVIDDEKNIRNGLAESLQEDGYEVVCAENGDEGWNRFCSGDIDLVITDLKMPGLSGDELLRKILAQAPGFPVIVLTGHGTVENAVTAMREGAWDFLTKPVDLDHLSLKVKRALDNRELFFQHRRMEEEIERKKQFNSIIGNSRNMRDVFDTISKAAPTKASILITGESGVGKELVADAIHDLSPRKDQPLVKVHCAALAPSLLESELFGHEKGAFTGAVSQRKGRFELASGGTLFLDEIGEIDQNIQIKLLRVLQDKKFERVGGEQVVETDVRIVAATNKDLKAEIEKGNFREDLYFRLNVVNINVPPLRERKDDIPLMTASFLKEIAAENNKTIEGIHEKAYARLYAYDWPGNIRELRNCIESAVVMCRKPIIAVDDLPPALQSYSDDEGWVKVPLDCSLEEDEKIIIKAAIGYHKNKTKAAEVLGIGRKTLHRKILEDEQ

SEQ ID NO: 71469 - DNA, 1164 bp, Unknown
  Obtained from environmental sample
  misc_feature (1)..(1164): n is a, c, g, or t
atggttgattttttcaggcgggcaataaaaaaaattaacaagctcaacgccgaacagcgcaaggagcttttagtttccgccgtagaagaaatcaacctgcttggcaatgtccttgactcgattgatatgggtattcttgtctgcgacaacaaagataatcttgtattggcgaacaagagcgcccttagaatgataccgatggattacatcgagggaataaaactggaagaggcgattttagatgatcaatttatgggtacttttaaggagataatcgccaaccgtgaaaaaataattgataaagagatagaaatagagcaacaggaacaaagaaaaatatactctattaacgtagtcccacttgtgcataacaaaaaaattgcaggtacgcttatttatatagaagatattacggaaaaacgaaagggagaagcccgtttaagaagagcggaaaatcttgccagccttacaactttagccgccggcgtcgctcatgaaattaaaaatccgctcggttcgatatcaatacatcttcagcttttacaaaaagcgttggcgaaaaaaagcgaagcatccgaaaagaaaaccgaaaaatattttacggttataaaagaagaaattgacaggcttaaccgcattgtcgtcgattttctttttgctgtgcgcccgatgaatcttgaattgcgtgaaggcgacataaatgaattaatcacgcagataatggagtttgtgaagtttgagatgaagcagtcaaatattgtttgtatgcttgaacttgacgataaacttccgaaaatattgatggacgagcggtatatgaaacaggctctgcttaatctgataaaaaacgctcaagcggcaatgcccaaaggcggagtttttaccgttgccaccaatttcgccgataatgaaatcaggatatcgctttgcgacacggggataggcataagcaaggaaaatcttgcgaaaattttcgagccgtattttacaacgagggaaacgggaacgggtcttggacttacgcaagtttataaaattatcagggaacataaaggcgaaataactgtcgattcgtcgccggggacaggagccgagtttagaataagtttgcccgtacctcaaagagatacgaggcttattgcatataacggaggaaaaacatga

SEQ ID NO: 71470 - protein, 387 aa, Unknown
  Obtained from environmental sample
  DOMAIN (155)...(226): His Kinase A (phosphoacceptor) domain
  misc_feature (1)..(387): Xaa is any amino acid
MVDFFRRAIKKINKLNAEQRKELLVSAVEEINLLGNVLDSIDMGILVCDNKDNLVLANKSALRMIPMDYIEGIKLEEAILDDQFMGTFKEIIANREKIIDKEIEIEQQEQRKIYSINVVPLVHNKKIAGTLIYIEDITEKRKGEARLRRAENLASLTTLAAGVAHEIKNPLGSISIHLQLLQKALAKKSEASEKKTEKYFTVIKEEIDRLNRIVVDFLFAVRPMNLELREGDINELITQIMEFVKFEMKQSNIVCMLELDDKLPKILMDERYMKQALLNLIKNAQAAMPKGGVFTVATNFADNEIRISLCDTGIGISKENLAKIFEPYFTTRETGTGLGLTQVYKIIREHKGEITVDSSPGTGAEFRISLPVPQRDTRLIAYNGGKT

SEQ ID NO: 71471 - DNA, 1323 bp, Unknown
  Obtained from environmental sample
  misc_feature (1)..(1323): n is a, c, g, or t
gtgtttgagaatataatcgaacaaagcgccgttctccagttacgcgacgatattctcgcgaaacgaaacgccccaagtatgctgtttttcggtccgtcgggaagcggaaaaggcagcgcggcgctggaattggctcgtgttctttcctgtgaggaaaaagcggcgtggggctgcaaatgttcttcgtgtgaaaaacacaagtttttacagcatgacgatctattggttttgggaacacgttctttttctcctgaaatacttgcctgtcaacacgcttttttacgaaatccgtcaaaggcgaagattttattctttaggtctctgcgaaaactgcaaattcgcttttctcctgtattattggaaaatgatacaaagacagctaaagcggtatcgtcaaatttgcagtctcttgacgaagggcttaatgaattattgtcgcttaacaccgaaacagccgaagaagccgctcttaaaaaactctgcgcttccattgtaaaagacgcccttgcccttgaaagcgaaggaattaacggcattcccataggtcacataagaagcgcgtcttactggtgcagacttgcgcctaacggaaagcgtaaaacgctgataatagaaaacgccgaggacatgagggacgacgcccgcaattcgctcttaaaattactcgaagagcctcccccttccgtcagcattgttcttacggcgcaaaggcgcgaggcgataatgcagacaattttatcccgtctgcgtccgtaccgtttcttaaaaaggagcgaggaaagcgagaaggaagttataaagagcgtgtttaaggaaaattctgaattaacttaccccaatcaaaaaggttcgatactttcttcttaccttgattccttccttccgcagagtacggaaaaattgtatccgcttgcggcgtggtttatagtttcctttgcgagaaccgcttccatttacgcgaaaaacaaaggaaagccccccgctttcttgatagcgttaggcgaacaatacgcccctgttgcggaaacggcgggattggagcgttataccaaaaacgccgccattgtaaaaacaatactgtcccaaagtaaaaactttgaagaagtttcgttctcacgttttatgaatatcactcttgaattaatcggcgattgtctgcgttccgtaaacgaccctatgtttattgcgtataacgatatgattaaaaaatatattaacgaggcggtaacttcggttgacgtgctgaatataaacgccgctattacgctggaaaatcttttgtacaaattaaaaacttcagcggtaagagggcgtcatggttga

SEQ ID NO: 71472 - protein, 440 aa, Unknown
  Obtained from environmental sample
  misc_feature (1)..(440): Xaa is any amino acid
MFENIIEQSAVLQLRDDILAKRNAPSMLFFGPSGSGKGSAALELARVLSCEEKAAWGCKCSSCEKHKFLQHDDLLVLGTRSFSPEILACQHAFLRNPSKAKILFFRSLRKLQIRFSPVLLENDTKTAKAVSSNLQSLDEGLNELLSLNTETAEEAALKKLCASIVKDALALESEGINGIPIGHIRSASYWCRLAPNGKRKTLIIENAEDMRDDARNSLLKLLEEPPPSVSIVLTAQRREAIMQTILSRLRPYRFLKRSEESEKEVIKSVFKENSELTYPNQKGSILSSYLDSFLPQSTEKLYPLAAWFIVSFARTASIYAKNKGKPPAFLIALGEQYAPVAETAGLERYTKNAAIVKTILSQSKNFEEVSFSRFMNITLELIGDCLRSVNDPMFIAYNDMIKKYINEAVTSVDVLNINAAITLENLLYKLKTSAVRGRHG

SEQ ID NO: 71473 - DNA, 483 bp, Unknown
  Obtained from environmental sample
  misc_feature (1)..(483): n is a, c, g, or t
ttgagcttttccattattgatattgtttttgtgggactaataggactttttatgatccgctgttatctgaaaggttttgttagcgaacttttatccatggcggctgtggtgcttggacttcttgccgcgttatttttacatagaaacggcggtgagttcttaaaaaatcaattctggcatgatacaaatattgtaattttgaaagtcgcggcgtttgtcatcttatttatttttgtttttgtagttgttaaaatagtagaaagaatgttaattaatattattgatgaagtaagccttacaaacgccgacagttatctcgggataattttcggcttggcggaaggcttggcggtggtaagtttgatacttttcttgctaagaatacagccgctttttgattccaccgcaatgttaaacgacagtattttcgcgcggtatttactgcccttgattacaggaaaggagaaagttttaggtgtttga

SEQ ID NO: 71474 - protein, 160 aa, Unknown
  Obtained from environmental sample
  DOMAIN (5)...(160): Colicin V production protein
  misc_feature (1)..(160): Xaa is any amino acid
MSFSIIDIVFVGLIGLFMIRCYLKGFVSELLSMAAVVLGLLAALFLHRNGGEFLKNQFWHDTNIVILKVAAFVILFIFVFVVVKIVERMLINIIDEVSLTNADSYLGIIFGLAEGLAVVSLILFLLRIQPLFDSTAMLNDSIFARYLLPLITGKEKVLGV

SEQ ID NO: 71475 - DNA, 1119 bp, Unknown
  Obtained from environmental sample
  misc_feature (1)..(1119): n is a, c, g, or t
atggtaagtattgcttttaccggcggggggacaggagggcatatttatcccggactggcggttgcggcggagttaaaaaaactgctttccgaccgtgagtttgagttgttttggattggttcctccgctaatctggatcgttcccttgtggaagaagccggaattaaatttttcagtatcccttcaggtaaattaagacgttatttttcgcttcggacatttgctgacttcttcaaagttatcgcgggttttttcgccgcgcgtaaaatccttaaaaaacaaaaaactctttttctgttttccaaaggcggttttgtaagcgtaccgccctgcatggcggcggcgtctttgggcataaaagtttttacgcatgaatcggactttagcccagggcttgcgacaaaaattaacgcacgttacgccgctcgaacaaagggaaggatttttatcgcttacgaggaaacagagcgttttttccgcaaagcgtttcgtaatcacataacggttagcggaaatcccgtgaggagcgtttttcatgaagctgacgcggcaaagggaagggcttttttaggagttgaggaagacgcgcggattcttcttgtactcggcggcagtcagggagctgttgaaataaacgaacttattcgcgccattctgccggaactgacaaatatttacaccgttgttcatcaaacgggtcccaatcttacatgggatattcccgcaagcaaaagatacaaaccttttccgtatatcaaagatgaaatgccccatgtaatggcggcggcggagcttgtgatgggcagaagcggagcggggatttgggaatgggcggttttaggaaagcctatgctgttgataccgttaaggggagcgggaacaagaggcgatcaggtggagaacgccaattatttcaggcgggcgggagccgcgcaggagttaggtgaaaacacaaccccgtgggcgttgataagcgcggttaattcaatcgcgcaggacgagaaaaaaagaaaaagtatgtccgccgcttccgcgagaataggggagagggacggcactgtaattatcgcgcgcgagcttgcggaagaattttcgcggcatttcggaggaaacagttga

SEQ ID NO: 71476 - protein, 372 aa, Unknown
  Obtained from environmental sample
  SIGNAL (1)...(22)
  DOMAIN (198)...(356): Glycosyltransferase family 28 C-terminal domain
  misc_feature (1)..(372): Xaa is any amino acid
MVSIAFTGGGTGGHIYPGLAVAAELKKLLSDREFELFWIGSSANLDRSLVEEAGIKFFSIPSGKLRRYFSLRTFADFFKVIAGFFAARKILKKQKTLFLFSKGGFVSVPPCMAAASLGIKVFTHESDFSPGLATKINARYAARTKGRIFIAYEETERFFRKAFRNHITVSGNPVRSVFHEADAAKGRAFLGVEEDARILLVLGGSQGAVEINELIRAILPELTNIYTVVHQTGPNLTWDIPASKRYKPFPYIKDEMPHVMAAAELVMGRSGAGIWEWAVLGKPMLLIPLRGAGTRGDQVENANYFRRAGAAQELGENTTPWALISAVNSIAQDEKKRKSMSAASARIGERDGTVIIARELAEEFSRHFGGNS

SEQ ID NO: 71477 - DNA, 759 bp, Unknown
  Obtained from environmental sample
  misc_feature (1)..(759): n is a, c, g, or t
atgattaatattctcaatacgctattttctagccaattccgctacgcttgtaacaagccccgccaaattctgtatctccgagggaataataatctttgtcgcctgcccgtccgctactttttgaagcgcttccaaacttttcagcttaatcagaggatcatcggcgtttacactctttatcatgttaagaccgtcggcggtcgccttctgcacgttaaggatagcctgcgcctctccttcggcttcgcggatttgcgcttctttcgcggcttccgcctgcaagataacggcggctttttccgcctcggctttcaatatcgccgacgctttctgtccttcagcgacaagaatagcggactgtttttcgccttcggctttcaaaatagattcgcgtctttcgcgctcggctctcatctgcttttccatcgcttcctgaatgctcttgggcggagcgatgttttttacttcgacgcggtttaccttgatgccccaagggtctgtggcttcgtcaagcacagtgcgcatcctggtatttatcatgtcgcggcttgtaagagtctcgtcaagttccagttctccgatgatgttacgcaatgtggtgctggtaagattttcaatggcgctcattggatttataacgccgtatgtgtacaatttggggtctgttatctgcatataaattacagtatcgatcatcatcgtaacattgtcttttgtaattacaggctgaggagcgaagtcggcaacctgctcttttag

SEQ ID NO: 71478 - protein, 252 aa, Unknown
  Obtained from environmental sample
  misc_feature (1)..(252): Xaa is any amino acid
MINILNTLFSSQFRYACNKPRQILYLRGNNNLCRLPVRYFLKRFQTFQLNQRIIGVYTLYHVKTVGGRLLHVKDSLRLSFGFADLRFFRGFRLQDNGGFFRLGFQYRRRFLSFSDKNSGLFFAFGFQNRFASFALGSHLLFHRFLNALGRSDVFYFDAVYLDAPRVCGFVKHSAHPGIYHVAACKSLVKFQFSDDVTQCGAGKIFNGAHWIYNAVCVQFGVCYLHINYSIDHHRNIVFCNYRLRSEVGNLLF

SEQ ID NO: 71479 - DNA, 915 bp, Unknown
  Obtained from environmental sample
  misc_feature (1)..(915): n is a, c, g, or t
atgtggtcaattatcgttatatcggcgtttgttttaattttgattatttccaatgtcaggattgtttctcaatctaacgcatttgtaattgagcgtctcggcgcttacagttcgacatggagcacgggcattcatgtaaaaatgccgtttatcgatcgtattgcaagcagcgtttcgctaaaagagcaggttgccgacttcgctcctcagcctgtaattacaaaagacaatgttacgatgatgatcgatactgtaatttatatgcagataacagaccccaaattgtacacatacggcgttataaatccaatgagcgccattgaaaatcttaccagcaccacattgcgtaacatcatcggagaactggaacttgacgagactcttacaagccgcgacatgataaataccaggatgcgcactgtgcttgacgaagccacagacccttggggcatcaaggtaaaccgcgtcgaagtaaaaaacatcgctccgcccaagagcattcaggaagcgatggaaaagcagatgagagccgagcgcgaaagacgcgaatctattttgaaagccgaaggcgaaaaacagtccgctattcttgtcgctgaaggacagaaagcgtcggcgatattgaaagccgaggcggaaaaagccgccgttatcttgcaggcggaagccgcgaaagaagcgcaaatccgcgaagccgaaggagaggcgcaggctatccttaacgtgcagaaggcgaccgccgacggtcttaacatgataaagagtgtaaacgccgatgatcctctgattaagctgaaaagtttggaagcgcttcaaaaagtagcggacgggcaggcgacaaagattattattccctcggagatacagaatttggcggggcttgttacaagcgtagcggaattggctagaaaatag

SEQ ID NO: 71480 - protein, 304 aa, Unknown
  Obtained from environmental sample
  SIGNAL (1)...(23)
  DOMAIN (18)...(192): SPFH domain / Band 7 family
  misc_feature (1)..(304): Xaa is any amino acid
MWSIIVISAFVLILIISNVRIVSQSNAFVIERLGAYSSTWSTGIHVKMPFIDRIASSVSLKEQVADFAPQPVITKDNVTMMIDTVIYMQITDPKLYTYGVINPMSAIENLTSTTLRNIIGELELDETLTSRDMINTRMRTVLDEATDPWGIKVNRVEVKNIAPPKSIQEAMEKQMRAERERRESILKAEGEKQSAILVAEGQKASAILKAEAEKAAVILQAEAAKEAQIREAEGEAQAILNVQKATADGLNMIKSVNADDPLIKLKSLEALQKVADGQATKIIIPSEIQNLAGLVTSVAELARK

SEQ ID NO: 71481 - DNA, 471 bp, Unknown
  Obtained from environmental sample
  misc_feature (1)..(471): n is a, c, g, or t
atggagatgctggagataaaaacaattctcaccttgcaaattgtcggctttaccgtccctattacagaaacagtgatcatctcatgggttgtcatgctgatcatcattgttgcgtccctgcttcttgtccgcaggctaaaggaagtgccttcaggcccgcaggcaatcctggaaacgggggtagagttcctcaataattttacaaacaatcagcttggctcattttcaaaattccttgggccttacattggctcgctgtttctcttcctgcttgtggcaaacatcatttcgattctttctcctctgccgctaaaagcctttgggcatgtatttacccctccttttgaaatacacccccccaccaagggacatcaatgtaacggcggcgctggcggtcatttccattacgctggttattgtctgcggtttgtcggcgcgcggagtaaaggggtggtttgtaaaactttttaa

SEQ ID NO: 71482 - protein, 156 aa, Unknown
  Obtained from environmental sample
  misc_feature (1)..(156): Xaa is any amino acid
MEMLEIKTILTLQIVGFTVPITETVIISWVVMLIIIVASLLLVRRLKEVPSGPQAILETGVEFLNNFTNNQLGSFSKFLGPYIGSLFLFLLVANIISILSPLPLKAFGHVFTPPFEIHPPTKGHQCNGGAGGHFHYAGYCLRFVGARSKGVVCKTF

SEQ ID NO: 71483 - DNA, 408 bp, Unknown
  Obtained from environmental sample
  misc_feature (1)..(408): n is a, c, g, or t
ttgggcatgtatttacccctccttttgaaatacacccccccaccaagggacatcaatgtaacggcggcgctggcggtcatttccattacgctggttattgtctgcggtttgtcggcgcgcggagtaaaggggtggtttgtaaaactttttaaacctgttccgcttatgctgccttttaatattatggagtacggaacgcggcttatttctcttgccntgcggttgttcggaaatatgttaggcggttatgtgctgatgagcatgatagagggattgtttcccgtcgcgcttcccgttgttttatcgctctatttcgatttttttgacggattggttcaagcggcaatttttgtatttttaaccagtctctatatcagcgaggcggttaaacttaatgaagaaatatag

SEQ ID NO: 71484 - protein, 135 aa, Unknown
  Obtained from environmental sample
  DOMAIN (1)...(127): ATP synthase A chain
  misc_feature (1)..(135): Xaa is any amino acid
MGMYLPLLLKYTPPPRDINVTAALAVISITLVIVCGLSARGVKGWFVKLFKPVPLMLPFNIMEYGTRLISLAXRLFGNMLGGYVLMSMIEGLFPVALPVVLSLYFDFFDGLVQAAIFVFLTSLYISEAVKLNEEI

SEQ ID NO: 71485 - DNA, 495 bp, Unknown
  Obtained from environmental sample
  misc_feature (1)..(495): n is a, c, g, or t
atgcttgatttttccgtcacatttataattaccattatcaatatcacgattttgttttttatcttaaaaaagatattgtttaaaccggtaacaaaattcatggcggagcgggcaaaacgcattcaggatacaatcaagcaggcgcaaaaagacaaagacgaggcaatgaaactgcttgacgaatacgaagcaaaactgaaaaaagcagaagcggaggcgcgggaaattttaaaaacagcgagcgaaaacgccgagcgtcaggcgcagttgataatttccgaaggaagacgggaagcccaggaaaccgttaattccgcgcttaagcagattgaaatggaacgtcaggcggcgcttgcgaagtttaaacttgaagccgccgctttggtaatcgccgtttccgcaaaacttgcgtcaaaggatttttcaggcgaagacagcagacgttatgtgaatatgctgttggacgagctttcggcgcaaaaaggaagcgattaa

SEQ ID NO: 71486 - protein, 164 aa, Unknown
  Obtained from environmental sample
  DOMAIN (7)...(138): ATP synthase B/B' CF(0)
  misc_feature (1)..(164): Xaa is any amino acid
MLDFSVTFIITIINITILFFILKKILFKPVTKFMAERAKRIQDTIKQAQKDKDEAMKLLDEYEAKLKKAEAEAREILKTASENAERQAQLIISEGRREAQETVNSALKQIEMERQAALAKFKLEAAALVIAVSAKLASKDFSGEDSRRYVNMLLDELSAQKGSD

SEQ ID NO: 71487 - DNA, 552 bp, Unknown
  Obtained from environmental sample
  misc_feature (1)..(552): n is a, c, g, or t
atgtttcacgcgcagcggtgggcaagcgcgtttttatccgtttcgggtaaagacgcaaacgaggcgtttttatgccttaaagcgttttccgcgcaaattaaaaacgtacacggcgtttttttcggacataatgtttccgtaaaacttgaagaaatactaagagaaaccgccgcttctgttatagaaaaaaatcccgccgtagagttcgttatacgctttttgtgcctgctggttgaaaaaaactgttttaggcacattgaattggttttacaaaaaatcgaacaaaaccttgacgaacaaaacgggatacttgacgttactatcgaatccgcggctcctgtggacagcggctttgaaaaagaactttctaaaatgataaaagagagaacaggcgcggcggacatcaaaatgaaaacgcgcattaaaccggaattgctgggcggttaccttctgcgaatcggcagtcattatgttgacgcaagtttaaaggggcagttggaaaacatagcggcgcatttaggcgagaatataggaggtccccgcaatggctaa

SEQ ID NO: 71488 - protein, 183 aa, Unknown
  Obtained from environmental sample
  DOMAIN (4)...(173): ATP synthase delta (OSCP) subunit
  misc_feature (1)..(183): Xaa is any amino acid
MFHAQRWASAFLSVSGKDANEAFLCLKAFSAQIKNVHGVFFGHNVSVKLEEILRETAASVIEKNPAVEFVIRFLCLLVEKNCFRHIELVLQKIEQNLDEQNGILDVTIESAAPVDSGFEKELSKMIKERTGAADIKMKTRIKPELLGGYLLRIGSHYVDASLKGQLENIAAHLGENIGGPRNG

SEQ ID NO: 71489 - DNA, 1503 bp, Unknown
  Obtained from environmental sample
  misc_feature (1)..(1503): n is a, c, g, or t
atggctaattatgacgacctaactaaagttttaaaagagcggattgaaaattggaagggacaagcttcatcaggcagcggcggctttgttgttcaggttggcgattctgtcgccaccgtctacggtcttaacgacgcggtttacggggagatggttgaatttgcctcaggcgcgcatggaatagtttttaatcttgaggaagaaaacgcggggtgcgtaattttaacgggcgaagaccttgttaaagacggcgaggaagtaaaaagaacaggcaaggttgtgtctattccttccggtaaagcgtttttcggcagggtggtaaatccgttaggcgaagctcttgacggcaaaggaccggtaacagccgaggcgtttatgccgatggaagctcccgccgcgcctgtaatcgaccgcggaagcgttgatactccgcttcaaacgggatgtatttccattgacgcgatgattccaatcgggcgcggtcaacgagaactgataatcggcgaccgccaaacgggaaaaacagccatcgccattgatacgataattaatcaaaaaggaaaaaatgttatttgtatatactgtggtatcgggcagaaagcgtcttcgatagtagcaattatgaattatcttgagaaacacggcgcgatggactacacatttgtagtgcttgcgtccgcttccgattcggcggctcttcaatatatcgcgccctattcggcggtcgcaatggcggaacattttttacatcagggaaaagatgtgcttgtggtttacgacgatctttcaaagcatgccgtcgcttaccgcgcgatcagtttgcttttgcgccgccctccgggacgcgaggcttttcccggcgatgtgttttatcttcattcgcggcttttggaacgggcggcaaaactttcaccgtcaaagggcggcggttcaattaccgcgatgcccattgttgagactcaagcaggcgacatttcgtcctacattcccaccaacgtaatttcgataacggacggacagattttccttgattccgaattgtttaattccggtttccgtccggcgatagacgttggtctttcggtaagccgcgtcggaggttccgcgcagacaaaggcgatgcggaaaatttcagggcgtatcaggttagaccttgcgcagtaccgcgagatggcggcgtttgcgcagtttggcagtgatttggatagggctactcaggacaaattggcgcagggcgaaagacttatggaagtgcttaaacagccgcagtattcgccgtatcatattgaggaacagatagtaattcttttccttgcggtggaaggttttcttcttgatataaaaacggaaaatgtttccgcgtttgtaaaagattttttattgcaccttaaaagcgcgaaggcggatttactcaagaacattgcggagacgggagttgtttccaaagaacaggaagacgaattgcacttaaccgtaaaatctttcaaagaggcaagaaaataa

SEQ ID NO: 71490 - protein, 500 aa, Unknown
  Obtained from environmental sample
  DOMAIN (23)...(91): ATP synthase alpha/beta family, beta-barrel domain
  misc_feature (1)..(500): Xaa is any amino acid
MANYDDLTKVLKERIENWKGQASSGSGGFVVQVGDSVATVYGLNDAVYGEMVEFASGAHGIVFNLEEENAGCVILTGEDLVKDGEEVKRTGKVVSIPSGKAFFGRVVNPLGEALDGKGPVTAEAFMPMEAPAAPVIDRGSVDTPLQTGCISIDAMIPIGRGQRELIIGDRQTGKTAIAIDTIINQKGKNVICIYCGIGQKASSIVAIMNYLEKHGAMDYTFVVLASASDSAALQYIAPYSAVAMAEHFLHQGKDVLVVYDDLSKHAVAYRAISLLLRRPPGREAFPGDVFYLHSRLLERAAKLSPSKGGGSITAMPIVETQAGDISSYIPTNVISITDGQIFLDSELFNSGFRPAIDVGLSVSRVGGSAQTKAMRKISGRIRLDLAQYREMAAFAQFGSDLDRATQDKLAQGERLMEVLKQPQYSPYHIEEQIVILFLAVEGFLLDIKTENVSAFVKDFLLHLKSAKADLLKNIAETGVVSKEQEDELHLTVKSFKEARK

SEQ ID NO: 71491 - DNA, 414 bp, Unknown
  Obtained from environmental sample
  misc_feature (1)..(414): n is a, c, g, or t
atgttccgccattgcgaccgccgaatagggcgcgatatattgaagagccgccgaatcggaagcggacgcaagcactacaaatgtgtagtccatcgcgccgtgtttctcaagataattcataattgctactatcgaagacgctttctgcccgataccacagtatatacaaataacattttttcctttttgattaattatcgtatcaatggcgatggctgtttttcccgtttggcggtcgccgattatcagttctcgttgaccgcgcccgattggaatcatcgcgtcaatggaaatacatcccgtttgaagcggagtatcaacgcttccgcggtcgattacaggcgcggcgggagcttccatcggcataaacgcctcggctgttaccggtcctttgccgtcaagagcttcgcctaa

SEQ ID NO: 71492 - protein, 137 aa, Unknown
  Obtained from environmental sample
  misc_feature (1)..(137): Xaa is any amino acid
MFRHCDRRIGRDILKSRRIGSGRKHYKCVVHRAVFLKIIHNCYYRRRFLPDTTVYTNNIFSFLINYRINGDGCFSRLAVADYQFSLTAPDWNHRVNGNTSRLKRSINASAVDYRRGGSFHRHKRLGCYRSFAVKSFA

SEQ ID NO: 71493 - DNA, 897 bp, Unknown
  Obtained from environmental sample
  misc_feature (1)..(897): n is a, c, g, or t
atgtcaaacttacgcgatgtgcgcctgcggatgcgggctatcgaacagacattacaggtaaccaaggcgatgaaccttatctctaccgcaaaactgcgcaaaggacgtaagatgctcgcggataccgtgccgtatttcagcaggattcaaaaagcaatgtttgatattctttccagtgagaaaaatattgacagcgtattttttaaaaaacgcgataaggagtcaaagcctccgcgtaccgcgataattgtcataaccagcgacaaggggcttgcgggcggctataacgcgaatatttaccgccatgtagaagagctttgcgcaaaggtgcggaatccggtgctgatacttatcggcggcaatgtcggctatcgctatttttgtcattctccgtatgtaattctggaaaatttttctttccacccgcaggttcccacagtggaacacgccggagaagtttccgagtatgtggtttctcagctcatttggggaatttttgattcggtacatattgtttataccaatatgttcagcatggtaaaacttctgccggtagatcatcagataattccgcttgtaaaagaaaaaatacaagatgatatttttgaaatcggcggagtaaagagggtggatttaaaatttgaatttctgccgaccacagaggcggtttttgatacgctggttcctcagtatataaagggcgtaatttacggggcgatggtggaagcgtacgcaagcgaacaaagcgcccgcatgaaggcaatggacgaggcttccaagagcgccgaagatatgctcgcctctttgcggataagttacaaccgcgcgcgtcaggcgggcattacgcaggaaatggcggaaataacaggcggttcttcagcgctggctgataggtag

SEQ ID NO: 71494 - protein, 298 aa, Unknown
  Obtained from environmental sample
  DOMAIN (2)...(295): ATP synthase
  misc_feature (1)..(298): Xaa is any amino acid
MSNLRDVRLRMRAIEQTLQVTKAMNLISTAKLRKGRKMLADTVPYFSRIQKAMFDILSSEKNIDSVFFKKRDKESKPPRTAIIVITSDKGLAGGYNANIYRHVEELCAKVRNPVLILIGGNVGYRYFCHSPYVILENFSFHPQVPTVEHAGEVSEYVVSQLIWGIFDSVHIVYTNMFSMVKLLPVDHQIIPLVKEKIQDDIFEIGGVKRVDLKFEFLPTTEAVFDTLVPQYIKGVIYGAMVEAYASEQSARMKAMDEASKSAEDMLASLRISYNRARQAGITQEMAEITGGSSALADR

SEQ ID NO: 71495 - DNA, 1380 bp, Unknown
  Obtained from environmental sample
  misc_feature (1)..(1380): n is a, c, g, or t
atggcaaacaagggatatatcatccaagtaatcggtcccgttgtagacgttcgttttgaagcgggacaggttcctctgattttaaatgcgttgaaagtgaaagccgatcgcgtcgttactcttgaagtcttgcagcatatcggcgacaaccgtgtgcgttgcgttgcgatgtccgccgccgagggattgtcccgcgggcttgaggttgaggacacaggcaagccgatcagcgtgccggtcggcaaggaagttctgggacgaatgttcagcgtgaccggcgatcccattgacgacaagggagcgttcagcacgtcgcaatatgagtcgatacaccgtaatgcgccagactttaacgaactacgtccggcgaccgcgctgcttgaaacgggaataaaagtaattgatttaattgcgccctatgcgaagggcggaaagattggactgttcggcggcgcgggagtagggaagacagtcgttatcatggaacttatccgcaacatagcgacggaacattcgggctactcggtgttcgccggtgtcggcgagcgttcgcgcgaaggagccgacctttggaaagaaatgaccgaaagcggcgttatcgaaaagactgcgcttgtttttggtcagatgaacgaaccgcccggagcgagaatgagagtcgcgcttgccggtcttaccatggcggaacattttcgcgatcaggacaggcaggacgtacttttgtttgtcgataatattttccgcttcatacaagcgggcgcggaagtatccgctcttcttgggcgcataccaagcgcggttggttatcagccgacacttgccaacgagatgggcggtcttcaggagaggattgcaagcacatcaaaaggatcgataaccagtattcaggcggtttatgttcccgccgacgaccttaccgatcccgcgcccgcgacaaccttcgcccacttagacgcaaccaccacgctgtcgcgcaaaattgtagagttgggaatttatccctctgtcgatcctcttgcttcaagctcccgtattcttgacgcggcgatagtgggcgaggagcattacaacaccgcccgcagagctcagcagattttacagcggtacaaagagttacaggatataatcgccattttgggaatggacgagctttccgaggaagacaagctcacagtcgccagggcaagaaagatacaacgttttttcagccagccgtttttcgtcggggaaaaatttacaggtattcccggacgctatgtgcctgtcaaggaaacagtccgcggcttcaaaatgatactggacggcgaatgcgacacaatcccggagcagtctttttacatggcgggcagtattgatgacgttctggaaaaggcaaaataa

SEQ ID NO: 71496 - protein, 459 aa, Unknown
  Obtained from environmental sample
  DOMAIN (7)...(73): ATP synthase alpha/beta family, beta-barrel domain
  misc_feature (1)..(459): Xaa is any amino acid
MANKGYIIQVIGPVVDVRFEAGQVPLILNALKVKADRVVTLEVLQHIGDNRVRCVAMSAAEGLSRGLEVEDTGKPISVPVGKEVLGRMFSVTGDPIDDKGAFSTSQYESIHRNAPDFNELRPATALLETGIKVIDLIAPYAKGGKIGLFGGAGVGKTVVIMELIRNIATEHSGYSVFAGVGERSREGADLWKEMTESGVIEKTALVFGQMNEPPGARMRVALAGLTMAEHFRDQDRQDVLLFVDNIFRFIQAGAEVSALLGRIPSAVGYQPTLANEMGGLQERIASTSKGSITSIQAVYVPADDLTDPAPATTFAHLDATTTLSRKIVELGIYPSVDPLASSSRILDAAIVGEEHYNTARRAQQILQRYKELQDIIAILGMDELSEEDKLTVARARKIQRFFSQPFFVGEKFTGIPGRYVPVKETVRGFKMILDGECDTIPEQSFYMAGSIDDVLEKAK

SEQ ID NO: 71497 - DNA, 348 bp, Unknown
  Obtained from environmental sample
  misc_feature (1)..(348): n is a, c, g, or t
ttgtatgaagcggaaaatattatcgacaaacaaaagtacgtcctgcctgtcctgatcgcgaaaatgttccgccatggtaagaccggcaagcgcgactctcattctcgctccgggcggttcgttcatctgaccaaaaacaagcgcagtcttttcgataacgccgctttcggtcatttctttccaaaggtcggctccttcgcgcgaacgctcgccgacaccggcgaacaccgagtagcccgaatgttccgtcgctatgttgcggataagttccatgataacgactgtcttccctactcccgcgccgccgaacagtccaatctttccgcccttcgcatagggcgcaattaa

SEQ ID NO: 71498 - protein, 115 aa, Unknown
  Obtained from environmental sample
  misc_feature (1)..(115): Xaa is any amino acid
MYEAENIIDKQKYVLPVLIAKMFRHGKTGKRDSHSRSGRFVHLTKNKRSLFDNAAFGHFFPKVGSFARTLADTGEHRVARMFRRYVADKFHDNDCLPYSRAAEQSNLSALRIGRN

SEQ ID NO: 71499 - DNA, 417 bp, Unknown
  Obtained from environmental sample
  misc_feature (1)..(417): n is a, c, g, or t
atgtccgctttatttacctttgaggttcatacgcctagacggctcttttattcaggcaaggtgcaggcgatcactatcggtcttgacgacggcgaaataggaatatacgcaaaccatgctcctttttccgcgcactctgttaccggaatgcttcgcattaaagacgacaccggcaactggcgctccgcgtttgtctgcggcggcattttggaagtgaaagaacataaagacgtgctgatggttgagagcgccgaatggcccgaagaaatcaatgttgagcgtgttcttggacttaaaaagcaagccgaagaaatattgaaggatacgcatttaaaatttgagattgacaaagccaaaaaacaactgcaccacgccgaatgcagactgaaggttttagaaacaatgaagaaagaataa

SEQ ID NO: 71500 - protein, 138 aa, Unknown
  Obtained from environmental sample
  DOMAIN (4)...(86): ATP synthase, Delta/Epsilon chain, beta-sandwich domain
  misc_feature (1)..(138): Xaa is any amino acid
MSALFTFEVHTPRRLFYSGKVQAITIGLDDGEIGIYANHAPFSAHSVTGMLRIKDDTGNWRSAFVCGGILEVKEHKDVLMVESAEWPEEINVERVLGLKKQAEEILKDTHLKFEIDKAKKQLHHAECRLKVLETMKKE

SEQ ID NO: 71501 - DNA, 771 bp, Unknown
  Obtained from environmental sample
  misc_feature (1)..(771): n is a, c, g, or t
gtgaatgttatgttcgcgacacactattactttatccgcagcggggaaaaaccctggaacgattacagactgcggcgcgctatgatgcttgttttaccgtgggatgaaatccgcgacggccattatcttcccgcaaagactttgatttttccgataaaaggatatccggaagttgatggaataaccgaaaccgattacgaggaagcggaaaagcttatgaaagaagccggtttcgccggcggcgccggagtgcccgaacttgttatccgcctgacgccttcgtctgacgccgccaatatcggaagtttaatggcgtccgcgtggaaagaaaaactggggcttaaagtaaaggtggaagttatcccttacgaaaattattttcaatccatgaaagaaagcggctatataatcggctcttccacatggataggcgattttgccgacccttacacctttttgcaaatgtggcggcgcgattccaatttgaacgacgcccactacagcgacgatgattacgaggcgctgatagagaaatccatgctggaagaaggggacaagcgcctggcgactcttgccgacgcggaaaaacttttgctggaaagggggagcgtgcttcccatttctttcactcccgcgcttaacattgtagacacaaatgaactggacggatggtatcccaacgcgcttgatatacatccttttaaatatttatcctttaagagtttccgtcctcttcccggcgttgtaatggtttttcccaaacatgaataa

SEQ ID NO: 71502 - protein, 256 aa, Unknown
  Obtained from environmental sample
  misc_feature (1)..(256): Xaa is any amino acid
MNVMFATHYYFIRSGEKPWNDYRLRRAMMLVLPWDEIRDGHYLPAKTLIFPIKGYPEVDGITETDYEEAEKLMKEAGFAGGAGVPELVIRLTPSSDAANIGSLMASAWKEKLGLKVKVEVIPYENYFQSMKESGYIIGSSTWIGDFADPYTFLQMWRRDSNLNDAHYSDDDYEALIEKSMLEEGDKRLATLADAEKLLLERGSVLPISFTPALNIVDTNELDGWYPNALDIHPFKYLSFKSFRPLPGVVMVFPKHE

SEQ ID NO: 71503 - DNA, 474 bp, Unknown
  Obtained from environmental sample
  misc_feature (1)..(474): n is a, c, g, or t
atgaataaaatcggtcttggctatgatattcaccgcctgaaaaaagggcgtcgttttttgctgggcggaacggaaatcccttttaacaagggggagttggggcattctgacggggacgctcttgcccacgcggtctgcgacgctttgctgggggcggcggctctcggcgacataggcgaattattcccgccctccgatcctaagtacagaaacgcggattctatggaacttctgcgtaacgtctttgagaaggtaaaaaatgcggactggcatcttgccaatcttgactgcgtaattatctgcgaaaagccgaagatacttccctttagagagcttatacgtaaatcacttgccgcggcccttgaagtttccgcggattgtatttttttgaaaggcaaaaccgcggaaggtttggggcaggttggcaagggaaaagcggtagaggtctacgctgtatgccttctggaaaaataa

SEQ ID NO: 71504 - protein, 157 aa, Unknown
  Obtained from environmental sample
  DOMAIN (2)...(157): YgbB family
  misc_feature (1)..(157): Xaa is any amino acid
MNKIGLGYDIHRLKKGRRFLLGGTEIPFNKGELGHSDGDALAHAVCDALLGAAALGDIGELFPPSDPKYRNADSMELLRNVFEKVKNADWHLANLDCVIICEKPKILPFRELIRKSLAAALEVSADCIFLKGKTAEGLGQVGKGKAVEVYAVCLLEK

SEQ ID NO: 71505 - DNA, 750 bp, Unknown
  Obtained from environmental sample
  misc_feature (1)..(750): n is a, c, g, or t
ttgtatttttttgaaaggcaaaaccgcggaaggtttggggcaggttggcaagggaaaagcggtagaggtctacgctgtatgccttctggaaaaataaaatgggaagcgatctttgccgcccttgaaaaatggcgtgaagagatgggcgaagatgacccgtctgtaaataccgtcgctgaacaatacagccgatctccgtgggcggtgcttgtttcaacaattatcagcctgcggacaaaagacgatgtaacccttgcggcttccgaaaaacttcttgaaaaagcggcaagtcccgcggaacttgtttcgttaagacaggataaaattgaaaaattgatttatcccgccggtttttacagggtcaaagccgcgtccctgaaaaaaatagccgccatactgcttgataagtacgacggcaaagttccctcctcaatggaagttctgctctcccttcccggagtcggcagaaaaacggcgaacctcgttcttaacgaagcgtttgatcttgacgctgtctgcgtagacattcacgttcaccgtatttctaaccggtgcggctggcttacaagcaaaaacccggaagaaaccgaaatgatcctaagggagattctcccgaaaaaattctggaaaaggatcaatcgccttcttgtcctttacgggcagaaattatgccggcctgtaagccccttctgttcgcgttgcgtaatcgcgaaattctgttcccggcgtgatgtaaatcactttaggtag

SEQ ID NO: 71506 - protein, 249 aa, Unknown
  Obtained from environmental sample
  DOMAIN (136)...(165): Helix-hairpin-helix motif
  misc_feature (1)..(249): Xaa is any amino acid
MYFFERQNRGRFGAGWQGKSGRGLRCMPSGKIKWEAIFAALEKWREEMGEDDPSVNTVAEQYSRSPWAVLVSTIISLRTKDDVTLAASEKLLEKAASPAELVSLRQDKIEKLIYPAGFYRVKAASLKKIAAILLDKYDGKVPSSMEVLLSLPGVGRKTANLVLNEAFDLDAVCVDIHVHRISNRCGWLTSKNPEETEMILREILPKKFWKRINRLLVLYGQKLCRPVSPFCSRCVIAKFCSRRDVNHFR

SEQ ID NO: 71507 - DNA, 339 bp, Unknown
  Obtained from environmental sample
  misc_feature (1)..(339): n is a, c, g, or t
ttgccgatcaataattatttacttattatttattcggaggcaattattatgaaaacaaatggaaaaacacccggtacgcttctgctggaattcatcagcaaaaacggcttaaattgcaacagagttgcaaaagaaatcaggtgcagtcaaacggctttaaggctgatcagtctggacaaaagccgcattacggcttcagtcgcagtccgccttgctaaatattttaacactaagcccgaattttggctgttgacgcagatgaagcatgatcttgtaaaagccgcaggcaataaaacattaagcaaaaaactcagcagtatcagtatagtaactacctaa

SEQ ID NO: 71508 - protein, 112 aa, Unknown
  Obtained from environmental sample
  misc_feature (1)..(112): Xaa is any amino acid
MPINNYLLIIYSEAIIMKTNGKTPGTLLLEFISKNGLNCNRVAKEIRCSQTALRLISLDKSRITASVAVRLAKYFNTKPEFWLLTQMKHDLVKAAGNKTLSKKLSSISIVTT

SEQ ID NO: 71509 - DNA, 933 bp, Unknown
  Obtained from environmental sample
  misc_feature (1)..(933): n is a, c, g, or t
atgaaaaaacccttaagtttttcaagtttacacaaccacacgattttctgcgacggcaaagacgatatagaaaccatgtgccgcgccgcgtttgaaaaaaagctttgcgcgctggggttcagcgcccacgcgcctattacaaaaaaaacaggcatagaaagcgactggaatttaaaagacgataaatttgatgaatatgttgaacaggtgcttgcggcaaaaaaacgctggcgcggaaaactggaagttttgcttggttttgaaattgattatatcaaaggattgcgctcggctttggacagggacatcacggaaataaaccctgattatttaataggcagcgttcattatcttattcccccaaacggcgcgaaaccgtttacggtggacggtccgcaggaagaatttgatcagggacttaacgaaggttttaacggggacgcgcgggcgcttatgaacagttattacgacgcgcagcttgagatgatagcgctcggcggttttgatattttaggacacgctgaccttattaaaaagaattgtattggaaaaaatttatggcccgtggaagaagaaatttaccgccaaaaagaaatcgcgcgcgccgtcgtcgatgccgtcggcaatgccgcaggcaatgccgcaggcaaggagggcattatcgcggaagctaacacggggggaattaacagaaaaaagattaacgagatttatccttcagaaacttttttaagattttttcgtgaaaataatgtacctgtaattatcacggcggacgcccattgcgcgccggatattaaaggtaattatgatacagcggtaaaaactcttttatcagcgggtttttcggatcatgtaattattttccgaaaaagagaaaaaaatataaaatatataaaagaaaaactgttaaatttccttgccgatcaataa

SEQ ID NO: 71510 - protein, 310 aa, Unknown
  Obtained from environmental sample
  DOMAIN (8)...(264): PHP domain
  misc_feature (1)..(310): Xaa is any amino acid
MKKPLSFSSLHNHTIFCDGKDDIETMCRAAFEKKLCALGFSAHAPITKKTGIESDWNLKDDKFDEYVEQVLAAKKRWRGKLEVLLGFEIDYIKGLRSALDRDITEINPDYLIGSVHYLIPPNGAKPFTVDGPQEEFDQGLNEGFNGDARALMNSYYDAQLEMIALGGFDILGHADLIKKNCIGKNLWPVEEEIYRQKEIARAVVDAVGNAAGNAAGKEGIIAEANTGGINRKKINEIYPSETFLRFFRENNVPVIITADAHCAPDIKGNYDTAVKTLLSAGFSDHVIIFRKREKNIKYIKEKLLNFLADQ

SEQ ID NO: 71511 - DNA, 1251 bp, Unknown
  Obtained from environmental sample
  misc_feature (1)..(1251): n is a, c, g, or t
atgcgcggcacagaaacaaaaaaaatatcagtctccctatccgctttaatagacaaaacttttcccatgccagggcgtttttattccgccctgccctcgcaggttgccgaactttcccgccttctcacgggcgcgagaggagaccgctctctttcatacctcagccgaccgaattacctttccgcctacctgcgctatttcctgccgtggaacattttgcgcctctgccgcctcctgccctctctggaccttcctctccgcgccggggacgtcatcacagacatgggaagcggcccgctgacttttgcatcggcgctatggctctcacgcccggacttacgcgccgttccgcttgaatttatctgcatagacaactgcgcccccgcccttgccgcggggaaaaaattttttgccgccttatgcgcagaagaagaatgcgcgtggaaaataacctgcgcgcgggagaagataaaccttaaaacaaagacggctcttgcgcgcaagaaagccgccttagtctgcgccgtgaatttttttaacgaaatatacgaagacctgccccataccgacagcgaggctcttaagcgcgcggcatgtgacgccgccttattaatgcacaatcaggcggcgcctgatgccctcattttaacactggaaccgggagtgccgcaatcggggcaatttatcagtttattgcgctccgcttttttggaacttggacgccctcccctgtcaccctgccctcattcggaaacttgccctatgcctggcggcaaagccacattaggcaaagccgccttcggcaaagccgccggcggaaaagttaaaaataaaactgttaacagtaaagctgttaacacaaaaaaccgctggtgccactttgcgtattccgcggctgacgctccgaaagaactaagcaggctatccgccgccgcgggtattcccaaagagcggcttgtgttaagctatttgcttgcaggcgctcacaaagaggggcaaaaacacacgaaagcggcgcaaacgtcgtatgcggagcatacgtttaaagtgcgggtaatatccgatgttttttcgcttccggacaataaatccggcagatacggatgttgttccgacggccttgtccttattacaggaaataaaagccgcatagaaaaaatcgcttccggagagcttataccaaaaagcatcggtaataccgacaatatgcgcgaccaaaaaagcggcgcgttgataatggagataaaatga

SEQ ID NO: 71512 - protein, 416 aa, Unknown
  Obtained from environmental sample
  misc_feature (1)..(416): Xaa is any amino acid
MRGTETKKISVSLSALIDKTFPMPGRFYSALPSQVAELSRLLTGARGDRSLSYLSRPNYLSAYLRYFLPWNILRLCRLLPSLDLPLRAGDVITDMGSGPLTFASALWLSRPDLRAVPLEFICIDNCAPALAAGKKFFAALCAEEECAWKITCAREKINLKTKTALARKKAALVCAVNFFNEIYEDLPHTDSEALKRAACDAALLMHNQAAPDALILTLEPGVPQSGQFISLLRSAFLELGRPPLSPCPHSETCPMPGGKATLGKAAFGKAAGGKVKNKTVNSKAVNTKNRWCHFAYSAADAPKELSRLSAAAGIPKERLVLSYLLAGAHKEGQKHTKAAQTSYAEHTFKVRVISDVFSLPDNKSGRYGCCSDGLVLITGNKSRIEKIASGELIPKSIGNTDNMRDQKSGALIMEIK

SEQ ID NO: 71513 - DNA, 789 bp, Unknown
  Obtained from environmental sample
  misc_feature (1)..(789): n is a, c, g, or t
atgcgcaatgtctcgctttcttccgaccgcttccgtatttttctggaacctcaggccgcagggccgtttacaaatatccccatgatacgcaataccctttcagtcggcacaacgtcgcttgtttcgggatattccgccaacggcgcttacaaacagggacgcaatatacgcgtcgcgctttgttttgacctttacgatgatgaaaccgggttgtcccaagtgcttaactcgcttcgctgttttaacataaaagccactttctttttgaacggcgattttatccgcaggtgcccgaacgcggcggcggcgataatcgcggcaggccacgaaacggcttcccttttttacgcccctatagacctttcggacgcccgttacaatataactccgcagtttatagcgcagggacttgcgcgtaacgaagacgagtttttccgcgccacgggaaaagaactttccctgctttggcatccgccgtttttccgcacttccgacatgataaactcggccgccgccgttgtgggatattctacagccgtaagggacattgatccaggcgactggctttccaaagaagaagccttaaggctgggcatacgccagctttccgcttcgcagttaattgaacaaataaccgaaaaaaggaaaaacggctctgtaattcccataaggcttgggtcaaatcccggaggcagggacgattatcttttccagaaaatcgatgtactgcttgacgcgcttatccgttcaggctgtgatatagttcccgtttccgctatcatcaggtaa

SEQ ID NO: 71514 - protein, 262 aa, Unknown
  Obtained from environmental sample
  DOMAIN (51)...(179): Polysaccharide deacetylase
  misc_feature (1)..(262): Xaa is any amino acid
MRNVSLSSDRFRIFLEPQAAGPFTNIPMIRNTLSVGTTSLVSGYSANGAYKQGRNIRVALCFDLYDDETGLSQVLNSLRCFNIKATFFLNGDFIRRCPNAAAAIIAAGHETASLFYAPIDLSDARYNITPQFIAQGLARNEDEFFRATGKELSLLWHPPFFRTSDMINSAAAVVGYSTAVRDIDPGDWLSKEEALRLGIRQLSASQLIEQITEKRKNGSVIPIRLGSNPGGRDDYLFQKIDVLLDALIRSGCDIVPVSAIIR

SEQ ID NO: 71515 - DNA, 1824 bp, Unknown
  Obtained from environmental sample
  misc_feature (1)..(1824): n is a, c, g, or t
atggacacggcgtacgtgccgttcctcgtaaacgtagacgccgtcgtaaaggcggaaccgggggacggcgcggtctccggcgcggctcctgtgcaaatatcggttaagggcggcacggagtcgtttatacggattccggttcaaaaaacgatcggcgtgctgtacggcgctcagaaacacgcgaacagcttcgccgtcgtcagtagccgcggcggaaaggtcacgctcaacttgcccgcgcagtcgtacaaaaacgcggtcgtcgccctgtactcggttgatggaaagcggatcttgcgtaaaacggtgtccgcctcgaacgccgtaagcaacatctcgcgccgcaatctcgccaacggggcctacatcttgtcggtcaaaggaaccgaccgcgacgcggtcacctcccgcctgacgcatagcggcgggggtctggacatcaatgtgaccttcggcggcgacaaccgcttatcctccgctgagaaattagccaaaaaagcggcggccgagagctggaagataaccgtctcggcggcggcggccggatacgtcgattcatcatacgctatcagtcccaaagcgggtatgaacgccacgcagaccataacgctgagcgaaaaaccgccgaccggccccgtagtgatagagcccgcgacatacgcggtgaaggttacaagcaacggtaccggcgcgaccggcaccggcgactacgcgccggggacgacggtcagcataaagtccggaacggcgccggaaggttacgtgttcgaaaagtggacgtccacaagcaacggagtaacttttgtcagtgagaacagcgcggcgactacgtttaccatgcccgcgaacgccgtaactgtaacggcgacgtttgtgtcgattaaatacaaggtaacggtttcaagcgacggtacgggggcgagcggcggcggcgattacgtatcggggatgacggttaccataaaaccaggaacggcgccggcgggacatagattcttgaggtggtcttccggcgacgtaagcatcaaaaatccggagattcccgacaatacattcataatgccggccaaggatgtaacggtaactgcggtatttgaggcgcaaaaatataatgtgattctcattggcacacccaacgacggtagcggtttcggcgacggaaattatttatccggcgcgacggttacaatatatgccgggacggcgccggctggtaaggtgttcgtaaactggacatccccaagcaacggcgtagattttgccgatgcgaccagcgagacgacaacgtttaccatgccggggaacgcggtgacggtaaatgcgaattttatcaaagcggtggtaatagggggcaagacgtggacggcgaagaatctggacgttcagacgccaagcggttcttggtgttatgacaacagcgccgatagttgcacaaagtacggcaggttgtacgattgggcgacggcaaaaacggtttgtccatcgaaatggcatttgccgtctaatgatgagtggagcgcattgcttaatgccgccggtaccggtaccgacgtttccggtgcggttcaggcgctgaaatcaaagagcggatgggacgaaatcggtaatgatggtacggataaatacggattttcggccttgcccggcggctcccgcagtaccggtggctctttctccaatgccggcctcttcggctactggtgggcggccacggagaaggatgacgatctcgcttaccgctggactatgaccatactcaacaccatgaactataacacctattacaagaacgccggttcctcggtgcgttgcgttgctgattga

SEQ ID NO: 71516 - protein, 607 aa, Unknown
  Obtained from environmental sample
  misc_feature (1)..(607): Xaa is any amino acid
MDTAYVPFLVNVDAVVKAEPGDGAVSGAAPVQISVKGGTESFIRIPVQKTIGVLYGAQKHANSFAVVSSRGGKVTLNLPAQSYKNAVVALYSVDGKRILRKTVSASNAVSNISRRNLANGAYILSVKGTDRDAVTSRLTHSGGGLDINVTFGGDNRLSSAEKLAKKAAAESWKITVSAAAAGYVDSSYAISPKAGMNATQTITLSEKPPTGPVVIEPATYAVKVTSNGTGATGTGDYAPGTTVSIKSGTAPEGYVFEKWTSTSNGVTFVSENSAATTFTMPANAVTVTATFVSIKYKVTVSSDGTGASGGGDYVSGMTVTIKPGTAPAGHRFLRWSSGDVSIKNPEIPDNTFIMPAKDVTVTAVFEAQKYNVILIGTPNDGSGFGDGNYLSGATVTIYAGTAPAGKVFVNWTSPSNGVDFADATSETTTFTMPGNAVTVNANFIKAVVIGGKTWTAKNLDVQTPSGSWCYDNSADSCTKYGRLYDWATAKTVCPSKWHLPSNDEWSALLNAAGTGTDVSGAVQALKSKSGWDEIGNDGTDKYGFSALPGGSRSTGGSFSNAGLFGYWWAATEKDDDLAYRWTMTILNTMNYNTYYKNAGSSVRCVAD

SEQ ID NO: 71517 - DNA, 1329 bp, Unknown
  Obtained from environmental sample
  misc_feature (1)..(1329): n is a, c, g, or t
atggccaaaaagaaagtccacgatctcgccaaagagttcaacgtttccggcgcggcattggttcagatgctgcggggaatgggtattctcgtaaagagccacatgagcacggtggacgaggagttgcgtacgcagatcaaggagaagtttgaacaagagcgtgcggacattaagaaggagtacgagcgcaaaaagcagatactgaacaaggcaagcgaggagttggagacggcggctcctcccccgcgtgtcgccccagcggcgccgccgcctattgcggaaaccgccgccgtaactcccgccgataccaccgccgtgacaaaacgcggttccgagcagcaacggggaagcggcggaggtggcggaggcggtagcggcggaggcacggcgcatggtcagcaaggtcagcagcaacagcagcaaaaatctaagaattccatacgcaagtaccaccagaaggagtcgtgggccaagggcaacgcgcccggatcgccttccggacacggcggcggcggtcacggggggggcggtcacggggagagcggtcgcggtggcggtcatggcggcggcggaggcggaggcggaggcggtcatggggaaagcggtcgcggcgggccggggggacgcggcggccacggcggccatgccggacacggcggcggtcacggagggcgcggaggtcacggcggtcatgccggcggcgattcaggggcggccgcttggggcggcgcatcgcccaaatcacccgacgcggagggcaaaaaagccgcgaccggcaagaccggggaacgcggcaagaagaagggcggcaagcataggaacgagcgcgccgagataaacgaaatcgaactaaaggccaacgtgaagaagacgctggcccgaataggttccggtatcggcaagaagaaatacaagaaggagggcggcgccgaggtcgaggaggacacgtcaaagaaggttctgcaggtggcggagtttgtgacgccgaacgagctcgccaacatgatgaacgtgacgccgaacgacgtgattacgaagtgcttggaattgggtatgttcgttaccataaaccagcgtcttgactttgaaacgatagagcttgtggtggacgagttcggttacacggcgagcctcatggaggaatacgttccgagcgacgaaatcggcacggaagcggacgaaacgtcgggaacgatgcttccgcgggcgccggtggttacggtgatgggacacgttgaccacgggaagacgtcgttgcttgactacataaggaagacgaacgtgattgccggagagtcgggcggaatcacgcagcacatcgcggcgtaa

SEQ ID NO: 71518 - protein, 442 aa, Unknown
  Obtained from environmental sample
  DOMAIN (324)...(375): Translation initiation factor IF-2, N-terminal region
  misc_feature (1)..(442): Xaa is any amino acid
MAKKKVHDLAKEFNVSGAALVQMLRGMGILVKSHMSTVDEELRTQIKEKFEQERADIKKEYERKKQILNKASEELETAAPPPRVAPAAPPPIAETAAVTPADTTAVTKRGSEQQRGSGGGGGGGSGGGTAHGQQGQQQQQQKSKNSIRKYHQKESWAKGNAPGSPSGHGGGGHGGGGHGESGRGGGHGGGGGGGGGGHGESGRGGPGGRGGHGGHAGHGGGHGGRGGHGGHAGGDSGAAAWGGASPKSPDAEGKKAATGKTGERGKKKGGKHRNERAEINEIELKANVKKTLARIGSGIGKKKYKKEGGAEVEEDTSKKVLQVAEFVTPNELANMMNVTPNDVITKCLELGMFVTINQRLDFETIELVVDEFGYTASLMEEYVPSDEIGTEADETSGTMLPRAPVVTVMGHVDHGKTSLLDYIRKTNVIAGESGGITQHIAA

SEQ ID NO: 71519 - DNA, 525 bp, Unknown
  Obtained from environmental sample
  misc_feature (1)..(525): n is a, c, g, or t
ttgacgtgtcctcctcgacctcggcgccgccctccttcttgtatttcttcttgccgataccggaacctattcgggccagcgtcttcttcacgttggcctttagttcgatttcgtttatctcggcgcgctcgttcctatgcttgccgcccttcttcttgccgcgttccccggtcttgccggtcgcggcttttttgccctccgcgtcgggtgatttgggcgatgcgccgccccaagcggccgcccctgaatcgccgccggcatgaccgccgtgacctccgcgccctccgtgaccgccgccgtgtccggcatggccgccgtggccgccgcgtccccccggcccgccgcgaccgctttccccatgaccgcctccgcctccgcctccgccgccgccatgaccgccaccgcgaccgctctccccgtgaccgccccccccgtgaccgccgccgccgtgtccggaaggcgatccgggcgcgttgcccttggcccacgactccttctggtggtacttgcgtatggaattcttag

SEQ ID NO: 71520 - protein, 174 aa, Unknown
  Obtained from environmental sample
  misc_feature (1)..(174): Xaa is any amino acid
MTCPPRPRRRPPSCISSCRYRNLFGPASSSRWPLVRFRLSRRARSYACRPSSCRVPRSCRSRLFCPPRRVIWAMRRPKRPPLNRRRHDRRDLRALRDRRRVRHGRRGRRVPPARRDRFPHDRLRLRLRRRHDRHRDRSPRDRPPRDRRRRVRKAIRARCPWPTTPSGGTCVWNS

SEQ ID NO: 71521 - DNA, 354 bp, Unknown
  Obtained from environmental sample
  misc_feature (1)..(354): n is a, c, g, or t
gtgggccaagggcaacgcgcccggatcgccttccggacacggcggcggcggtcacggggggggcggtcacggggagagcggtcgcggtggcggtcatggcggcggcggaggcggaggcggaggcggtcatggggaaagcggtcgcggcgggccggggggacgcggcggccacggcggccatgccggacacggcggcggtcacggagggcgcggaggtcacggcggtcatgccggcggcgattcaggggcggccgcttggggcggcgcatcgcccaaatcacccgacgcggagggcaaaaaagccgcgaccggcaagaccggggaacgcggcaagaagaagggcggcaagcatag

SEQ ID NO: 71522 - protein, 117 aa, Unknown
  Obtained from environmental sample
  misc_feature (1)..(117): Xaa is any amino acid
MGQGQRARIAFRTRRRRSRGGRSRGERSRWRSWRRRRRRRRRSWGKRSRRAGGTRRPRRPCRTRRRSRRARRSRRSCRRRFRGGRLGRRIAQITRRGGQKSRDRQDRGTRQEEGRQA

SEQ ID NO: 71523 - DNA, 1386 bp, Unknown
  Obtained from environmental sample
  misc_feature (1)..(1386): n is a, c, g, or t
gtgcaaacgaaacacgggtcggtgactttcctagacaccccgggtcacgaggcatttacggctatgcgcgccagaggttcgcagatcaccgacgtcatagtgctggtagtggccgccgactcggcggttatgccgcagacgcgggaggccatagaccacgcgagggccgcgggcgtaccgcttgtggtggccatcaacaagatagacctgcccacggcgaatccggataagatcaagggcgaactggcgagctacaacgtgttggtggaggagtacggcggacagacctcctgcgtggagatctcggctaagaccggtcagggtatagacaagctgctggaggtgctcgcgcttgagacggagatactggagttgaaggcgaccccggagggccgggcgcacggcgtggtgatagaagcggagctcgacaaggggaaaggccccatagcgacggtattgatacaacgcggcacgttgacgaaggggaacgcctttgtgacgggaattcacagcgggcgcgtgcgggagttgcacaacgagcgcggttccatagttgagaacgccggcccgagccagccggtgctaatcatagggctctccggaacgccgcaagccggcgactccttcagggtgctcgacgatgagaaagaggcgagggagataagcgcgcggcgccggcttgcgcaacgcgagcgggagatgcgcaagatcaactccgtatcgcttgacaatctctacgagcagatacaggccggcagcgtacagaacctcaacctgatcatcaagggagacgtggacggttccgtggaggcgctggccacgtcgcttgagaaactgagcactccggagatcaaggtgcgggtgatccacaagagcgtgggcgcggtgaaggagacggacatcatgctgggcgtggcgtcgaacgcgctcatcatcggcttccacctcagccccaacacaaagataagagacatggcgaaacgggagggtgtggaaataaggacgtaccgcatcatctacgaggcggtggacgccgtgcacaacgccatggagggcatgctgaagccggagatcagggagaacattctggcggaggcggtggtacgcaagctcttcaaggtctcgaagatcggtacgatagcgggttgcatggtggagagcggcacgctgaacaggaactcaaaggcgcgcgtaataagaaacgacgtggagctggcagagtccaagatatcgagtttgaagcgcctgcaagacgacgtgagggaggtgcaggccgggtacgagtgcggaatcatgttggacaggttctcggacttccaagagggcgataggatcgtgacgtttgaggaagtggaagttgcgagaaagttgacgaagaacaattga

SEQ ID NO: 71524 - protein, 461 aa, Unknown
  Obtained from environmental sample
  DOMAIN (2)...(124): Elongation factor Tu GTP binding domain
  misc_feature (1)..(461): Xaa is any amino acid
MQTKHGSVTFLDTPGHEAFTAMRARGSQITDVIVLVVAADSAVMPQTREAIDHARAAGVPLVVAINKIDLPTANPDKIKGELASYNVLVEEYGGQTSCVEISAKTGQGIDKLLEVLALETEILELKATPEGRAHGVVIEAELDKGKGPIATVLIQRGTLTKGNAFVTGIHSGRVRELHNERGSIVENAGPSQPVLIIGLSGTPQAGDSFRVLDDEKEAREISARRRLAQREREMRKINSVSLDNLYEQIQAGSVQNLNLIIKGDVDGSVEALATSLEKLSTPEIKVRVIHKSVGAVKETDIMLGVASNALIIGFHLSPNTKIRDMAKREGVEIRTYRIIYEAVDAVHNAMEGMLKPEIRENILAEAVVRKLFKVSKIGTIAGCMVESGTLNRNSKARVIRNDVELAESKISSLKRLQDDVREVQAGYECGIMLDRFSDFQEGDRIVTFEEVEVARKLTKNN

SEQ ID NO: 71525 - DNA, 504 bp, Unknown
  Obtained from environmental sample
  misc_feature (1)..(504): n is a, c, g, or t
gtgcaactcccgcacgcgcccgctgtgaattcccgtcacaaaggcgttccccttcgtcaacgtgccgcgttgtatcaataccgtcgctatggggcctttccccttgtcgagctccgcttctatcaccacgccgtgcgcccggccctccggggtcgccttcaactccagtatctccgtctcaagcgcgagcacctccagcagcttgtctataccctgaccggtcttagccgagatctccacgcaggaggtctgtccgccgtactcctccaccaacacgttgtagctcgccagttcgcccttgatcttatccggattcgccgtgggcaggtctatcttgttgatggccaccacaagcggtacgcccgcggccctcgcgtggtctatggcctcccgcgtctgcggcataaccgccgagtcggcggccactaccagcactatgacgtcggtgatctgcgaacctctggcgcgcatagccgtaaatgcctcgtgacccggggtgtctag

SEQ ID NO: 71526 - protein, 167 aa, Unknown
  Obtained from environmental sample
  misc_feature (1)..(167): Xaa is any amino acid
MQLPHAPAVNSRHKGVPLRQRAALYQYRRYGAFPLVELRFYHHAVRPALRGRLQLQYLRLKREHLQQLVYTLTGLSRDLHAGGLSAVLLHQHVVARQFALDLIRIRRGQVYLVDGHHKRYARGPRVVYGLPRLRHNRRVGGHYQHYDVGDLRTSGAHSRKCLVTRGV

SEQ ID NO: 71527 - DNA, 459 bp, Unknown
  Obtained from environmental sample
  misc_feature (1)..(459): n is a, c, g, or t
gtgcacggcgtccaccgcctcgtagatgatgcggtacgtccttatttccacaccctcccgtttcgccatgtctcttatctttgtgttggggctgaggtggaagccgatgatgagcgcgttcgacgccacgcccagcatgatgtccgtctccttcaccgcgcccacgctcttgtggatcacccgcaccttgatctccggagtgctcagtttctcaagcgacgtggccagcgcctccacggaaccgtccacgtctcccttgatgatcaggttgaggttctgtacgctgccggcctgtatctgctcgtagagattgtcaagcgatacggagttgatcttgcgcatctcccgctcgcgttgcgcaagccggcgccgcgcgcttatctccctcgcctctttctcatcgtcgagcaccctgaaggagtcgccggcttgcggcgttccggagagccctatgattag

SEQ ID NO: 71528 - protein, 152 aa, Unknown
  Obtained from environmental sample
  misc_feature (1)..(152): Xaa is any amino acid
MHGVHRLVDDAVRPYFHTLPFRHVSYLCVGAEVEADDERVRRHAQHDVRLLHRAHALVDHPHLDLRSAQFLKRRGQRLHGTVHVSLDDQVEVLYAAGLYLLVEIVKRYGVDLAHLPLALRKPAPRAYLPRLFLIVEHPEGVAGLRRSGEPYD

SEQ ID NO: 71529 - DNA, 2328 bp, Unknown
  Obtained from environmental sample
  misc_feature (1)..(2328): n is a, c, g, or t
atggcaagcaaagtggatgacccagcaagcaggggaataacattcagggaattggcaaatgcttatcaagtgcaaatcaaagggcttttagacggcggcgcagacattcttttaatagaaacggtatttgacacgcttaactgcaaagcggcgctctacgcagcctcgcttgaacaagaggaaaggggagttcgcgttcctgttatggtttctggaacaataagcgatgcttctggtcgtttgctcgctgggcaaactttggaggctttttggaattcagtgagcggctacgatttattcagcgttggattgaactgcgctcttggcgcagaggaaatgggctcgcatattgccgagctttcaagaattgcgaatgtttttatcagtgcatatccaaacgcaggtttgccaaatccgctcggtggctacgatgaaactcccgaaggtatggcgaagcatattgaaaaatttgcagcaaatggctgggtaaatgtagttggcggttgttgcggaacaaatccagaaaccatagccgctatgaaaaaagctgtgcagggcaaaagcccaaggaaaataccagagctgccaaaaacaacaaggctatcgggcttggaacccgttgagataaccgaaaacagcaatttcataaatataggcgagcgaaacaatatggcaggcagcctgaaattcgcaaaaatgattagggaaaataattggagcgaggcgatatctctctccgttgctcaaattgagaatggtgcgcagattatagatataaatgtggacgatggcttgcttgattcacgggaaaaaatgcggcatttcgttaatctatacgtttccgaacccgcggcggcaaaatgtccagttatgttggatagttcgtcttgggatgttttgcttgccggaatggagtgtttccccggaaagggcattgtgaattcccttagtttaaaagagggtgaagaagtttttttaaaaaaagcaagcgaagtgaaacgcatgggttttgcacttgtgtgcatggcttttgacgaagaagggcaggcgagcagctacgaaaaaagaacagaggtttgcaaaagggaatacgatttgctaaccgagaaattaaatttcaacccctgtgatattttctttgacccaaatattctctccattggaacaggcattgccgaacacgcggattacgcaaaagattttatagagacttgcaaattcataaaagcaaacttgccccattcgcacatcgttggcggaatttcaaatttgagttttgcattcaaaggcaacaacgcaatccgcgaaagtatgcactcctgttttctatactatgcgacaaaagcgggaatggattttggaattgtaaacgccggttcgcttcccatttacgatgatattttggctgaggagaggaatttaatagaagatttgattttcaaccgcagcccagatgcaaccgaccgcttgctgcaatacgcggaaagcgtaaaggagagaaaaagcgagctggcgagccacgcagatgctttggcttggcggcagttgtctttggaagagagaatatcttatgctttggttaagggcatagatacctttatagaaagcgatgctgacgaggcgcgagtggcttatggcagtccgctgaaagtaattgaagagcctttgatgaacggtatgaacaaggttggcgagctttttggagcgggaaaaatgtttttgccgcaagtggtgaaaagcgcaagagtgatgaaaaaagcggtagcggttttgcagccatatatagacagctctgcaacacaaactgcaaaagctggcaaaattctgatggcaaccgtgaaaggcgatgtgcacgatattgggaaaaacatagtgtctcttgttcttgcctgcaacaactacgaaattatagaccttggagttatgtgtccggcagagaaaattttggaagcggtgaaggaacacctgccgaatttggttggtctttcggggcttataacgccaagccttgcagagatgagctttgttgtggaaactctttcaaaagaaaatcttgggattccagtgatgataggcggagccacaacttctgctttgcacaccgctgcaaaaatcgccacagtaggaaagcagcctgttgtttatgtgccagatgctggcaaagctgtttttgtggcggaatccattttgaataagtccaagcagaatgtgtttttccaagagaattttgagaagcagcaaaagctgagggaggctttgagccgcaaagaggaaaaggtgctaacgccgattgaggaagcgaggggcaaggggttggagttgttttga

SEQ ID NO: 71530 - protein, 775 aa, Unknown
  Obtained from environmental sample
  DOMAIN (1)...(186): Homocysteine S-methyltransferase
  misc_feature (1)..(775): Xaa is any amino acid
MASKVDDPASRGITFRELANAYQVQIKGLLDGGADILLIETVFDTLNCKAALYAASLEQEERGVRVPVMVSGTISDASGRLLAGQTLEAFWNSVSGYDLFSVGLNCALGAEEMGSHIAELSRIANVFISAYPNAGLPNPLGGYDETPEGMAKHIEKFAANGWVNVVGGCCGTNPETIAAMKKAVQGKSPRKIPELPKTTRLSGLEPVEITENSNFINIGERNNMAGSLKFAKMIRENNWSEAISLSVAQIENGAQIIDINVDDGLLDSREKMRHFVNLYVSEPAAAKCPVMLDSSSWDVLLAGMECFPGKGIVNSLSLKEGEEVFLKKASEVKRMGFALVCMAFDEEGQASSYEKRTEVCKREYDLLTEKLNFNPCDIFFDPNILSIGTGIAEHADYAKDFIETCKFIKANLPHSHIVGGISNLSFAFKGNNAIRESMHSCFLYYATKAGMDFGIVNAGSLPIYDDILAEERNLIEDLIFNRSPDATDRLLQYAESVKERKSELASHADALAWRQLSLEERISYALVKGIDTFIESDADEARVAYGSPLKVIEEPLMNGMNKVGELFGAGKMFLPQVVKSARVMKKAVAVLQPYIDSSATQTAKAGKILMATVKGDVHDIGKNIVSLVLACNNYEIIDLGVMCPAEKILEAVKEHLPNLVGLSGLITPSLAEMSFVVETLSKENLGIPVMIGGATTSALHTAAKIATVGKQPVVYVPDAGKAVFVAESILNKSKQNVFFQENFEKQQKLREALSRKEEKVLTPIEEARGKGLELF

SEQ ID NO: 71531 - DNA, 1254 bp, Unknown
  Obtained from environmental sample
  misc_feature (1)..(1254): n is a, c, g, or t
gtgacaaaatgcatatatttacttgccaacaagtccaacaaactttttttttcaaaggagcttgctgatgcctatcgttcctcccccggatgcttcacccgccgccgccttatgggtttcgctgaggtcatgggggttatattgaacttttccaagaaatcgctccagcttgaactggacgggttcatggagcttctggacccgtccatagagaagcctatgacgaagcaggccttctccaaggcccgcctcaatatcatgcccggcgcgttcatgaaacttttcgaaacaaatgtccatgccatgttcgaggaggattttttcaagcggttcaagggctggcgagtattcgccatagacggcaccgagctccagcttcccaagcacggaaacaacctgcccgggttccagcacaattccgcgcattcccttccgcacgcacgcgccagcattctgtgcgatgtcctctccggcttcatagcgcacgccgccatagacaccaccgcagtgggcgagcgcgagcttgcgctggagcatcttgagtatttcctccacttcaaaacagccaatgacttggtcatatttgaccgcggctatccgtcaaaggagttcatagaatatctgaatgccaatggcatcaagtatctcatgcgtgtgccgaaaggcttcagccatgccgccgatgcttccgcagagcgcgatttcaccgttgacgtgcttggcacaggtgtccgtgccgtgaaagtggatttgccgagcggagaaacggagcttcttttcaccaatctgggcatggacgagttcaagacggatgaattcctgtcgctttaccatctccgctggggagtggagtgcaaatacaatcttttgaaaaacaagcttgacattgagagcttcagcggacggtcgctacacaccgtcctgcaggatttctgggcaaccatgttccttgccaacatagcggcgggtgccaagcgggacgcggacagcgcaatagaggatgaaatagcggcgggcagcaggaagctgaaatacgaagagtacaaggtaaacgagaatcttttgataggcagcctcaaggacaatttcataatgattctttttgaggatgacggcttgaaacgcactatcctcatgcagaagctcatagacaggatagccagccattgggttcccgtcaggccgggcaggagcttcccccgaaggcctgattcgcacaagaggatagcgaacaggcagaggaaggctctgtaa

SEQ ID NO: 71532 - protein, 417 aa, Unknown
  Obtained from environmental sample
  DOMAIN (116)...(320): Transposase DDE domain
  misc_feature (1)..(417): Xaa is any amino acid
MTKCIYLLANKSNKLFFSKELADAYRSSPGCFTRRRLMGFAEVMGVILNFSKKSLQLELDGFMELLDPSIEKPMTKQAFSKARLNIMPGAFMKLFETNVHAMFEEDFFKRFKGWRVFAIDGTELQLPKHGNNLPGFQHNSAHSLPHARASILCDVLSGFIAHAAIDTTAVGERELALEHLEYFLHFKTANDLVIFDRGYPSKEFIEYLNANGIKYLMRVPKGFSHAADASAERDFTVDVLGTGVRAVKVDLPSGETELLFTNLGMDEFKTDEFLSLYHLRWGVECKYNLLKNKLDIESFSGRSLHTVLQDFWATMFLANIAAGAKRDADSAIEDEIAAGSRKLKYEEYKVNENLLIGSLKDNFIMILFEDDGLKRTILMQKLIDRIASHWVPVRPGRSFPRRPDSHKRIANRQRKAL

SEQ ID NO: 71533 - DNA, 1053 bp, Unknown
  Obtained from environmental sample
  misc_feature (1)..(1053): n is a, c, g, or t
gtggcggaaggaagaggagctgaatggcaccctagccttccccggcaacggcaaagcagccctttccgacagcgagaagcgcatcagggagctggagaagcagctcagggattccgagctggagagagaaatcttaaaaaaagcactgggcattttctcaaggacaccaaaatgaagttccagtttatgaaggaacaacgctccgaatttccggtgttgaaaatgtccaaggtgctaggggtgtctgcaagcggattttaccgctggctcaagcggccgccctcccggacggctgttttccgccggtatctgcgcgagatgatacggaaggcttacgacagccacggcgggatggcaggcagccggacgattgcggcggacttgaaaggttttgggattgaaggtgttagcaggaataggatagcccgcgaaatgagggcgatgggtttgaagtgcaagacaagaagacgcttcgtggcaaccaccgattccagacacagcgagccggtagcccccaacgtgctggataggaatttcaacccgagctcgcccaaccgcgcatgggcaagcgacataacctatctgccggtcaatggcaggtggatttacctcgtggttttcattgacctgttcagccgcaaggttgtcggatgggatttgagcgcgtcgctccatgctgaatcaacgataaaagctttcgagcaagccgtttatctgcgtaatcctccgcaagggcttatcgtccacagcgacagaggaatccagtatgcctccaaaggattccgccagtgcctaagcaaacatgcctgcgtccagagcatgtctaggaaaggcaactgctgggataacgcagtatatgaatccttcttcggcagcctgaaaaaacgattgatatatcataggaaatacgaaacgatggaagatctgagaaaagatatatttcagtatatagaagtttattataacaggtttagaaaacattcttcaaataattacttgacaccggaggaaaaagattctatatttatgaccaacaacaaatatgtggcttaa

SEQ ID NO: 71534 - protein, 350 aa, Unknown
  Obtained from environmental sample
  DOMAIN (180)...(340): Integrase core domain
  misc_feature (1)..(350): Xaa is any amino acid
MAEGRGAEWHPSLPRQRQSSPFRQREAHQGAGEAAQGFRAGERNLKKSTGHFLKDTKMKFQFMKEQRSEFPVLKMSKVLGVSASGFYRWLKRPPSRTAVFRRYLREMIRKAYDSHGGMAGSRTIAADLKGFGIEGVSRNRIAREMRAMGLKCKTRRRFVATTDSRHSEPVAPNVLDRNFNPSSPNRAWASDITYLPVNGRWIYLVVFIDLFSRKVVGWDLSASLHAESTIKAFEQAVYLRNPPQGLIVHSDRGIQYASKGFRQCLSKHACVQSMSRKGNCWDNAVYESFFGSLKKRLIYHRKYETMEDLRKDIFQYIEVYYNRFRKHSSNNYLTPEEKDSIFMTNNKYVA

SEQ ID NO: 71535 - DNA, 309 bp, Unknown
  Obtained from environmental sample
  misc_feature (1)..(309): n is a, c, g, or t
atgactgaagcaaagaagcgcagagtctacaccaaggaattcaagcaagatgctttgaatttatccaagcaacccggttatacagctttttccgctgccaagagccttggcatagacagcaagcaaatataccggtggcggaaggaagaggagctgaatggcaccctagccttccccggcaacggcaaagcagccctttccgacagcgagaagcgcatcagggagctggagaagcagctcagggattccgagctggagagagaaatcttaaaaaaagcactgggcattttctcaaggacaccaaaatga

SEQ ID NO: 71536 - protein, 102 aa, Unknown; identical to SEQ ID NO: 62796
  Obtained from environmental sample
  DOMAIN (7)...(90): Transposase
  misc_feature (1)..(102): Xaa is any amino acid

SEQ ID NO: 71537 - DNA, 486 bp, Unknown
  Obtained from environmental sample
  misc_feature (1)..(486): n is a, c, g, or t
ttgtggcttaacttagaatacttttttttcgggccggttcaaggtaatatgcgttacttactagacacgaatgtctttatattttacgcccaaggcggtgaaagtttagacagagacacaaccgccatatttggcgactacgaaaacataatttacgtaagtgccgaagtagtaaaagaaacaatgcacttaataaggcaaaagaaaatagacgtaaaacattggaaaaccccaaacgacatttggaaatctattagtgaatggggttttgtcgttgattatgtcaaagaagaacacgtaagaacattaggcaatttatctacggcaaaagaccacaaagacccaaccgaccacataatcatagcacaagcaataacaaacaaaatgcccgtaatcagtagcgacagccaattcaggcattacaaaggacagggattgagtttggttttcaacaacgcccacgagaggaataagatagcgaggtag

SEQ ID NO: 71538 - protein, 161 aa, Unknown
  Obtained from environmental sample
  DOMAIN (19)...(146): PIN domain
  misc_feature (1)..(161): Xaa is any amino acid
MWLNLEYFFFGPVQGNMRYLLDTNVFIFYAQGGESLDRDTTAIFGDYENIIYVSAEVVKETMHLIRQKKIDVKHWKTPNDIWKSISEWGFVVDYVKEEHVRTLGNLSTAKDHKDPTDHIIIAQAITNKMPVISSDSQFRHYKGQGLSLVFNNAHERNKIAR

SEQ ID NO: 71539 - DNA, 1020 bp, Unknown
  Obtained from environmental sample
  misc_feature (1)..(1020): n is a, c, g, or t
atgaaaacaatctttgtggtagatgacagcgacactaatctttccaccgcggaaaaagctttggaaaaactgtatagagttatgacaataccctccgcagtgaaaatgttttctttattggaaaaagtgactcccaatcttatacttttagacattgaaatgcctgatattaacggatttaccgctcttgaaaaattaaaatccaataacttatgggcgaacattccggttgtttttttaacgggacgctcggatacggatgtagaagtacgcggttttcaaaagggagcagtggattttattttaaaacctttttccgaacctgtgctgttaaatcgtatcagaacccaccttaatattgatgaattaatccgcgaacggtcgtctcagttaaacaggcttcagaacggcattgtctcggttctggcaaatttagtcgagagcagagacaaggatacaggcggtcacattgaacgtacgtcggcttacattaaaattttacttacggaaatgaaaaaacgcggggtttataaagagataatttcagattgggatacggaaaaaattatcgcttccgcgcgtatgcatgatttgggaaagatttccataacggatttaatcgtaaacaaacccggtaaacttaccgaagaagagtatgaaatcatgaaaacccacgccgcggagggagagcgtataatcgacagaattatcgcgcagacaggcgggggcgaattcttgtataacgcgagattgtttgccggaagtcaccatgaacgatgggacggaacaggctatccgcaaaggcttaaaggcgaagatattcctctgcagggacgtattatggcgattgtagacgtgtacgacgctcttctttccgagcgtccgtataaaaaagcgttttcagacgaagaggctgttaaaattatcatggaaaattccgggacgcattatgatcctaaaatagcggaagtattttttgatataaaagacctttttaaagaagtaagggcgagtatttaa

SEQ ID NO: 71540 - protein, 339 aa, Unknown
  Obtained from environmental sample
  DOMAIN (153)...(290): HD domain
  misc_feature (1)..(339): Xaa is any amino acid
MKTIFVVDDSDTNLSTAEKALEKLYRVMTIPSAVKMFSLLEKVTPNLILLDIEMPDINGFTALEKLKSNNLWANIPVVFLTGRSDTDVEVRGFQKGAVDFILKPFSEPVLLNRIRTHLNIDELIRERSSQLNRLQNGIVSVLANLVESRDKDTGGHIERTSAYIKILLTEMKKRGVYKEIISDWDTEKIIASARMHDLGKISITDLIVNKPGKLTEEEYEIMKTHAAEGERIIDRIIAQTGGGEFLYNARLFAGSHHERWDGTGYPQRLKGEDIPLQGRIMAIVDVYDALLSERPYKKAFSDEEAVKIIMENSGTHYDPKIAEVFFDIKDLFKEVRASI

SEQ ID NO: 71541 - DNA, 2043 bp, Unknown
  Obtained from environmental sample
  misc_feature (1)..(2043): n is a, c, g, or t
atggatttggaacaagaagaggctctttatgaatttctcgaaaacgtaagcgaaccgtttactttggaagatattacagattgtatacaggtatcgggacataaacagaaaaaacggctgataatagaaataggcgcttaccttgacgcgcggaaaatcgccttcagaaaagacaataaacattgggtatcgcgtaaaacatgttttgaacctgccttgtttgttattactccatctcgtctggaattgttaaatgggattttaattcccggtcatcgctgcgttccgttcgctaatccgctgacccttcctcatcgttataagtttttttggaaaggagaacctatacctgtctcaaccacggaagcgccgcctgaggatttgtatccttattactgcgtttacggcgaggaattcgcgccgcagtatatcgcaagagacaacccggaaaacgaagaatcttttaacgccgatccttacgaagatccgcctgaggtatcaatacatacgctggatatgcgcggcatttaccgcgagtgcgcttttgtaccgggggatcgttttaaggtcagcactctcaactggaatgaatgtaagtttgaattggaaaaaataggaaaggacgattggccgcgcgccgatttagataagtggcaaaaagcggcggaaagcggttttgaaaacagttttgcaatacttggtcccggagcaagcaccgaagaacagattgcctttgcgtattggtacggcggcgagcgcatgagggaaattcccgcttattctttggaagaatttttatatgaaaaaacaaaccggatagataccgtgccttacggcatagaaacgcgcttttggtttgccggcagggaaattcccgacagcgcgaatcttcaaaattatacggttccgcccgacagaacgttcatcgaagaattgctttatgaaaaaaatatacctatttccgaatttgtaattctttcatatataagggattctttttatcgtaatgaaaaacatgttgatcttgtaattaatcgtttgattcctcctcttatccatcttgaggaagccgaatgggatatattggcggattatatcagcgacagtatggatgatttttacaaaggatactcagtatttttggatcagggagcaggtcctgtccgccagcgggtcgcggagcttcataccgccgtcatagaactttccgcaaaattgcaaaagggcgaaatagaagccgcatggcttccgcggcacacatttatcgtactttcgcaaattcaagggcacgcggcggctttactggaagaccttgcgtttgacgaagccccttcggaatccgacattgcggcgatggataacgcgttggacagcatgatagacacatttaccgacattaaagaattgataaataacgccatggataatttcagaagaagcaatcttacgttgattcaaggcgggaaaacatcctcgcaatcaaaaactcaatcatggcgcatgatacaaatcagcatttccgggcttgaagtttggcggcgagctattatttcgcataaatgcactatggaagaacttcaccagttaattcaaattggcatgaattggaacgggaatttacgtttccgtttttattatgaaacaccagacggaaacaaagaatatttgcacgataaagttaagttaggcgacattaattttcaaggcaaaaaagagctgatctacgaatacggctcaaaatggaatgtaaaagtgataataatgtcgtcgtaccagcccgcaaacaacgaagttacgcgctttattgcgggtgacggagccgcccctcccgatcacgttgacggacctcgtcatttcagaaaattgctttattcgctggagattggcggcaacgcggaaaaacattcggcgcagagcgagttgggaacggattttgtgccgggcgtttttaacctcgataaaatgaaccaaaaattaaaagaaatttttaaaggagaggaaactgaaacctcaaaagaaaatttgtccaacaataatgaataa

SEQ ID NO: 71542 - protein, 680 aa, Unknown
  Obtained from environmental sample
  DOMAIN (495)...(656): Plasmid pRiA4b ORF-3-like protein
  misc_feature (1)..(680): Xaa is any amino acid
MDLEQEEALYEFLENVSEPFTLEDITDCIQVSGHKQKKRLIIEIGAYLDARKIAFRKDNKHWVSRKTCFEPALFVITPSRLELLNGILIPGHRCVPFANPLTLPHRYKFFWKGEPIPVSTTEAPPEDLYPYYCVYGEEFAPQYIARDNPENEESFNADPYEDPPEVSIHTLDMRGIYRECAFVPGDRFKVSTLNWNECKFELEKIGKDDWPRADLDKWQKAAESGFENSFAILGPGASTEEQIAFAYWYGGERMREIPAYSLEEFLYEKTNRIDTVPYGIETRFWFAGREIPDSANLQNYTVPPDRTFIEELLYEKNIPISEFVILSYIRDSFYRNEKHVDLVINRLIPPLIHLEEAEWDILADYISDSMDDFYKGYSVFLDQGAGPVRQRVAELHTAVIELSAKLQKGEIEAAWLPRHTFIVLSQIQGHAAALLEDLAFDEAPSESDIAAMDNALDSMIDTFTDIKELINNAMDNFRRSNLTLIQGGKTSSQSKTQSWRMIQISISGLEVWRRAIISHKCTMEELHQLIQIGMNWNGNLRFRFYYETPDGNKEYLHDKVKLGDINFQGKKELIYEYGSKWNVKVIIMSSYQPANNEVTRFIAGDGAAPPDHVDGPRHFRKLLYSLEIGGNAEKHSAQSELGTDFVPGVFNLDKMNQKLKEIFKGEETETSKENLSNNNE

SEQ ID NO: 71543 - DNA, 801 bp, Unknown
  Obtained from environmental sample
  misc_feature (1)..(801): n is a, c, g, or t
atgaaatacggttattttgattctgaaaaacgcgaatatgttatcgataagcctgatacacccgctccctgggcaaattacctcggttctcccgcttacggagcgattatttccaacaatgccggcggctacagctttgtaaaaagcggtgcggctggcagattgatccgctaccgttttaacgagcaggatcgaccggggcgatacatctacttacgcgacgatgaagacggcgattactggtctgcctcatggcagcctgtaggcaagccgcttaatcagtacaagtcgatatgccgtcatgggacgggctacactttattggaagccgattacaaagacatacattccgaggtctactactatgtgccgcatggcgcaaattatgaggtgtgggggcttaaaattgtcaataaaggggccaaggcgaggaaaatatcggtctttggttttgttgaatttacctgcgaaagtttttatgagcaggatcaggttaatcttcaatatacccaatttattacccgtacttattttaaggaaaaatttatcttgcaaaccataaacaagaattgccttaacgccgtcaacgaaagccgcgtacaaacgcgcttcttcagtcttgcaagggcgaatgttgcaagttactgcggcgaccgccctaaattcctgggcaattaccatgactacagaaatcccgtctccgtagaaaatggcaaacttgacggcactctcaactacaacatgaacccctgcggcgctttgcacacaaccctcgaacttgaacccggcaaaaacgcctag

SEQ ID NO: 71544 - protein, 266 aa, Unknown
  Obtained from environmental sample
  DOMAIN (194)...(266): Glycosyltransferase 36 associated family
  misc_feature (1)..(266): Xaa is any amino acid
MKYGYFDSEKREYVIDKPDTPAPWANYLGSPAYGAIISNNAGGYSFVKSGAAGRLIRYRFNEQDRPGRYIYLRDDEDGDYWSASWQPVGKPLNQYKSICRHGTGYTLLEADYKDIHSEVYYYVPHGANYEVWGLKIVNKGAKARKISVFGFVEFTCESFYEQDQVNLQYTQFITRTYFKEKFILQTINKNCLNAVNESRVQTRFFSLARANVASYCGDRPKFLGNYHDYRNPVSVENGKLDGTLNYNMNPCGALHTTLELEPGKNA

SEQ ID NO: 71545 - DNA, 492 bp, Unknown
  Obtained from environmental sample
  misc_feature (1)..(492): n is a, c, g, or t
atgttcactatacaattttccaacagaccgcccgacgattttatcgaaattatggggcgcatattagacgcaaatgttaattccaaaaaacgcaaagacgaccgcgttccgttaacacccgataatcttcgcaaattaaatatgacatcaacggaaacggtggtttttatagagaatgttccgcgcagatgtatattaagagacctttctttttccggttccaaggtgataatgctcggcgttcccaaatttcttcttgataaagaaggatcgttgcgtttggaatttaacgatccaagaatttcttacacgattaagggaaaatttatccgcgctgaagctgtagaagggaaaaaagaaatggtagctctgggtataaattttgacgaagccacggttcctatgggttttaaaatacgccttaatgatatgctgacttcagtacgcgccgatttccactccgcggaagatggtaacgctcccaaatcatga

SEQ ID NO: 71546 - protein, 163 aa, Unknown
  Obtained from environmental sample
  DOMAIN (29)...(147): PilZ domain
  misc_feature (1)..(163): Xaa is any amino acid
MFTIQFSNRPPDDFIEIMGRILDANVNSKKRKDDRVPLTPDNLRKLNMTSTETVVFIENVPRRCILRDLSFSGSKVIMLGVPKFLLDKEGSLRLEFNDPRISYTIKGKFIRAEAVEGKKEMVALGINFDEATVPMGFKIRLNDMLTSVRADFHSAEDGNAPKS

SEQ ID NO: 71547 - DNA, 2361 bp, Unknown
  Obtained from environmental sample
  misc_feature (1)..(2361): n is a, c, g, or t
atgtcagatcaatctgtaatacctatagatcaactgcttccccataaattgcctcttgtcgctctcttggggcgtcctatttttccggggatttttacgcccattataatcggcaatcccgccgatgtgcaggttgtggaagaagccaattcaggcgacgggcttatcgggcttgttatgctgttaaacgaaaccgaaacaccctcaattaccgatttatacactgtagggactgccgcaaaaatagtaaagaaaattaatctgcccgacggcggagttaacatatttatttctacattaaaaaggttttctgtaaaaaagacgattaatccgtctaatccgattgtcgccgtggttgagtaccttgaagaagaagaggacaatacaagggaagtaaaggctcttacgcgcgctcttctttccgagatgaaacagataagcgaaaacagtccgttgttttccgaagaaatgcggcttaatatgatcaatattgatcatccgggaaaaattgcggattttatagcgagtattcttaatatcgataaaaccgaacagcagaaaatccttgagatactgaatgtgcgaaaacgcatggaacaggttttggtttttataaaaaaagaacaggaacttttgcgtattcaaaaaaagatacaaagagaaataaacgagaaaatagaaaaatcacagcgtgattatttcttaaaagaagaacttaaagcgataaaaaccgagttgggcatgacaacagacgctaaaagctccgaccaccagcgttttaaagaaaaatttgacgcttttaaatttgagggcgaagtaaaagaagttgtcgaacaggaaatggaaaaattttcgcttattgagcctaattccgcagaattcaccgttacacgcaactacttggacgttattgccgctctcccttggaatgatccagctcctgaagaatttgagcttaaaaaagcgcaggagattttggaagaagatcattacggacttaaagatgtaaaattgcgaattgttgagtatttagcggtgcgaaaactgcgtaaagatacaaaaggctctattgtctgccttgtaggtccgcccggagtgggaaaaacttccgttggtaaatcaatcgcaagggctcttggcaagcagttcttccggttttctgtgggcggaatgagggacgaggctgaaattaaggggcacagacgcacatatatcggagcgatgccggggaaaattattcagggactgaaaattgtcaaaactaaagcccctgtttttatgatagatgaaattgataaaatgggcgcgagttttcagggtgatcccgcaagcgctcttttggaagtgcttgatcccgagcaaaataattcttttagagaccattaccttgatttgccctttgatatttccaatgtgttttttatcgttacggcgaatacattggatacaattcccgttccgttaatggatcgtatggaaattattcagcttcccggttacatcgacactgaaaaactggaaatcgctaatcgttatcttctgccgaagagtcttgaaaagaacggtcttaaaaagaatcaagttaaatacacaaaagacagcctattgcatatagcgaattgttacgcgcgggaggcgggcgttcgcaactttgaaaaaaatctcgacaagatacaccgcaaacttgcaaaacagattgtagacgcgcaggaaaagaacgaagaaaacgctctgcgttttaacattgataaaaaactgatagaaaaacatttaggcaaacctattttccgcgaggacgatattaaaacagcggataaacccggtatgtcggtgggtcttgcctggacaagcatgggcggagacacgctggtaattgaagcgacatcgcttcccggcaaagagggattaacgctgacaggcaaaatgggcgacacaatgaaagagagcgccgaaatcgccatgactgtcgcgcgcaaaatggcggtggaaaaatataacgttgaaaaagaatggtttgataaaaaccatattcacttgcacataccggaaggcgcgacgcccaaagacggtccttcagccggcattacaatggcagtggcgcttctttcgcttatgcgaaataaagtaatcacgcacaaactggtaatgacaggcgaactttcgctgacaggtcatgtactgccaatcggcggcttaaaagaaaaaacaatcgccgcaagaagaaataaagcaaaacacatcatattcccaaaacaaaacgaacgcgatttagacgagatacccgatcatgtaaaaaaaggaatagagttccaccccgtagaacgctttgaggaagtactggcgctggcgttgccggaatga

SEQ ID NO: 71548 - protein, 786 aa, Unknown
  Obtained from environmental sample
  DOMAIN (358)...(494): ATPase family associated with various cellular activities (AAA)
  misc_feature (1)..(786): Xaa is any amino acid
MSDQSVIPIDQLLPHKLPLVALLGRPIFPGIFTPIIIGNPADVQVVEEANSGDGLIGLVMLLNETETPSITDLYTVGTAAKIVKKINLPDGGVNIFISTLKRFSVKKTINPSNPIVAVVEYLEEEEDNTREVKALTRALLSEMKQISENSPLFSEEMRLNMINIDHPGKIADFIASILNIDKTEQQKILEILNVRKRMEQVLVFIKKEQELLRIQKKIQREINEKIEKSQRDYFLKEELKAIKTELGMTTDAKSSDHQRFKEKFDAFKFEGEVKEVVEQEMEKFSLIEPNSAEFTVTRNYLDVIAALPWNDPAPEEFELKKAQEILEEDHYGLKDVKLRIVEYLAVRKLRKDTKGSIVCLVGPPGVGKTSVGKSIARALGKQFFRFSVGGMRDEAEIKGHRRTYIGAMPGKIIQGLKIVKTKAPVFMIDEIDKMGASFQGDPASALLEVLDPEQNNSFRDHYLDLPFDISNVFFIVTANTLDTIPVPLMDRMEIIQLPGYIDTEKLEIANRYLLPKSLEKNGLKKNQVKYTKDSLLHIANCYAREAGVRNFEKNLDKIHRKLAKQIVDAQEKNEENALRFNIDKKLIEKHLGKPIFREDDIKTADKPGMSVGLAWTSMGGDTLVIEATSLPGKEGLTLTGKMGDTMKESAEIAMTVARKMAVEKYNVEKEWFDKNHIHLHIPEGATPKDGPSAGITMAVALLSLMRNKVITHKLVMTGELSLTGHVLPIGGLKEKTIAARRNKAKHIIFPKQNERDLDEIPDHVKKGIEFHPVERFEEVLALALPE

SEQ ID NO: 71549 - DNA, 1017 bp, Unknown
  Obtained from environmental sample
  misc_feature (1)..(1017): n is a, c, g, or t
atgatcgaacttgacggaacagataacaaagctaaactcggcgctaacgcgatccttggcgtatcaatggcgaccgcccgcgccgcagcggaattcctcggcgttccgctctacaaatacttgggcactttccatgcgagtcttatgcccgttccaatggcgaatattattaacggcggcaagcactccgataacaaaattgactttcaggaatttatggtcatgcccgtcggtgcggagtccatcagggaagctgttcgctggacagccgaaatttttcataacctgaaaaatattcttcacgccgcaaacaagaataccgcggtaggcgacgagggcggttttgcgcctgacatcggaaacgaggaagcgcttgaatacataatgaaagcgattgaaaaagcaggatacaaacccggcgagcagatagcgatagccatggattgcgcctcttccgaacttttcggggaaggcggcaagaaaggctacaaattctggaaatcaaatcccgataaacttttctccgccgatgaaatgatcgaaatgtacaccaaatgggtgaataagtatcccattatttcgattgaagacccgcttgatcaggatgattgggatggttatgtgaaaatgacaaagagtctcgggtcaaaaatacagattgtaggcgatgatttctttgttaccaatacaaagaggctggagaaaggaatcaacatgggtgcgtgtaactcaattttgattaaagtgaatcagattggtactgtaaccgaaacctacgaagcggttgaaatggcgaagaaagcgggctacacagcgattgtttcccaccgctcaggcgaaacggaagacagctttatcgccgaccttgttgtcgctcttgaaaccggacagattaaaacaggttcaatgagccgcacagatcgtatttgcaaatacaaccaacttatgagaattgaagatgagttgcagggtatcagccaatacgcgggtcgcaaagctttctatagtattggttaa

SEQ ID NO: 71550 - protein, 338 aa, Unknown
  Obtained from environmental sample
  DOMAIN (46)...(337): Enolase, C-terminal TIM barrel domain
  misc_feature (1)..(338): Xaa is any amino acid
MIELDGTDNKAKLGANAILGVSMATARAAAEFLGVPLYKYLGTFHASLMPVPMANIINGGKHSDNKIDFQEFMVMPVGAESIREAVRWTAEIFHNLKNILHAANKNTAVGDEGGFAPDIGNEEALEYIMKAIEKAGYKPGEQIAIAMDCASSELFGEGGKKGYKFWKSNPDKLFSADEMIEMYTKWVNKYPIISIEDPLDQDDWDGYVKMTKSLGSKIQIVGDDFFVTNTKRLEKGINMGACNSILIKVNQIGTVTETYEAVEMAKKAGYTAIVSHRSGETEDSFIADLVVALETGQIKTGSMSRTDRICKYNQLMRIEDELQGISQYAGRKAFYSIG

SEQ ID NO: 71551 - DNA, 615 bp, Unknown
  Obtained from environmental sample
  misc_feature (1)..(615): n is a, c, g, or t
atggggcttatgcacgccgcggaaaaattcgactataaaaagaacgtgcgtttctgtacatacgctggctggtgggttcgtcagttcataatccgctatctggccaataaacaccgcatggtcaggctgcctcaccggaaagaagagatgctccgcaaggtacagcggacataccacagcctcagccagactctgatgcaccagccccggacagaagaaattgccagtgaattgggaataccggtaaaagacattgattttattcttaatatgagctacggcatcctgccattggaaattgataacggcaaggacgactacgccacaacaatggaaatccatgaagactacacttattgccctgaacgcaaccttttccggcaattttaccgtgagagcgcgaggcgctgccttgacaagctgaaagacagggaaaagaaggtgatttcttaccgctaccagcttgaagatgacaaacaatatacattcaaggaaatcggcgccaaaatggacttatccccggaaatggtacgccagatagaactgaaagccctggcaaaaatccgccaccacgcgaacgagttgtattataacgactaccaggaagccatgtaa

SEQ ID NO: 71552 - protein, 204 aa, Unknown
  Obtained from environmental sample
  DOMAIN (44)...(125): Sigma-70 region 3
  misc_feature (1)..(204): Xaa is any amino acid
MGLMHAAEKFDYKKNVRFCTYAGWWVRQFIIRYLANKHRMVRLPHRKEEMLRKVQRTYHSLSQTLMHQPRTEEIASELGIPVKDIDFILNMSYGILPLEIDNGKDDYATTMEIHEDYTYCPERNLFRQFYRESARRCLDKLKDREKKVISYRYQLEDDKQYTFKEIGAKMDLSPEMVRQIELKALAKIRHHANELYYNDYQEAM

SEQ ID NO: 71553 - DNA, 2298 bp, Unknown
  Obtained from environmental sample
  misc_feature (1)..(2298): n is a, c, g, or t
atgctgcggctgacgcgttaccgttacaacaatgtccccgccgacgcgggcggacgttatttttatctgcgcgacgagggcgatgtatggactccttcatggatgccgatgaaatccgatctttcccgctacgagtgccgtcacggaatgggctattcgcgaatttcctcggcgcgtaacgggttggttttttctcaggtttcatttgtgccgttacgcgacaagtgcgaaatccataaaattaccctaaccaatgaatcaaatgttgataaacgtatagatatgttttcttttatcgaattttgtttatggaacgccaacgacgatatgaccaacttccagcgtaatttcagtatcggcgaggttgaggttgacggttcgcgcatttatcacaagaccgagtaccgcgagcggcgcaatcattacgcggtgtgggcggtaaatgttcccgtcgagggctttgacacggacaggcagacattccttggtctttacaacggttttgatcaccctcaggcagtttttgcgggagagtcaaaaaactccgtcgcctccggttgggctcctatcggctctcaccacatcaaggcgcggctttcgccgggcgagtctaaaacttttgtttttgttcttggttactgtgaaaatcccgaagatcaaaaatgggaaaagcagggagtaataaataaaaaaccggctaatacgcttcttgaaaaatacggaacgcccgaagccgcggacaaagctcttgccgcgcttaacgaatactggaaagaacttttggggcgtttcaccgtggaagcggaagataaaaaaatggcgcgtatggcgggcgtttggaatcagtaccagtgcatggtgacatttaacatgtcgcgcagcgcgtcttattttgaatctggaatcgggcgcggcatgggtttccgcgattcaaatcaggatttactgggctttgttcatcttgttcccggacgcgcccgcgcccgcattttggacatagcggcgacacagttccccgacggcagcgcgtatcatcagtatcagccgcttacaaagcgcggcaataacgagattggttcaggctttaacgacgatcctctttggctcatctgcggagcggcggcgtacatcaaagagacgggcgattacagcatacttaatgaaaaagtgcctttcgataacaacgatgagttagctgacacgctctttattcatcttaaacgctcattttattacaccgtaacgcacaccggaccgcacggtttaccgttaatcggacgcgccgactggaacgactgtttaaatcttaactgcttttccaaaactcccggcgaatcttttcagacaaccgccaattatgaaagcggcgttgcggaatcagttttaatagcggcaattttcgtatttgtcggtcctgactttgttgaaatttgcaaaaggacaggtcgtaccgaagaagcacagcgcgccgaaaaagccattgccgacatgattgaggcgattaaaacgcacggctgggacgggaaatggttccttcgcgcttatgacgcgtacggtaaaaaaatcggaagccgcgagtgcgaggacggaaaaatatttatcgaatccaacggcttcgcggtaatggcggacataggcattaaagacggacgcgcgcaaaaagcgcttgattcggtaaaagaacagcttgacactaaatacggcattgtcctgttacagccggcgtacaaagattatcatcttgagttaggtgaagtttcttcctatccgccaggatacaaagagaacgccggaattttctgccacaataacccatggattacgatagcggaaacaaggctgggcagaggaacccgcgcgtttgagacctacacaaaaatttgccccgcctaccgcgaagaagacagcgacttgcgcaaaatggagccgtatgtatacgcgcaaatggtagccggcaaggatgcggttaatcacggcgaggcaaaaaattcatggcttaccggaaccgcggcgtggacatttgtaagtatttcgcagtatattctcggaatacgccccgtctttgacggtcttttgatagacccgtgcattccttctgatatgaaaggcttcacagttacccgtcatttccgaaacgctgattatcacatcacggtaaataacagcgccggcgtggaaaaaggagtaaagtccataacgattgacggcaaaccaatggaaggcgaatggttaaagaacgcggtaataccgacatttaacgacgagaaagtgcataatattgatgtggtgatgggttag

SEQ ID NO: 71554 - protein, 765 aa, Unknown
  Obtained from environmental sample
  DOMAIN (131)...(219): Glycosyltransferase 36 associated family
  misc_feature (1)..(765): Xaa is any amino acid
MLRLTRYRYNNVPADAGGRYFYLRDEGDVWTPSWMPMKSDLSRYECRHGMGYSRISSARNGLVFSQVSFVPLRDKCEIHKITLTNESNVDKRIDMFSFIEFCLWNANDDMTNFQRNFSIGEVEVDGSRIYHKTEYRERRNHYAVWAVNVPVEGFDTDRQTFLGLYNGFDHPQAVFAGESKNSVASGWAPIGSHHIKARLSPGESKTFVFVLGYCENPEDQKWEKQGVINKKPANTLLEKYGTPEAADKALAALNEYWKELLGRFTVEAEDKKMARMAGVWNQYQCMVTFNMSRSASYFESGIGRGMGFRDSNQDLLGFVHLVPGRARARILDIAATQFPDGSAYHQYQPLTKRGNNEIGSGFNDDPLWLICGAAAYIKETGDYSILNEKVPFDNNDELADTLFIHLKRSFYYTVTHTGPHGLPLIGRADWNDCLNLNCFSKTPGESFQTTANYESGVAESVLIAAIFVFVGPDFVEICKRTGRTEEAQRAEKAIADMIEAIKTHGWDGKWFLRAYDAYGKKIGSRECEDGKIFIESNGFAVMADIGIKDGRAQKALDSVKEQLDTKYGIVLLQPAYKDYHLELGEVSSYPPGYKENAGIFCHNNPWITIAETRLGRGTRAFETYTKICPAYREEDSDLRKMEPYVYAQMVAGKDAVNHGEAKNSWLTGTAAWTFVSISQYILGIRPVFDGLLIDPCIPSDMKGFTVTRHFRNADYHITVNNSAGVEKGVKSITIDGKPMEGEWLKNAVIPTFNDEKVHNIDVVMG

SEQ ID NO: 71555 - DNA, 558 bp, Unknown
  Obtained from environmental sample
  misc_feature (1)..(558): n is a, c, g, or t
atggtaataaacaatgttatacccatagtttttattttgattccggtaatggcttcttctgtcatggcgtcaggctcttttgtgggtgagaaagaaaaatctacgctggaaacgctgttatactgtccgttatcgttaaaaaagatttttcacgcgaaaatactggcttcttttctgttgagtatggctgtgtccgtcttttcttttatcatcatgataattgtaacagaaacagtattttttgctttaactgaatcgttaataacactcaatataaattggataattatactgctgttggtttctccggcggcggcgataatttccattaatcttatagtgcaaaattccgcaaaagcgcagtcttccgaagaagcgcagcagagcagtctgtttttagtactacctgttatgttattggttgtcggtcagtttacgggaataatgatgatcagcgtaaaactctttttatcaatagctgcggtattagcggtaattgccgcactgacattcaaaggctcatttagaaaatttaattacgaagctttattacgctaa

SEQ ID NO: 71556 - protein, 185 aa, Unknown
  Obtained from environmental sample
  SIGNAL (1)...(23)
  misc_feature (1)..(185): Xaa is any amino acid
MVINNVIPIVFILIPVMASSVMASGSFVGEKEKSTLETLLYCPLSLKKIFHAKILASFLLSMAVSVFSFIIMIIVTETVFFALTESLITLNINWIIILLLVSPAAAIISINLIVQNSAKAQSSEEAQQSSLFLVLPVMLLVVGQFTGIMMISVKLFLSIAAVLAVIAALTFKGSFRKFNYEALLR

SEQ ID NO: 71557 - DNA, 843 bp, Unknown
  Obtained from environmental sample
  misc_feature (1)..(843): n is a, c, g, or t
atggcgatttttcccgtgcttaaaagcgctttaaccataatgattcctatatttttcgccgccttcggcggacttttccccacgctcgccggaacattaaacatcgcccttgaaggattactgctttcaagcgcattttgctctttaacggtttttaattttacaggcagtgtaaccgccgccgtattgtctgctattttaacggcgctcgctttgtcggcgttacattcgttagctgttttcaaacttaaagccgatttatttatttcaggtctagcgataaatttgttctcaagcggtttatgcgtagttctttcggaaaaaatattcggcacaaagggagtagtcacggcgaataacgtaagcggtttattaatatggtatgtgattttgggaataattttgctgataatttcacatatagcgatttacaaaaccccattcggttacaggcttcgagcctgcgaaaaaaacgccgccgctcttgtttcacttggaataaaacccgtattctaccaaacagcggcgtttttaatatcaggttttttctgcggcataggcggctcgtttttaagcttaaatctgggagcgtttgtccccggaatgtccgcaggcaaaggctggatcgccctcgccgtaattttcctcggcgtaaaaaaaccgataggcattcttgccgccgctttcgttttcgccctagccgaatgtttttcgaactacgcacaaggcttttggcaaataccggctggctttattttggcgttcccgtatatttgtacattgattgcgataatagttgtgtcggttattccttcttataccgcaaagcggacgagtaaataa

SEQ ID NO: 71558 - protein, 280 aa, Unknown
  Obtained from environmental sample
  SIGNAL (1)...(23)
  DOMAIN (6)...(264): Branched-chain amino acid transport system / permease component
  misc_feature (1)..(280): Xaa is any amino acid
MAIFPVLKSALTIMIPIFFAAFGGLFPTLAGTLNIALEGLLLSSAFCSLTVFNFTGSVTAAVLSAILTALALSALHSLAVFKLKADLFISGLAINLFSSGLCVVLSEKIFGTKGVVTANNVSGLLIWYVILGIILLIISHIAIYKTPFGYRLRACEKNAAALVSLGIKPVFYQTAAFLISGFFCGIGGSFLSLNLGAFVPGMSAGKGWIALAVIFLGVKKPIGILAAAFVFALAECFSNYAQGFWQIPAGFILAFPYICTLIAIIVVSVIPSYTAKRTSK

SEQ ID NO: 71559 - DNA, 1035 bp, Unknown
  Obtained from environmental sample
  misc_feature (1)..(1035): n is a, c, g, or t
ttgtatgcagggattgggagcggcgtcatgagaaaaaatgtaattttcatattcgcggtctctcttttaacagttttcctgctaatattcattttaagtgatacgcccgtaaaaactctttatttcttctttttgggaccattcaggaatttatacagctttggcaatatgcttaattccgctgttccgttaattttcggagcgttaggcataataatcgcaatgaaagccggtaaccttaacctaggcggggaagggcaggtgtacttgggcgctttcataacaaccgctgtcgccctttctcttactcgttttggagtaataggagcggttatagccgtggcggcaggcgttctcgcttccgcaagtctttcggcgttcagcggcatttgcaaggcaaaatggaaaacccccgaaattattacaaccttccttctttcatgcgcggttatcccgattgtcaattatttcgttacaggaccattccttgatcctgaaacatcgcttatatcgacaaaaaaaatcgccgagaatatgcggctttcgcttattttaagaccttcaagtttaagctcaggaatatttatcgctcttgtttttgtcattatagtttacttttttctttacaaaacaaagaggggctatgaattcagaatagccggaaaaaatgaaatgttcgcccgttacggcggaataaatacaagactgaacacaattatagcaatggcaatgagcggcgcattatacggatttgccggaagcgtagctgtccttggaacgcattattccgtaataaaagaattttccgcaggtcttggctggagcggattgactgtagcgttaatcgcaggtttttcccccatcgccgtgataccctgcgccctctttcttgcgtggacggaatcaggcgcaagaatagcaatgcagaatacgggaataacctatgaaatctcatacataattcaagctgtaattttctttttatcaacaagcgtagttgttaaaaatatttttgaacgcaaaaggaagggataa

SEQ ID NO: 71560 - protein, 344 aa, Unknown
  Obtained from environmental sample
  DOMAIN (53)...(330): Branched-chain amino acid transport system / permease component
  misc_feature (1)..(344): Xaa is any amino acid
MYAGIGSGVMRKNVIFIFAVSLLTVFLLIFILSDTPVKTLYFFFLGPFRNLYSFGNMLNSAVPLIFGALGIIIAMKAGNLNLGGEGQVYLGAFITTAVALSLTRFGVIGAVIAVAAGVLASASLSAFSGICKAKWKTPEIITTFLLSCAVIPIVNYFVTGPFLDPETSLISTKKIAENMRLSLILRPSSLSSGIFIALVFVIIVYFFLYKTKRGYEFRIAGKNEMFARYGGINTRLNTIIAMAMSGALYGFAGSVAVLGTHYSVIKEFSAGLGWSGLTVALIAGFSPIAVIPCALFLAWTESGARIAMQNTGITYEISYIIQAVIFFLSTSVVVKNIFERKRKG

SEQ ID NO: 71561 - DNA, 1494 bp, Unknown
  Obtained from environmental sample
  misc_feature (1)..(1494): n is a, c, g, or t
atgaatattgttgaattaaggaacataaccaaacagtatcccggaagcggtaaaaaagcaaataataatataagccttgatttgcgcaagggcgaaattctctgcgttgccggcgaaaacggagctgggaagaccacgctgatgaaaattctctgcggcttggaaaaatatgacggcggtgaaatatatataaacggaaatattagcatggttcatcagcattttatgctgtttcccgaatataccgccgccgagaatattgttatggggtttgaacctcgtaaatacggtgttttttttgatgttgaaaaagcgaataaaatatgcgaaaaaataatttcagataacgatttttcgattaaggcggatacaaaggtaaaagatttaactctcggtgaaatgcagcaggtggaaatttgccgtgttttataccatgacgcccaaataattatccttgacgaacctacgtcgatattaacagaacacgaaataaaatcgctttttaaaacgcttaaaacgcttgttaacaacggaaaatcaataattcttataacgcataaattaaacgagattaaacagataagcgaccgtgtagccgttttgcgtaacggacagctaatcgacgtaaaagacgtatcccaaaccgatgaatttgaaatagcgaagatgatgatgggagacgaaaaattgccgccgtcaatatacacaaacggcggcggtaaaaaagacaatgtaatcgaatttgacaatgttacggttaaaagacgcggacaaaaacgcccgttactcgataaagtttctttttcagttaattcaaatgaaatactgggatttgcgggagtcggcgggaacgggcttggagtaattgaggctgttctgggcggctttttgcaccccgccgaaggcaaaatattgcacagaggaaaagatatttccaaacttaacatacgcaaattgcgtaatcagggacttagttttgttcccgccgatagagtaaaggtaggaagcgcggagtccgccacaatcgaagaaaatatgctaatcaacatgagaaataaatatttttcttttaattataaaaatcttacaaagaaacatgaaatcagcgaagaaataaattcatggctaaaaaaatacaatattgaaactcccgacttaaaacaagaagccggcacgttgtcgggcggcaatttgcagaaattaattctggcgagggaattaaatcaatttaaggattatgtcgttttctcggaacccacatgggggcttgatattgcttccgcaagatttataaaaggggaaattgacgccctgcggaaaaaaggagcggcgattattttaatttctaccaatttggacgagattatagaacttgcggacagaataattgtaatgtacaggggaaaaatagccggcgaatttgttaatgatcaaaacaacggtattaaagaactaatcggaaattgtatgcagggattgggagcggcgtcatga

SEQ ID NO: 71562 - protein, 497 aa, Unknown
  Obtained from environmental sample
  DOMAIN (273)...(468): ABC transporter
  misc_feature (1)..(497): Xaa is any amino acid
MNIVELRNITKQYPGSGKKANNNISLDLRKGEILCVAGENGAGKTTLMKILCGLEKYDGGEIYINGNISMVHQHFMLFPEYTAAENIVMGFEPRKYGVFFDVEKANKICEKIISDNDFSIKADTKVKDLTLGEMQQVEICRVLYHDAQIIILDEPTSILTEHEIKSLFKTLKTLVNNGKSIILITHKLNEIKQISDRVAVLRNGQLIDVKDVSQTDEFEIAKMMMGDEKLPPSIYTNGGGKKDNVIEFDNVTVKRRGQKRPLLDKVSFSVNSNEILGFAGVGGNGLGVIEAVLGGFLHPAEGKILHRGKDISKLNIRKLRNQGLSFVPADRVKVGSAESATIEENMLINMRNKYFSFNYKNLTKKHEISEEINSWLKKYNIETPDLKQEAGTLSGGNLQKLILARELNQFKDYVVFSEPTWGLDIASARFIKGEIDALRKKGAAIILISTNLDEIIELADRIIVMYRGKIAGEFVNDQNNGIKELIGNCMQGLGAAS

SEQ ID NO: 71563 - DNA, 987 bp, Unknown
  Obtained from environmental sample
  misc_feature (1)..(987): n is a, c, g, or t
atgaaaaaagcaataatcggtcttttaattgtctcattattttttacagccggctgtacaaagaaaactcaatcaggaaaagacagcctttctgttcttgtttttattaccggagtcattgccggaagcccgacatacgaaatgatggcggaaggcgcgcttgattttgagaagagtcataaaaatgttaccgttaagatatacgaagccggaatgaatcagtctcagtggggtcagcagttaggcgaaatggttgcaggcggcgattatgacgtggttatcggttccaatccgtctttgcctgaaatttgcgccgatgtggcgaagaatttcccgaatcaaaagtttataatagcggacgccgaatacgaaggaaatccgcaaatcagaacatacaattataatcaaagggaacagtcgtattttttgggttatcttgccggtcttgttacaacaagcaatatgccgtacgcaaacagccagaagaaagtcggttttatagcggctcaggagtatcctcttttgacaaggcaaatggttcccggttttcttgaaggggcaaaaaaagctgatcccgccatagagcttgattttcgcgtaataggctcttgggcggacgctaacaaggcgtcggaacttgcctccgcgatgatggaatcgggagttgatgtttttacttcgatagcgggcggagcggcgcaggggcttgtaaaaacagcggcggataaacacgcttatatcgtttggtataatacaaacgcgtataaaatggctccgggtttcatagtaggctgcggtattatggaacagaaaaaacttataatggaaatattggaaaatgttttagccggtaagattcaatacggtatttcagagacaatcggagtaaaagagggttatcttaattttatttacgatgatcccgaatataaaaaccttccggcggatatccgcgaaaaatttgaaaagcttatgaaagatttttaa

SEQ ID NO: 71564 - protein, 328 aa, Unknown
  Obtained from environmental sample
  SIGNAL (1)...(21)
  DOMAIN (6)...(328): Basic membrane protein
  misc_feature (1)..(328): Xaa is any amino acid
MKKAIIGLLIVSLFFTAGCTKKTQSGKDSLSVLVFITGVIAGSPTYEMMAEGALDFEKSHKNVTVKIYEAGMNQSQWGQQLGEMVAGGDYDVVIGSNPSLPEICADVAKNFPNQKFIIADAEYEGNPQIRTYNYNQREQSYFLGYLAGLVTTSNMPYANSQKKVGFIAAQEYPLLTRQMVPGFLEGAKKADPAIELDFRVIGSWADANKASELASAMMESGVDVFTSIAGGAAQGLVKTAADKHAYIVWYNTNAYKMAPGFIVGCGIMEQKKLIMEILENVLAGKIQYGISETIGVKEGYLNFIYDDPEYKNLPADIREKFEKLMKDF

SEQ ID NO: 71565 - DNA, 1065 bp, Unknown
  Obtained from environmental sample
  misc_feature (1)..(1065): n is a, c, g, or t
atgggcggttttgtggacgccggttttttccttccgaaaatactgagtattaaaaatgatgaaattgaattgtataaaaaaacaaaatattttcttggctgtcccgaataccttgcctacgctctcacgggaagcgcgcgcaatgttttcccctgcgacggattcgaccgctggttttggaataacgatgttcttgataaacttgaattggacgcaaataaaatgccctccttcatccgtcccggcgatgcctttgggacaattcttccttctgttgccgatcaattcggcttttcaaaaaacattccggtaatttcaggcggtcccgattttttcgccgccattttgggaagcggagtaacggaagccggacaggcttgcgatcgcacaggttcttcggaaggaatcaatctctgcacgcaaaaccgtattttagataaccggctgatgtcctacggtcaccctgtcaaaccgtattggaatttatcggggattatcaacaccacaggcaagtcgatagattgggcttgcgatttactcggactaaactttgaagattttatcgcgcttgcaggggagagtaaaagcggcagcggcggtttggtttttcttccgtacttagctggtgaacgcgctcccgtttggaatccgtctgtaagcgccgtttggagcggaattaatctgaattcgggacggcgcgagtttgccaattcaatacttgagggcattggttttgcgattagggacgtgctttccgttatggaagaaacaggcgttaaagcaaaacaactatgcgtgacaggaaggcttgccgaatgttcccgccttaatcagataaaggcggacataacagggatagaagtagttgaaggaagtcataaagaggcggaacttcttggacttgccataatcggcagttgttttttaggtaaattcgcatcttacgccgaagcttcgtcaactttctaccatatagaaagaacatttaaacccaatcaggctaataccgagctttacaataatttgttttacgagtataaggatataaggaataaacaattatga

SEQ ID NO: 71566 - protein, 354 aa, Unknown
  Obtained from environmental sample
  DOMAIN (120)...(340): FGGY family of carbohydrate kinases, C-terminal domain
  misc_feature (1)..(354): Xaa is any amino acid
MGGFVDAGFFLPKILSIKNDEIELYKKTKYFLGCPEYLAYALTGSARNVFPCDGFDRWFWNNDVLDKLELDANKMPSFIRPGDAFGTILPSVADQFGFSKNIPVISGGPDFFAAILGSGVTEAGQACDRTGSSEGINLCTQNRILDNRLMSYGHPVKPYWNLSGIINTTGKSIDWACDLLGLNFEDFIALAGESKSGSGGLVFLPYLAGERAPVWNPSVSAVWSGINLNSGRREFANSILEGIGFAIRDVLSVMEETGVKAKQLCVTGRLAECSRLNQIKADITGIEVVEGSHKEAELLGLAIIGSCFLGKFASYAEASSTFYHIERTFKPNQANTELYNNLFYEYKDIRNKQL

SEQ ID NO: 71567 - DNA, 1317 bp, Unknown
  Obtained from environmental sample
  misc_feature (1)..(1317): n is a, c, g, or t
ttgtatttgtcgcgcttttgtcgcgccttgtttgataaagtacaaattggagttattatgtccgctgaatttcaacctgttactgttcacctaaaaaaagacgcgtatatttttgtggaaggaaaccaaaacgccgacaagttttatattgtcaaacatggcgacgtacggattctccgcgaagcgttaaacgatgaaataggaagcgtggtaggacccggagaaatgtttggtttgatttccacaatggctgcgcacggctatattgaatcggcggtagccatgtcaaatgttaccttgctggcggttgaacggaaacaatatggaagccttattcgcaaagtcaatagtgtcgccgtcaacagcgtaaaggctttttctcaaagactgcgggaattggatattgctttctcgcagcgagcgttaaaaaacacagcggcgaccgatcattcgcacatcgttcaaataggcgattattacagaaactcaggcaaactaaaatcggcattgtacgcctacagccgataccttgacctctgccccgacgcgccggataaagaagatattaaagcaaaaatcgccgaaatggaaaactccgttaccgaagtcaggctggaatacgcgtctaacaaaatgctgcagacatatccaaaagaacatctgctttttgccgaaggtgaaagcgggcataccatgtatatcattcaggacggttcggtaaaaataacaaagatcgttgacaataaagaaattatccttgcggttcttggtaaaggcgatattttcggcgaaatggcgctgttggaggataagcctcgcgccgccaccgccgaagtttacgaagactgcacattattggcggttaaccgtgaaaatttttcaaacctaataaaggatcaacccgatatggtagtccgtatggcaaccataatgtctgaacgcatttggctgctctaccgccagcttgacaacacatttataaaagatccgttaggacgcatttatgacgctctgcttatccagcttgaaaaaaaccgtgttgacattaacagcgacgaaccgtatcaatgcagcttcggtattaaggaattaattggtatggcgggtatgccggaatccgagaacaaagaccttgaccgtaaagtcgccggcgacggaaaattgacctttaatgacgataaaatccggataaacaaaatctcagacatactaaaagaatccacattctaccgcagagcgcaaaaaatagccgaaaacaaaaagaaaaataatcaggaaagcatacccatagaaacaattgctgccttgcaattttaa

SEQ ID NO: 71568 - protein, 438 aa, Unknown
  Obtained from environmental sample
  DOMAIN (28)...(117): Cyclic nucleotide-binding domain
  misc_feature (1)..(438): Xaa is any amino acid
MYLSRFCRALFDKVQIGVIMSAEFQPVTVHLKKDAYIFVEGNQNADKFYIVKHGDVRILREALNDEIGSVVGPGEMFGLISTMAAHGYIESAVAMSNVTLLAVERKQYGSLIRKVNSVAVNSVKAFSQRLRELDIAFSQRALKNTAATDHSHIVQIGDYYRNSGKLKSALYAYSRYLDLCPDAPDKEDIKAKIAEMENSVTEVRLEYASNKMLQTYPKEHLLFAEGESGHTMYIIQDGSVKITKIVDNKEIILAVLGKGDIFGEMALLEDKPRAATAEVYEDCTLLAVNRENFSNLIKDQPDMVVRMATIMSERIWLLYRQLDNTFIKDPLGRIYDALLIQLEKNRVDINSDEPYQCSFGIKELIGMAGMPESENKDLDRKVAGDGKLTFNDDKIRINKISDILKESTFYRRAQKIAENKKKNNQESIPIETIAALQF

SEQ ID NO: 71569 - DNA, 2055 bp, Unknown
  Obtained from environmental sample
  misc_feature (1)..(2055): n is a, c, g, or t
atgataaataacgctaaattcagcgaaatacgaagcctcgtaacggtgggaaacagccgtaaattcaaagaaagtcgcagagactcaaacgttcgtttttccatcggcacaaaacttataacaattatttctataatcgtactggtctcgcttggctcaataaccgccctcgtgtcatggctggttcacggagacttgaaagtatccgccgaagaaaacaacttcgaggtgaaccgccgcgccgccgctgaaaccgaacaaactctggaaagaatgcgcctgctctccatgacgttttcccgcacggcgtttcttgtgaaaaacgaaagcataatacaaaaagaagccgattctttttttacccaaaatccgcaaattgccgcccttttatatacaactgccaaatccgcctcattgacaaacaagatatttgtcaacgagcgtttttttcttacacgtggaattgatacaactcttacggaagcttttcttagcgacagcgtaaaagagcgggaaaacgccgttatggggcagacaatactcgtcaacgcctcgccccagtttaacaaagcgcacggttcaacgcctcttgcggctattttttttcccatacaggagggaagcggctgcgttcttttctcaaccgaaaatctgaatgaaagttttggaatgggcgttaacgcttctttcctaataaacgcctcaggagatgttatagtagacgccgacatagaaagggtaaaaactaaaacgaatttgtcggaacaggaaattatcaaacaaatattcagaagccccgacaggaacaaacagatgttagccgaacttgatgttcagctaacgcaagattattcgtcttcttcttctcttttttcttacctgttggataaaatcaataaaaatgacaagcgggaagaaacaaaaaaagtacgccattatcttgcctatacccgtcttagtaccgctggctgcgtcttaatcacaacaatcgaatacgacaaagtttttgaaggcataaatgcgaccacacggcgcaatctctacctgacagccgccattttatttatctcgataatgtgcatctggtttttcgccaaaagcatttccgtaccgcttaaaactctggcggaagcggcgcgtatgatagagggcggcgtttttgacattgaacttcaccccgcaagccgtgatgaaataggcgtattaacgtccagcttcaaaaagatgtgttcagccctgaacattttcggcaagtttaccaaccgtgatattgcggtacaggcaatgcggggggaaattaaacccggcggtttgtcaaaacacgccactgtctttttttcggatattaggggctttaccgaaaaatccgagaactttgtaaaggtattcggaagcgaagcctccgaccgtatcgttttttggcttaacgaatatttatcgaatatggtttattgcgttgaaaagaccaacggcattattgacaaattcatcggggacgccgttatggcgcattggggaacagccaccacttcgggaagcccgcagcaagacgcttttaactgcgttaagtcggcgctgatgatgagggatatgttaaaaaaaatgaacagaaaccggaaagaaggagacatgggagcgccgcctatccgtataggctgcggaatcaacacaggtatagttaccgcagggcagataggctccgatcttcgcatggaatacaccgtcataggcgatcctgttaatctcgcttcccgtgtcgaggcgcttaacaaacctttgggcactgatattcttatcgccgaaaatacatataatctggtaaaaaaatattttattaccgaagaaatgccttcagtaacggtgaaaggaaaagaaaaacctatacgcatctttgccgttgtaaattttaatttttccgctatgaataaacgcccccccgcctcggaacccatgacccttgccgaattgcgtaaaagtttgggaattgaggcaaaggatatttctaaggcgaatatcaacgccgaagagcaaaaatataaaatcggcggtaagtaa

SEQ ID NO: 71570 - protein, 684 aa, Unknown
  Obtained from environmental sample
  DOMAIN (346)...(415): HAMP domain
  misc_feature (1)..(684): Xaa is any amino acid
MINNAKFSEIRSLVTVGNSRKFKESRRDSNVRFSIGTKLITIISIIVLVSLGSITALVSWLVHGDLKVSAEENNFEVNRRAAAETEQTLERMRLLSMTFSRTAFLVKNESIIQKEADSFFTQNPQIAALLYTTAKSASLTNKIFVNERFFLTRGIDTTLTEAFLSDSVKERENAVMGQTILVNASPQFNKAHGSTPLAAIFFPIQEGSGCVLFSTENLNESFGMGVNASFLINASGDVIVDADIERVKTKTNLSEQEIIKQIFRSPDRNKQMLAELDVQLTQDYSSSSSLFSYLLDKINKNDKREETKKVRHYLAYTRLSTAGCVLITTIEYDKVFEGINATTRRNLYLTAAILFISIMCIWFFAKSISVPLKTLAEAARMIEGGVFDIELHPASRDEIGVLTSSFKKMCSALNIFGKFTNRDIAVQAMRGEIKPGGLSKHATVFFSDIRGFTEKSENFVKVFGSEASDRIVFWLNEYLSNMVYCVEKTNGIIDKFIGDAVMAHWGTATTSGSPQQDAFNCVKSALMMRDMLKKMNRNRKEGDMGAPPIRIGCGINTGIVTAGQIGSDLRMEYTVIGDPVNLASRVEALNKPLGTDILIAENTYNLVKKYFITEEMPSVTVKGKEKPIRIFAVVNFNFSAMNKRPPASEPMTLAELRKSLGIEAKDISKANINAEEQKYKIGGK

SEQ ID NO: 71571 - DNA, 1662 bp, Unknown
  Obtained from environmental sample
  misc_feature (1)..(1662): n is a, c, g, or t
atggtaaacgggaaaaaatcgaagggtaaattcaggctcgtagatttacttgttatcctagtctgccttttcggcgcggtctacagcgttaatttattttggtcggacctttttcaaacccttaatggaaaaaataaaacacccatagggaccgttaacgtaaaaaagaatatcgtccaacgccgtatgtcggacagggtagtatgggacaggctgattagggaaacgccggtatattccaatgacctgatccgcgtgggtgataattccgaaatcgaccttcatgtaggcggcaatgaccttacgataaatgaaaatacgcttctccgccttcgttacgaaaaagaaaccggcgaatttcaaattgatcttagctcaggcagtatagggcttgttgcctctcccgaaggcggcggcattgttttgaacgttatgggcaaaaagatgaaagcgaatccgggagccgcccttaacgccgccgccacaaatgacggcgttgctctgcaagtcagcaagggctcggcgctcattgcggaaggaggagaagaacgtgaaattggcgaagggacggcgattgcgatggacagcgaaggctcaatccgctctgaacccgccgtgtttgtcattcagccaaaacctaacgccctttaccgtaaaaacgtcaatgaaccgcttaacgtggttttttcatggaacagaatcaacctacagcccgatgaaaccctgcgccttgaaatatccgaagatcaaaattttatccgttccgtccgtactcttaacggtcttaacgattcggcgaaagcggttcttcccgccggtatttggaattggcggctgacatataacggcgcaatacttaattcggggcgtttcgccatagcggacgcggaggaaattaaattattaagccccgcaagaaaccggcagtttttcacagaaaacgaaccgcctacattgtatttccagtggtcgcaaatggaagatgttttatactacattgcggaagtggacgttacgcccgaattcagaaatcccgttattaaaaaacagataacagacgagtctttttctgattcaagccttgcggaagggctttggtactggcgcgtaacgccggttttttcacaaaccaatgaaggcggcggcgttattgcccctggaacatcatcatttcgtatagttaagaacaaagaaccgcaaacgtcgtctcttgcctttgccgaagaaccgccgcaaacacccgcgaatcctcctcaaatccagaaccaaacgcaggctgtgcccgttccgtttcttcccgctccctcagggcgtcaacctgctaacggataccgtgtaggcatagaagaactgaaaaaaactaatatcaattttagatggtcggcggtacggggggcaaatagttatattttgacgatttatcaggaaaccggcggtgaacggaagcaggttatgcaaatgggaccggaaaaccgcacttcatggtcaacagcaattaaaactcttggacgtggaaattttatttggcgcatagaagcggtaagtgtggggcgcaacaatgtaattgaacagcatggaagccctgcggaaagccgttttgtcatagatattccaagggcaggacccgtaaagataatcagcgagtcaggggttaagccatga

SEQ ID NO: 71572 - protein, 553 aa, Unknown
  Obtained from environmental sample
  misc_feature (1)..(553): Xaa is any amino acid
MVNGKKSKGKFRLVDLLVILVCLFGAVYSVNLFWSDLFQTLNGKNKTPIGTVNVKKNIVQRRMSDRVVWDRLIRETPVYSNDLIRVGDNSEIDLHVGGNDLTINENTLLRLRYEKETGEFQIDLSSGSIGLVASPEGGGIVLNVMGKKMKANPGAALNAAATNDGVALQVSKGSALIAEGGEEREIGEGTAIAMDSEGSIRSEPAVFVIQPKPNALYRKNVNEPLNVVFSWNRINLQPDETLRLEISEDQNFIRSVRTLNGLNDSAKAVLPAGIWNWRLTYNGAILNSGRFAIADAEEIKLLSPARNRQFFTENEPPTLYFQWSQMEDVLYYIAEVDVTPEFRNPVIKKQITDESFSDSSLAEGLWYWRVTPVFSQTNEGGGVIAPGTSSFRIVKNKEPQTSSLAFAEEPPQTPANPPQIQNQTQAVPVPFLPAPSGRQPANGYRVGIEELKKTNINFRWSAVRGANSYILTIYQETGGERKQVMQMGPENRTSWSTAIKTLGRGNFIWRIEAVSVGRNNVIEQHGSPAESRFVIDIPRAGPVKIISESGVKP

SEQ ID NO: 71573 - DNA, 321 bp, Unknown
  Obtained from environmental sample
  misc_feature (1)..(321): n is a, c, g, or t
atggatatgaaagcaacttttgggaaaaatttaaaattttaccgtaaggctaaaaaattatctcaagaccaactgtctgaaaaagtagacatatctgttaagcatttaagttccatcgaaagaggattaacattcgtttccgctgatttacttgagaaactcgcaatttccgttgatgtcccggttttttatttttttgtaaacgagaatgatgtattttgtaatgatgtgatgttgaatacagtagatagaattattgagaataatttattaaacataattaaaaaaataaaattagatatacgaaaaaataaaagttaa

SEQ ID NO: 71574 - protein, 106 aa, Unknown
  Obtained from environmental sample
  DOMAIN (11)...(65): Helix-turn-helix
  misc_feature (1)..(106): Xaa is any amino acid
MDMKATFGKNLKFYRKAKKLSQDQLSEKVDISVKHLSSIERGLTFVSADLLEKLAISVDVPVFYFFVNENDVFCNDVMLNTVDRIIENNLLNIIKKIKLDIRKNKS

SEQ ID NO: 71575 - DNA, 1005 bp, Unknown
  Obtained from environmental sample
  misc_feature (1)..(1005): n is a, c, g, or t
atggaagcaaaaataaagaaatctatcgaattattgataaatcacatcaaacagttaatttctgtagatgccaagaaattggagtacattattgccgctcaaatagcgggcggtcatgtcattttggcggactcgcacggggtgggaaaaacctctctcgcgcgggcgttggcgcagtctatcaagtggcgtcctgaggatttagcggctaaaacagccgtgactaaaagcggcgcgaaaaatgccgccgtcaaaatggaagggtttagccgtatccagtgtactgtcgatcttcttcctcaggatattcttgggtttaaccgttttatcggtcattcgggagagatgatttttaacaagggtcctgtgttcgcgcattttgtgttatgcgacgagatcaacctgcttacgccgaaaacgcagggaagcttttttcaggtaatggaagaacagagcgtgactatcgaggggaaattgtaccaattgacagaccctttctttatcattgcaacaatgaatttaaagggcgttcatttattcccgctgcccacgcctcagcttgatcgttttatgattcgcctctctctcggctatccaagcgaagaagacgaaacggaaattataaacaagcacggaaaaattgacgcgtgggataagtttacaagcgtcatagacagcgcggatttaatccgctggaaaaaaatggtggacactgtgcagatgcaccccgacgttacttcctaccttgtaaattgcgtccgtcaaaccagagttcacccagacattgagactccggcgagtccgcgcgcgggtgtgcgtatttcgcggctggcgcgttccctcgctctctgccgcggtatggactatgttccggtcgatattatcaaagaaatttttatacactcaatggctcacaggataattacccgtgatccttccataccgccggaagcgccgttggaaaatatcctgaacacagtccctgtcgaaccgaaacgggggtaa

SEQ ID NO: 71576 - protein, 334 aa, Unknown
  Obtained from environmental sample
  DOMAIN (39)...(245): ATPase family associated with various cellular activities (AAA)
  misc_feature (1)..(334): Xaa is any amino acid
MEAKIKKSIELLINHIKQLISVDAKKLEYIIAAQIAGGHVILADSHGVGKTSLARALAQSIKWRPEDLAAKTAVTKSGAKNAAVKMEGFSRIQCTVDLLPQDILGFNRFIGHSGEMIFNKGPVFAHFVLCDEINLLTPKTQGSFFQVMEEQSVTIEGKLYQLTDPFFIIATMNLKGVHLFPLPTPQLDRFMIRLSLGYPSEEDETEIINKHGKIDAWDKFTSVIDSADLIRWKKMVDTVQMHPDVTSYLVNCVRQTRVHPDIETPASPRAGVRISRLARSLALCRGMDYVPVDIIKEIFIHSMAHRIITRDPSIPPEAPLENILNTVPVEPKRG

SEQ ID NO: 71577 - DNA, 879 bp, Unknown
  Obtained from environmental sample
  misc_feature (1)..(879): n is a, c, g, or t
atggcgggcggccgaggtcctcactgcatgaagggcggcatagtctactcgaacttcgtgaccaccgtctcgcccaaacacgcctgggaggcccgccacaccggacagggccacggcctcggcggcaccctgcacacccaccaaggcaagttcggcggcgtgctcaacggcgtggactacggaacgtggaaccccgaactcgacggcttcctccccgcccgctacggcgtggataatttagacgaaaaatacaagaacaaggacgccctgcgcgaccgcttctggctctacaagagcaataaacccatcatctcgtacatcggccgcctcgacgaacagaagggcctgggcctgatctgccacgccgcccactacgctctatcacgcggcgcccaattcatactgcttggctcaccgtccaacaacgccatagccggccagttcgcccacctcagaaaccagctcggccaaagcgtggactgccacatagagctcggcttcaacgaggagctgtcccacctcatctacgccggatccgacatggtggtggtccccagcgccttcgagccctgcggcctcacccagctgatcgccctgcgctacggcaccgtccccatagtccgcgccgtgggcggcctggccgacaccgtattcgacaaagactatgcccaggtcgacatgggcatgcgcaacggatacaccttcaacgacctcaacaacgccgggctcgagtcggcaatgaacagggccatcgggctctactacgactatccggaggagttcaggacgctgatgaaaaacgggatgcgggctgactactcttggaataatccggggacgcattatatgaatatttatgatttgatcaggcataaataa

SEQ ID NO: 71578 - protein, 292 aa, Unknown
  Obtained from environmental sample
  DOMAIN (88)...(271): Glycosyl transferases group 1
  misc_feature (1)..(292): Xaa is any amino acid
MAGGRGPHCMKGGIVYSNFVTTVSPKHAWEARHTGQGHGLGGTLHTHQGKFGGVLNGVDYGTWNPELDGFLPARYGVDNLDEKYKNKDALRDRFWLYKSNKPIISYIGRLDEQKGLGLICHAAHYALSRGAQFILLGSPSNNAIAGQFAHLRNQLGQSVDCHIELGFNEELSHLIYAGSDMVVVPSAFEPCGLTQLIALRYGTVPIVRAVGGLADTVFDKDYAQVDMGMRNGYTFNDLNNAGLESAMNRAIGLYYDYPEEFRTLMKNGMRADYSWNNPGTHYMNIYDLIRHK

SEQ ID NO: 71579 - DNA, 768 bp, Unknown
  Obtained from environmental sample
  misc_feature (1)..(768): n is a, c, g, or t
atgaatgccaacgtcaatccaacccaattcacatcgcgaataacagccaatgaccgtatagccgatggcttttacgagttgtcgctgtcttgggatcaacgcgcccccatacctttgcccggtcagttcctgactatacgtgttaatggcggcactgtcccgttgttgcggcggccgttcgcctttgccggtttcagcgcggattcttccgtcgccacgataatctaccaaaagcgcggcgcggggacggagtttttggcggctatgcgggcgggggaggggattgacgttatcgggccgctcggaacgccttttgccgttgataccaatcaacaacaaaaacatataatcgtcgccggcggcataggtttggggccgatgttgttactcgcctcatcactaaaggttcgcaacatacccgcgcgattcatcttcggttgccgtaatcaaagtttcatccccaataccaaaatgttcattgacgtcaatccgcagatctgtactgacgacggcggttccggctttcgcggcactgttgctgattatatcaatacgaatgtgtcgttagatatcaatacaacagtatacgcttgcggcccgttgcctatgttgaagtccgtcaataaaatagcccaaagttccggcgcccgctgtctcgtctcacttagaggctgtaatggcctgcggtgtgggcgcttgcgtggggtgcgcggtgcctgtcgcgggcggcgggtatgcgcgggtgtgcaaggaggggccggtctttga

SEQ ID NO: 71580 - protein, 255 aa, Unknown
  Obtained from environmental sample
  DOMAIN (11)...(107): Oxidoreductase FAD-binding domain
  misc_feature (1)..(255): Xaa is any amino acid
MNANVNPTQFTSRITANDRIADGFYELSLSWDQRAPIPLPGQFLTIRVNGGTVPLLRRPFAFAGFSADSSVATIIYQKRGAGTEFLAAMRAGEGIDVIGPLGTPFAVDTNQQQKHIIVAGGIGLGPMLLLASSLKVRNIPARFIFGCRNQSFIPNTKMFIDVNPQICTDDGGSGFRGTVADYINTNVSLDINTTVYACGPLPMLKSVNKIAQSSGARCLVSLRGCNGLRCGRLRGVRGACRGRRVCAGVQGGAGL

SEQ ID NO: 71581 - DNA, 786 bp, Unknown
  Obtained from environmental sample
  misc_feature (1)..(786): n is a, c, g, or t
atgagcaatgagcaatgtaaggaggtttatatgaacaaagcggaatttattggacagtacgacgcttttataaaaaaagcgttgtcgcttgctgaaaaggcaagaagagaagggcttttagcgttggaatgtgacggcgaaaaagtaaaagagcgcgacatttttgaatacggtttgagttttgttatagacggaatagatttgtgtataatcgaaaaaatactcaacaacattatcgctcaggaaaaggacgagtatacccgtgttttcaaaaccattcaaaaagaagccgtcattgagatacaacagggggttaatcctaaattgctttacaacatcttaaactcactcacggacatatcattgaaagatgatgaagcgtacaacagcatgaacgccggtaaagtaaaagaaagggacgaggcttttgacaaagaaatgaccgccatcttgaaagcgttagacgaacaaatgggcagtcagccgaaaaatgaagcggataaaaatcaaccgtttgtatttgacgacattatccggcttgacgaccgttgtgttcaacacatactgcggaatgtagactcccatgatcttgccgtagctctaaagaccgcaagcctggcggtacagggcaaaatattcaaaaacatgagccgaaacgccgcgcttatgattaaagaagacatggattatatgggacagttaagcgaagaatatgtacatgaagcccaacaaaaaatcatcgacatcatcatggttttggaagaacgaggagagattgtaatatga

SEQ ID NO: 71582 - protein, 261 aa, Unknown
  Obtained from environmental sample
  DOMAIN (151)...(261): FliG C-terminal domain
  misc_feature (1)..(261): Xaa is any amino acid
MSNEQCKEVYMNKAEFIGQYDAFIKKALSLAEKARREGLLALECDGEKVKERDIFEYGLSFVIDGIDLCIIEKILNNIIAQEKDEYTRVFKTIQKEAVIEIQQGVNPKLLYNILNSLTDISLKDDEAYNSMNAGKVKERDEAFDKEMTAILKALDEQMGSQPKNEADKNQPFVFDDIIRLDDRCVQHILRNVDSHDLAVALKTASLAVQGKIFKNMSRNAALMIKEDMDYMGQLSEEYVHEAQQKIIDIIMVLEERGEIVI

SEQ ID NO: 71583 - DNA, 399 bp, Unknown
  Obtained from environmental sample
  misc_feature (1)..(399): n is a, c, g, or t
atggagatatcgatgtctacgaaggcgattgggttaagggcaaaaaacacggcaaagggaaatacacatgggctaacggctctgtttacgaaggcgattacgcagacaactgcgccaacggcaaaggaaaagagacatcagctaacggcgacatatacgaaggcgattacaaagacgacaatccccacggcaaagggaaaaaaaacttatgctaacggcgatgcctacgaaggcgatttcgattttgccgattgcattggcaaagggaaaaaaacatttgccaacggcgatgtctacgaaggtgatttttacggcgaaccgcacggcaaaggcaaaatgacctacgccaacggcagagttgaggaaggcgaatggaaagacggaaaatttattgggtag

SEQ ID NO: 71584 - protein, 132 aa, Unknown
  Obtained from environmental sample
  misc_feature (1)..(132): Xaa is any amino acid
MEISMSTKAIGLRAKNTAKGNTHGLTALFTKAITQTTAPTAKEKRHQLTATYTKAITKTTIPTAKGKKTYANGDAYEGDFDFADCIGKGKKTFANGDVYEGDFYGEPHGKGKMTYANGRVEEGEWKDGKFIG

SEQ ID NO: 71585 - DNA, 315 bp, Unknown
  Obtained from environmental sample
  misc_feature (1)..(315): n is a, c, g, or t
atgacagaaaaattgacatttaatgatggcagagtgtacgaaggcgaaacaagaggcggcaaaccgcacggtaaaggaaaaatgacatggactgacgacgatggagatatcgatgtctacgaaggcgattgggttaagggcaaaaaacacggcaaagggaaatacacatgggctaacggctctgtttacgaaggcgattacgcagacaactgcgccaacggcaaaggaaaagagacatcagctaacggcgacatatacgaaggcgattacaaagacgacaatccccacggcaaagggaaaaaaaacttatgctaa

SEQ ID NO: 71586 - protein, 104 aa, Unknown
  Obtained from environmental sample
  DOMAIN (63)...(85): MORN repeat
  misc_feature (1)..(104): Xaa is any amino acid
MTEKLTFNDGRVYEGETRGGKPHGKGKMTWTDDDGDIDVYEGDWVKGKKHGKGKYTWANGSVYEGDYADNCANGKGKETSANGDIYEGDYKDDNPHGKGKKNLC

SEQ ID NO: 71587 - DNA, 1035 bp, Unknown
  Obtained from environmental sample
  misc_feature (1)..(1035): n is a, c, g, or t
atggccccctacgccgcaatcatcaataaaataaaagacatacgcgaagacgcgcccccattcgacgatactgaaaatgtccccaccgtcgaactaatagcggctcttgctctttttgaagaatatgaagtgcttaaaaccctgtttaaatcagagcaatttacagctaacataaatgaaaccgtcagccccgccttcgcgtattggcagcccacgcccctgtatttcatcacctcgaaaaaggcgctcgccataatgaaagacccgtgcaaaatgatccgctttctttcggcgcacggcgcggaccccaacattccggcggaagacggctctaccatgctgtggaaccagtgcaacaaaggctatccaatagaaataatgaaaacgctgttggaaatcggagccgaccccaatcaaacaagcaaagacagcgaagccgaatggacgccgcttgcgtactgcttactgcccggtttcgccgaagacaaagacggcaatccaatcgaaaaccaatatcttcccatagaaaatgaatcaatagaaaaagccaaactgttactcgatcacaacgccgatgcgaacttcaccgccagggacggcaatacggcaatgatattagccctcgaaaaaggagaagtttacgaaggccattttgtagacggaaaattacaaggcaaagggaaatatacaaacaaaagcggcgatatttacgaaggcgattttgtagacggcaaattccacggcaaaggaaaattaacaatgacagacgcctttacctacgaaggagattttgaaaacaattcgccgcatggaaaaggaaaatggacaagtttggaatacggcgattattacgaaggtgattttttcaacggcagaagacacggcaaagggaaaataatatacgccgacggcagagtttacgaaggcgattgggcaaaaggcagatggaacggcaaagggaagatgatctatccagacggcagaatcgaagaaggcggatggaaagacggaaattttgtagggaaggaggaatga

SEQ ID NO: 71588 - protein, 344 aa, Unknown
  Obtained from environmental sample
  DOMAIN (237)...(259): MORN repeat
  misc_feature (1)..(344): Xaa is any amino acid
MAPYAAIINKIKDIREDAPPFDDTENVPTVELIAALALFEEYEVLKTLFKSEQFTANINETVSPAFAYWQPTPLYFITSKKALAIMKDPCKMIRFLSAHGADPNIPAEDGSTMLWNQCNKGYPIEIMKTLLEIGADPNQTSKDSEAEWTPLAYCLLPGFAEDKDGNPIENQYLPIENESIEKAKLLLDHNADANFTARDGNTAMILALEKGEVYEGHFVDGKLQGKGKYTNKSGDIYEGDFVDGKFHGKGKLTMTDAFTYEGDFENNSPHGKGKWTSLEYGDYYEGDFFNGRRHGKGKIIYADGRVYEGDWAKGRWNGKGKMIYPDGRIEEGGWKDGNFVGKEE

SEQ ID NO: 71589 - DNA, 495 bp, Unknown
  Obtained from environmental sample
  misc_feature (1)..(495): n is a, c, g, or t
atgagtaacagccggaaaaaaagcgacgctgaaaaacccgaagttcaacccaggccgtttgactttatcaataattatgatccgatggaagtattgcgcgtgatagagcgtgaataccctctttttatagcgataatattatcgtatttggagccgcccaaagcgtcggtgttgttgcagaatctgcccaaagaaaaaaaaggagaggtagcccgcttaattgcgacaatggacgtgataagccttgaaataatccggggcatagaacggagcgtaaaaaagaaactgtcagccaaagacccctacggaacagcaggcggcgttgataacgcagtggaaatactcgaactggcagatcaggattcaaaggatcaaataatgagatacataaaagccaaagaccccgaacttgccgatgaattgcagaaccggcggctggcggcaggaggggtactgtcaaataatgaaatcaatgatctggcaaaaaacctttga

SEQ ID NO: 71590 - protein, 164 aa, Unknown
  Obtained from environmental sample
  misc_feature (1)..(164): Xaa is any amino acid
MSNSRKKSDAEKPEVQPRPFDFINNYDPMEVLRVIEREYPLFIAIILSYLEPPKASVLLQNLPKEKKGEVARLIATMDVISLEIIRGIERSVKKKLSAKDPYGTAGGVDNAVEILELADQDSKDQIMRYIKAKDPELADELQNRRLAAGGVLSNNEINDLAKNL

SEQ ID NO: 71591 - DNA, 483 bp, Unknown
  Obtained from environmental sample
  misc_feature (1)..(483): n is a, c, g, or t
atgaaagaaaaactgacttttgaaaacggcgcggtatacgaaggcgaaacagctaacggcgtaccaaacggcaaaggaaagctgacatggcaaggcgagactgatctggacggcgttatcagaatatacgaaggcgattttgttgaaggcaaaatgcagggcaaaggcaaattgacgataaacgccgacaagtacgcgggcaaaacagaatccggcgaataccggggcgatgacgtatacgaaggcgattttgtagacggcaaacgccacggcaaaggcaaaatgacatggaacatgggcgacatatacgaaggcgattttgtaaccaactggtctcaaggtaaaggaaaaatgacatgggcagacggttctgtctacgaaggcgattttgtggacggcaatctacacggcaaaggaaaaatgacctacccagacggcaaagttgaagaaggacgttttgaaaacggcgagtttattgggtaa

SEQ ID NO: 71592 - protein, 160 aa, Unknown
  Obtained from environmental sample
  DOMAIN (103)...(125): MORN repeat
  misc_feature (1)..(160): Xaa is any amino acid
MKEKLTFENGAVYEGETANGVPNGKGKLTWQGETDLDGVIRIYEGDFVEGKMQGKGKLTINADKYAGKTESGEYRGDDVYEGDFVDGKRHGKGKMTWNMGDIYEGDFVTNWSQGKGKMTWADGSVYEGDFVDGNLHGKGKMTYPDGKVEEGRFENGEFIG

SEQ ID NO: 71593 - DNA, 1875 bp, Unknown
  Obtained from environmental sample
  misc_feature (1)..(1875): n is a, c, g, or t
atgggcactataaacctcacaaaggattggcgacgcctgaacatccccgagcacgttcgggacattctgaccgataaccgcggcctgctcttccccgtagaccgcgccgaactgcttgagcttgccatcggcggaaccggcaacaagtcctacgacgtttgctacgacgtcccgggcaagggatccgtcgtagaggccaccgtcgtcaagtgcaaaaacgggctgtccgtcaactactccgagccctatatgcgccgccgcgatcccgactgcacggtggtgggcgacaccaagccctccgacaaggagcgcttctccgaacgcttcggcaccgacttcgacaaggtgcgcgccgatactttcgagtggcttaaaaagcaggaactgaccgccctcgctttcatgctgggcgagagcaaccacggggcgctcatgatagccccccgcaacgccggtttcttcgtcggcgggctggccgacctccaggggatgctcaacccgctcgacgtgcctgacgacttcaaggtggcctgcgtaatgtacgtggcgccgcccttccgccacacccacttcaacggcaagcaggtagtggtccacaaccgcttgaacgaaatccacgagatattttcctataacctgtaccccggccccagcgccaaaaagggcgtctacggggcgcttctcaccatcggcgagcaggagaaatggctcacgctccacgccgccacggtgcaggtcgtcacaccctacgataacatcacgaccatcatgcacgagggggccagcggcagcggcaagagcgagatgctcgaactcgtacaccgcgagtgggacgggcggctgcttttaggccgcaacacgaagacaggctcgagacggatcatctccatgaaccagacctgctccctgtaccctgtcaccgacgatatggccatgtgcccgcacgaggtccaagataaaagcggctacgtgcacgcctgcgacgcggaacaagcgtggttcgtccgcctgaaccacatcacccgctacggaaccgacccgcagatagagaacataaccgtccacgccaacgagccgctgatattcctgaacatgcagggcgtccccgacgccaccgtgctcatttgggagcacatagaggactcgcccggtaaacgctgccccaacccgcgcgtaatcctgccccgccgcctcatgccaaattgcgtgaacggagcggtggaggtgcacgtccgcaacttcggtttccgcacccccccgtgcacaagagagaaaccctcctacggcatagcgggcttcctgcacgtgctgccccccgcgctcggctggatatggcgcctaatctccccgcgcggctacgacaaccccagcgtcaccgacgacgacgccatgacaagcgagggcgtcggctcctattggcccttcgccaccggactgcgggtagaccacgcgaaccttatcctgcggcagatacagaagacgccgcacgtgcgctacacgctgacccccaaccagcacgtaggcgcctacgcggtcagcttcatgccgcagtggatagccagagagtacctagcccgccgcggcacggccaagttccgccccgaacagctggtgcccgcccggtgcccgctcctcgggtacgccttcgcgacaatgcaggtcgaagggacgcacttacagcacgactttttgagggtggacgaacagcctgacgttgggcaggacgggtacgacgccggcgcgaagatactcaaaacattcttcgacgaggaactgaagaagttcctggtgccggagctgaacgaggtcgggaggaggattattgagtgctgtttggacaacgggacggtgaaggactatgaggcgctgctgtaa

SEQ ID NO: 71594 - protein, 624 aa, Unknown
  Obtained from environmental sample
  misc_feature (1)..(624): Xaa is any amino acid
MGTINLTKDWRRLNIPEHVRDILTDNRGLLFPVDRAELLELAIGGTGNKSYDVCYDVPGKGSVVEATVVKCKNGLSVNYSEPYMRRRDPDCTVVGDTKPSDKERFSERFGTDFDKVRADTFEWLKKQELTALAFMLGESNHGALMIAPRNAGFFVGGLADLQGMLNPLDVPDDFKVACVMYVAPPFRHTHFNGKQVVVHNRLNEIHEIFSYNLYPGPSAKKGVYGALLTIGEQEKWLTLHAATVQVVTPYDNITTIMHEGASGSGKSEMLELVHREWDGRLLLGRNTKTGSRRIISMNQTCSLYPVTDDMAMCPHEVQDKSGYVHACDAEQAWFVRLNHITRYGTDPQIENITVHANEPLIFLNMQGVPDATVLIWEHIEDSPGKRCPNPRVILPRRLMPNCVNGAVEVHVRNFGFRTPPCTREKPSYGIAGFLHVLPPALGWIWRLISPRGYDNPSVTDDDAMTSEGVGSYWPFATGLRVDHANLILRQIQKTPHVRYTLTPNQHVGAYAVSFMPQWIAREYLARRGTAKFRPEQLVPARCPLLGYAFATMQVEGTHLQHDFLRVDEQPDVGQDGYDAGAKILKTFFDEELKKFLVPELNEVGRRIIECCLDNGTVKDYEALL

SEQ ID NO: 71595 - DNA, 1407 bp, Unknown
  Obtained from environmental sample
  misc_feature (1)..(1407): n is a, c, g, or t
atgtccaaacgtcttttcaatgtagccggtccgtgtgtccccggtgatcactatatgcttgaccctttgcgtggtatcggcgacgagttgatggaactcattgatgacaagcagtacttcgtcatccacgccgcccgtcagagcgggaagaccacgctcttgaagcaactcacccgcgacatcaatgcggtaggcaagtaccacgccctatactgcaacgtggaagcggcgcagggttggaccgatccggagaaggggattccggtgattgtggaaaagctccggttagcccttagagacagcggtatgcagaacggttttgccgctggcagcgatggtatcggcgcggcaagtgtgcttaaagattcgctctccgcctactgtagaacgctgagcaaaccgctagtcatatttttcgacgaagccgactgcctgtccgaagggacgcttataacgttcttgaggcagcttcgggaggggtacatcggtagggcagatgtcccattcgcccataccgtagccctcgtcgggatgcggaacatccgcgactataaggctcaaatacgcaaagataccgaaacgattggaagcgcgagcccgtttaacatcgcaaaaaaaagccttagtctaagaaacttcaccgcagacgaagtcgccgaactctacgcgcagcacacaaccgagaccggacagatatttgagcggcaagcgatagaccacgtttttgaacaaacgcagggacaaccgtggctcgtgaacgccatcgcttgcgaatgtgtggagaagatcacaaaaaaggactactcgatccacatcacccaaccgtttgccggtcaagccatccaaaatttaataaaagcctggggaacgcacttcgacagcatgatggagaggctaaaagagccgcaggtccgtaacattatagaaccgctcctgcttggcggcggcatgaccttggacgtacggtcgaacgactatctttacacccgcgatctaggactgataagggagatagacggcaaggttgaaccggctaaccctatttacgccgaactgatagtccgaacgctaaactggagcgtccagatgtcgttacagcgggatcacgatgactacgaggttccccgctacttgaaggacggcaagattgacgtagaccatctgctcaaagactttcaacagtattggcgggagaacagcgggatatggacagagtgctatgagacgcagttttaccgatacaccgaagccgcccctcacttggttttgcaagcgttcctgcagcgcgttataaacgggggcggccaaatcatccgcgagatggccttaggcaagacacgggcggatctgtgcgtggtctatgatgggcgaaaatacccgatgaactcaaaatactgcaaaatatga

SEQ ID NO: 71596 - protein, 468 aa, Unknown
  Obtained from environmental sample
  misc_feature (1)..(468): Xaa is any amino acid
MSKRLFNVAGPCVPGDHYMLDPLRGIGDELMELIDDKQYFVIHAARQSGKTTLLKQLTRDINAVGKYHALYCNVEAAQGWTDPEKGIPVIVEKLRLALRDSGMQNGFAAGSDGIGAASVLKDSLSAYCRTLSKPLVIFFDEADCLSEGTLITFLRQLREGYIGRADVPFAHTVALVGMRNIRDYKAQIRKDTETIGSASPFNIAKKSLSLRNFTADEVAELYAQHTTETGQIFERQAIDHVFEQTQGQPWLVNAIACECVEKITKKDYSIHITQPFAGQAIQNLIKAWGTHFDSMMERLKEPQVRNIIEPLLLGGGMTLDVRSNDYLYTRDLGLIREIDGKVEPANPIYAELIVRTLNWSVQMSLQRDHDDYEVPRYLKDGKIDVDHLLKDFQQYWRENSGIWTECYETQFYRYTEAAPHLVLQAFLQRVINGGGQIIREMALGKTRADLCVVYDGRKYPMNSKYCKI

SEQ ID NO: 71597 - DNA, 441 bp, Unknown
  Obtained from environmental sample
  misc_feature (1)..(441): n is a, c, g, or t
atgaaagttgacactaaagcctatggacttatggaagttgatgaaaaacagaaaataagtatcccgcaggggctttttggttttgaggattatattgaatatgtattacttgactcggataatccgccctttttatggcttcaatccgtagatgaaaaagaaatagcgtttattttaatcgatccttttttattccgcaaagattatgaggcgaatataacagacgaagaactggcggaaatcggaattaaatcttccgaaaacgctcttgtatttgtaattgtaacaatcccgcaggacggcggacccatgaccgcgaatcttcagggaccaatagtcataaacaaacaggacatgaagggaatgcaggccgttctctccgatgtacgctggaaaacaaggcatgatattattgccgagatgaacaaaacggagaaataa

SEQ ID NO: 71598 - protein, 146 aa, Unknown
  Obtained from environmental sample
  DOMAIN (17)...(140): Uncharacterized BCR, COG1699
  misc_feature (1)..(146): Xaa is any amino acid
MKVDTKAYGLMEVDEKQKISIPQGLFGFEDYIEYVLLDSDNPPFLWLQSVDEKEIAFILIDPFLFRKDYEANITDEELAEIGIKSSENALVFVIVTIPQDGGPMTANLQGPIVINKQDMKGMQAVLSDVRWKTRHDIIAEMNKTEK

SEQ ID NO: 71599 - DNA, 1251 bp, Unknown
  Obtained from environmental sample
  misc_feature (1)..(1251): n is a, c, g, or t
atgagaaggatatcaagcgacatgccgaattcagactcgcagttttatttgaggcgtcaggaagaaagagtaaataacatcgagaatcaaatcggtacgaataacaggattcacaggttaagagacgatcctcttgccgcgtcccacgccgtaaggtatgaatcgtatcttgcgcgtcttaaccgctttgaggaaaacacaaaaaaagcaaaagaacatcttgataccgctcatgactatttatacgaaactacaaatattctgcatagagtaagagacctcgcccttcaaggcgctaacggaagtaattctcctgatgaacttaaaataatggcgatggaagtaaacgagcttttaaaagaacttgtaaaaatttccaacgcgacgggtcccgacacaagacagttattttcaggagacaaagtttttactgagccttttaggcttgttgaggggacggtcgaaggcggcgaagaaacagttataaaacgcgttgaataccgaggaacaggaccaagccgaaaagtcgaaatcggcgataatatgtttttagatattgatttgggcggcgatcaggctttttgggctgagagaatgcaggttttttccactactgacgcgacagattacagagtgcaggcgcagggagctttctttgttgacggcgtagaaatcggcgttaacatcggcgacacattgccttcgattgtagcgaagataaacgattcgtccgctcccgtaaaagcgtacatcgatcctatttcaagaggcttagtccttgaaggcacaagcgctcatcttatccgcatagaagataaagagggcggagctaccgtgttacgcgatttaggattgataaacggtaatctgcaaaacaatgcgccgaattgggcaaataccgcaagagtttacggcggttcaatgttcgatatggtaattcgcttaagagacggactttaccgaggggatcaggattttgtcggcagtcagggaatcgggggaattgatcttgcgatgaataatgttataatgaggttagcggacgtaagcagcaggaaagaaagagcggatttcgcgtggcagagaataaacgcgcaaattccgaatgtggcaaatatgctgggacgcgaaacgggagtcgatttccaagacgccataacggacttgaagatggcgcaattcgcgcatcaggcatcgttacagacagcggcgaaaatactgcctcctacattgcttgatttcctgagataa

SEQ ID NO: 71600 - protein, 416 aa, Unknown
  Obtained from environmental sample
  DOMAIN (28)...(162): Bacterial flagellin N-terminus
  misc_feature (1)..(416): Xaa is any amino acid
MRRISSDMPNSDSQFYLRRQEERVNNIENQIGTNNRIHRLRDDPLAASHAVRYESYLARLNRFEENTKKAKEHLDTAHDYLYETTNILHRVRDLALQGANGSNSPDELKIMAMEVNELLKELVKISNATGPDTRQLFSGDKVFTEPFRLVEGTVEGGEETVIKRVEYRGTGPSRKVEIGDNMFLDIDLGGDQAFWAERMQVFSTTDATDYRVQAQGAFFVDGVEIGVNIGDTLPSIVAKINDSSAPVKAYIDPISRGLVLEGTSAHLIRIEDKEGGATVLRDLGLINGNLQNNAPNWANTARVYGGSMFDMVIRLRDGLYRGDQDFVGSQGIGGIDLAMNNVIMRLADVSSRKERADFAWQRINAQIPNVANMLGRETGVDFQDAITDLKMAQFAHQASLQTAAKILPPTLLDFLR

SEQ ID NO: 71601 - DNA, 1890 bp, Unknown
  Obtained from environmental sample
  misc_feature (1)..(1890): n is a, c, g, or t
atgacttcgacattcatgggattggaaattggtaaacgaggcgttcaggcgcaccaacaggcgattgcgacaacagggcataatcttgataatatgaacactccgggctattcaaggcagagagtggagtttgttccctttgagccgatttacctgcccgcgttaaaccgcgcggaaactcccggacagatagggcagggcgctgtcatcgagcgcatcgaacgcataagagataatctccttgacagaagaattgtcgcgcagtcttcaaacgaaggttactgggacgtgcgcgatcgttatgtgcgcgaacttgaacagatatatcttgaaaccggagagaattcggtaagaagcaaaatggataaattctgggattcatggcaggaattgtcacagcacgcttctgaaaatgaattccgcatcgccgttattcaaagaggaaaaacattaatcgacggagtaaaaaatcattataacggacttgacagacttcaaacccagaccaacgacgatattcagctgacagtttcaaaagtaaacgaaattacgcgtcagattgcggctctaaacggcgacattcaaagaataaaagcgcagggcgataatcccaatgatcttatggacagacgcaatttactgttagatgatctttcgtcaataatagacgtaacgtttacagatcaagaccccgatgaattcatggttcacacatcagggcatattcttgtgcagggacagattgccagacagttcgatatgaggaaagacgtagacgccgaaagtttcgcgtacatctactggcatgacacaggcgatgaaatggtttttacaagaggcaaactcggcgctcttatggaacttcgcgacgtaacaatccagaatgaaatccaaactcttgataacgtggtaatgaattttacagaccttgtaaatgaaattcaccgaggcgcttacggcgcaaacggatcaacgggcattaatttcttttccgaatatccgtttgttaccaatgttaacggaaattatgaccgctcaggcgacggagtttttgattcaagttatgtataccgtattaacgggcagaatacccttgagccgaacgctcagcccggttttgagggaacaataaccctctcaggagccgacagacaggtggaagtgccgtattatacaactgacacagttaacgacattataacccgcattaacaattcaggcgcggaagttgtagcccgtcttaacagagaaggtaaaatttcgttaaaaggcacaactgcggaattaatcaacggacagagagttaaccccgattttgttatacgtcatgttgaagattccggtctcttccttgccgggtacgccggtttgcttaatcaatcgggagcggagggcgcttatgactggggacgcgccgacgcggtaacaagtcttaggggcgatacaaccgattacgcgcttgccccaatcgcgcatccgtccggctggatagaagttaatcctatgttgctcagagactcgacaaatgtcgccgctggtttcggtgagaacggaagagttgcgaatcccggaaacggagaagcggcggcggctatcgcttccatacggaataatcccgtaatggtgggacgttttgcgacatttgacgattacttcgcgaactcggtgggaaaaatcgcgttaatgggcgaggaatcggaaagagcgctggctacggaaaatcagataatgaaatatttacgcgattggagacagtcaatttccggcgtaaatatggacgaagaacttgccaatatgcttaggtttcagcacggttacaacgcagcggcaaggtatatcacaacagttaattcaatgttggatacattaatcaaccgcatgggcgtatag

SEQ ID NO: 71602 - protein, 629 aa, Unknown
  Obtained from environmental sample
  DOMAIN (8)...(38): Flagella basal body rod protein
  misc_feature (1)..(629): Xaa is any amino acid
MTSTFMGLEIGKRGVQAHQQAIATTGHNLDNMNTPGYSRQRVEFVPFEPIYLPALNRAETPGQIGQGAVIERIERIRDNLLDRRIVAQSSNEGYWDVRDRYVRELEQIYLETGENSVRSKMDKFWDSWQELSQHASENEFRIAVIQRGKTLIDGVKNHYNGLDRLQTQTNDDIQLTVSKVNEITRQIAALNGDIQRIKAQGDNPNDLMDRRNLLLDDLSSIIDVTFTDQDPDEFMVHTSGHILVQGQIARQFDMRKDVDAESFAYIYWHDTGDEMVFTRGKLGALMELRDVTIQNEIQTLDNVVMNFTDLVNEIHRGAYGANGSTGINFFSEYPFVTNVNGNYDRSGDGVFDSSYVYRINGQNTLEPNAQPGFEGTITLSGADRQVEVPYYTTDTVNDIITRINNSGAEVVARLNREGKISLKGTTAELINGQRVNPDFVIRHVEDSGLFLAGYAGLLNQSGAEGAYDWGRADAVTSLRGDTTDYALAPIAHPSGWIEVNPMLLRDSTNVAAGFGENGRVANPGNGEAAAAIASIRNNPVMVGRFATFDDYFANSVGKIALMGEESERALATENQIMKYLRDWRQSISGVNMDEELANMLRFQHGYNAAARYITTVNSMLDTLINRMGV

SEQ ID NO: 71603 - DNA, 510 bp, Unknown
  Obtained from environmental sample
  misc_feature (1)..(510): n is a, c, g, or t
atgatttatgaaaaatgcagggatatccttttacaggaatgcgagttgattcaaaacgctgcaaatgaacaggaaaaagtgcgcaatgccgtttctaatcgggattgggctgtttttgaagaccatttaagcgttatgaactcaatcgaaaacaaaatagcgtctctggaaacagaacgcgagcagcttttcatagtttttaaaaccctcattcatcaacagagtttttctgaaaatcttgactcaaaaggtcagttcttcgctcttgtttccctccttcccgataatcagcgcgaagaattgtcctcgatctacctcagtttaaaacaagaagccgtaaagttacgcatggcaaatgaaatgttatttgcctatttgtcgggaataaaatcgacgttaaaagaattttttgatctggctttccccgaacgcggcggaaaattgtacacaaaagagggaatgcatttttcaaatgatatgcacagtatgttgttaaaccgcactttttaa

SEQ ID NO: 71604 - protein, 169 aa, Unknown
  Obtained from environmental sample
  misc_feature (1)..(169): Xaa is any amino acid
MIYEKCRDILLQECELIQNAANEQEKVRNAVSNRDWAVFEDHLSVMNSIENKIASLETEREQLFIVFKTLIHQQSFSENLDSKGQFFALVSLLPDNQREELSSIYLSLKQEAVKLRMANEMLFAYLSGIKSTLKEFFDLAFPERGGKLYTKEGMHFSNDMHSMLLNRTF

SEQ ID NO: 71605 - DNA, 351 bp, Unknown
  Obtained from environmental sample
  misc_feature (1)..(351): n is a, c, g, or t
gtgctcaactttataaccgccgaaataaagaaaaccggttatgaacatgaaattcaaaataaaattgaaatggcgtctgaagaaatatttacaaatatcgcaaattacgcgtacgccgatgaaggcggaaaagtaaaaatcgccgtttccattatagacgggattaaaataacatttgaagataacggcagacctttcaatcctacagagtaccccgctcccgatttggaaaaacccctaaaagaccgcgagatcggcggactgggcttgtatatagtcaaacaagtcatggataaagtggagtacacccgcgaaaacgacaaaaatatactgataatcagcaaaaaatag

SEQ ID NO: 71606 - protein, 116 aa, Unknown
  Obtained from environmental sample
  misc_feature (1)..(116): Xaa is any amino acid
MLNFITAEIKKTGYEHEIQNKIEMASEEIFTNIANYAYADEGGKVKIAVSIIDGIKITFEDNGRPFNPTEYPAPDLEKPLKDREIGGLGLYIVKQVMDKVEYTRENDKNILIISKK

SEQ ID NO: 71607 - DNA, 1497 bp, Unknown
  Obtained from environmental sample
  misc_feature (1)..(1497): n is a, c, g, or t
ttggtagattggccgagatacagaagctggtatcgagagatattggaaagcgttatcgctcccagccatgttgtttggacaaaaccctatgttgacgatataggcactttaagtcttatgacaacaacaggcgcgggaatatttatcaacggaaaattaatcggtataactacaatcgactggcaaattaatgacattatagaaaaattaataaatattaatcctacgcaaaacagttttgttttgctttgcgtccccgataaagattatattatttcaagcgtatttaccgacaattttacaggggactcgttaaaaagcataccctgggatattaattccgatcattttacatataacaataaaaaatacaggcgttttgggtgttatatggataacggctggctgttatccgtccaaataccggaaaacgaaatgtttacgcagatgacaaggcaaaatatcattttctcgacaataatggaaatatcattcgcgttaattcttatccttgcctatcttttaatttcccgttttataaacgcgcctataaaaaaccttacaaaaggcgtagcgcagattgagcttggaaatttggacatgaagatagatataaactcaaaagatgaaatcggtcagcttgccggagcgtttaacaaaatgacgaccgatttaaaacattctatcgaagaaaacgtccatgagcgtgaagaaaaaaagcgcataactactgaactttccatagcgagagaaatacaggtaagcctgcttaaaaataattttatggaatttcacgcgagggatgaatttgacatatttgccgatatgattcctgcaaaagaagtaggcggagacttatacgatttctttttaattgataacgataatcttgcggtagttatcgccgatgtttccgggaagggaataccagcctcgttattcatggtaagaacaaaaacgcttataaataatatttcttacgataaaagcccggaggaagttcttgaagttgtcaataaaagactgtgcgaaaataatgaggcgtgtatatttgtaaccgcaatcttcggcatatacaatataaaaacaggaaaatttacttttgtaaacgccggtcacaatccgccgcttataaaaaagaaagacggttattttgaatacataagaacggagccgcagcttgttcttgcaataatgaaagatacagaatacaaagaagaagaaattattttggaaaagggcgataccctgtatttttacaccgacggcgttacggaagccgtgaatcagggcaaagaatttttcggcgaagacagattaaaagacgcgcttaacaaataccgttcttcttttcccaatgatttaatatataatattaaagacgaagtaaacaattttgcgaacggagcggagcaggctgacgatatcgcgatgcttgccctgcgcataaacgaggataatcaaacagaaaggcaaatatcagttacgccgaaataa

SEQ ID NO: 71608 - protein, 498 aa, Unknown
  Obtained from environmental sample
  DOMAIN (158)...(227): HAMP domain
  misc_feature (1)..(498): Xaa is any amino acid
MVDWPRYRSWYREILESVIAPSHVVWTKPYVDDIGTLSLMTTTGAGIFINGKLIGITTIDWQINDIIEKLININPTQNSFVLLCVPDKDYIISSVFTDNFTGDSLKSIPWDINSDHFTYNNKKYRRFGCYMDNGWLLSVQIPENEMFTQMTRQNIIFSTIMEISFALILILAYLLISRFINAPIKNLTKGVAQIELGNLDMKIDINSKDEIGQLAGAFNKMTTDLKHSIEENVHEREEKKRITTELSIAREIQVSLLKNNFMEFHARDEFDIFADMIPAKEVGGDLYDFFLIDNDNLAVVIADVSGKGIPASLFMVRTKTLINNISYDKSPEEVLEVVNKRLCENNEACIFVTAIFGIYNIKTGKFTFVNAGHNPPLIKKKDGYFEYIRTEPQLVLAIMKDTEYKEEEIILEKGDTLYFYTDGVTEAVNQGKEFFGEDRLKDALNKYRSSFPNDLIYNIKDEVNNFANGAEQADDIAMLALRINEDNQTERQISVTPK

SEQ ID NO: 71609 - DNA, 1152 bp, Unknown
  Obtained from environmental sample
  misc_feature (1)..(1152): n is a, c, g, or t
atgggcgggtacgggcagtacgccgaaagctctatccgcggcggaacggcaaaaggtttgcgtgtgcatctcgacggcataccgctcaacagcgcttctggcggggcggtggatttgagcaaaattccgcttgacaaaataacggaaatccgcgttacaaagagtacgtccggcctccgccagatgggggcggggatgggcggggtcattgaattatttacggttgacagagagacaaataacgacatcgtaggaataaacgtggaagccggaagtttcggacacctgaaagaaggcgtcgtcgtcaggtttaacggcgggaatgacgtcattgcaaagagcgaagcgacgaagaaatctagaataccgctactattaaaaacaactcatcagataaacattgacctctctaagagcgacaacgactacccgtttatccacgacaacggcacgaccatccccacgctacgcgatcccgaccccacttgggacgatacgcttatgcgaaagagtaacaatcactacaaatcgatagacgccgcgtacagtctatccgcgaacatcactgaaaatcacaaaatcacccagcaaataagcgcaggttcatacaatcaagggctgtttgtctatcattacaaagataatcagagcggctcaacaagcggaaacacaatcatatacggtattgattatcaagggaagatttccaataacctgacaatatgcggtgaggcaagcgggatttatcgcggagggaaaataagcgatcccgcagggcatttcggcctcggcggagcgaaagagattgagtccgacggcgttacggctgattttttaattgacgcacggtattcgctcacggaaaatttttatttggcgggattgaccggcgcacggtatgacggatacgcacaggagagcaaagaacggaacgagacgccggagatgaaccggtacgagtatcaagcgggagcggaggccgtaatcaaaaccaaaatcggcgaatcgtcaacaacgaaaacggcgttacgcgccgtctataaatatgaaattgacacatcaaacgccgcgttcaataaacggccgtccgcacaaaaaaattaccgtctcggttaccccgtcgccgaagccgtttcaaatggctcgccataa

SEQ ID NO: 71610 - protein, 383 aa, Unknown
  Obtained from environmental sample
  misc_feature (1)..(383): Xaa is any amino acid
MGGYGQYAESSIRGGTAKGLRVHLDGIPLNSASGGAVDLSKIPLDKITEIRVTKSTSGLRQMGAGMGGVIELFTVDRETNNDIVGINVEAGSFGHLKEGVVVRFNGGNDVIAKSEATKKSRIPLLLKTTHQINIDLSKSDNDYPFIHDNGTTIPTLRDPDPTWDDTLMRKSNNHYKSIDAAYSLSANITENHKITQQISAGSYNQGLFVYHYKDNQSGSTSGNTIIYGIDYQGKISNNLTICGEASGIYRGGKISDPAGHFGLGGAKEIESDGVTADFLIDARYSLTENFYLAGLTGARYDGYAQESKERNETPEMNRYEYQAGAEAVIKTKIGESSTTKTALRAVYKYEIDTSNAAFNKRPSAQKNYRLGYPVAEAVSNGSP

SEQ ID NO: 71611 - DNA, 804 bp, Unknown
  Obtained from environmental sample
  misc_feature (1)..(804): n is a, c, g, or t
ttgactttgactttgattttgcctttgattgaaaatgcggggtttagccccgcatttatctatgaaagggcgcgtttacgcgccctttcgtctaaatatgaatttgattttaaagattttgactttaatgaatttgattttaaagattttaatgattttgaccatcaagtaataaggacaaacaaattgcccacacgaataaaagtctgcggaatcacccgcgttgaggacgccttggccgccgtccgcctcggcgcggacgcgctcgggtttatatttgtccccgcaagcccgcgtttcatctcccccgccggcgccgccgaaatcatcaaaaagctcccgccgttcgtctcaaaagtaggggtcttcgtcaacgaggagccaaaccgcgcacttgaggcctcgcgtaccgccggcatagacgtcgtgcagctccacggcgacgaaccgccggagtactgcgtcggcttcccgctgcccgttataaaggtattctccgtaggcgcggattttgacccatccgtcatgaagcggtacgccgccgccgggtacctgctggacacctgggacccaaagcgccgcggcggcagcggaaacaccttcgactggtcgattgcggccaaagcgcgcgccatgtacggcaccgtgatactctccggcggactcaacccccaaaacgtccgcgaagccgttgaggccgtgcgcccctacgccgtcgatctaaacagcggtgtcgaggttagccccggaataaaagatcacgacaagataaaggcggccgtttccatcgtcaagggggaatag

SEQ ID NO: 71612 - protein, 267 aa, Unknown
  Obtained from environmental sample
  DOMAIN (67)...(263): N-(5'phosphoribosyl)anthranilate (PRA) isomerase
  misc_feature (1)..(267): Xaa is any amino acid
MTLTLILPLIENAGFSPAFIYERARLRALSSKYEFDFKDFDFNEFDFKDFNDFDHQVIRTNKLPTRIKVCGITRVEDALAAVRLGADALGFIFVPASPRFISPAGAAEIIKKLPPFVSKVGVFVNEEPNRALEASRTAGIDVVQLHGDEPPEYCVGFPLPVIKVFSVGADFDPSVMKRYAAAGYLLDTWDPKRRGGSGNTFDWSIAAKARAMYGTVILSGGLNPQNVREAVEAVRPYAVDLNSGVEVSPGIKDHDKIKAAVSIVKGE

SEQ ID NO: 71613 - DNA, 1167 bp, Unknown
  Obtained from environmental sample
  misc_feature (1)..(1167): n is a, c, g, or t
ttgccttacggcgagataaacaagttgcgtcgcttcgctcgcaatgacggtcattgcgaggagcgaagcgacgaagcaatccagaaatgcaacaacgctctcattaatcaatacatagacgccttaataaatgaatggaatatatacgaatccgcggaaatgtttgacgtccattgcatcgacaccgtctacatcggcggcggaacaccgtctatccttgggatcgatatgtgggagagacttgaccgtgaactgttctctcggattgacaagacgggaatcaaagagtggtcaatcgaatgtaatccggaatcattcagcatagacaaggcgaaagcgtattcaaagagcggcgcgacgcggttgacgttcggcgtccagtcgctgaacgacagggaactgtcggtatgcggcaggattcacaattcggcgcggacgcttgaggtactgcgcgacgaacgcctatcaaccatgtttaactcaataggcgccgacatcatctacggcctacccggccagacaatcgacacgttaaccgctaccctatcgtccatcctatcaatcccgcgaataaaacacctctccgcctacgagttgacaatagccgatgatacgcccttcggcagacacggtaaaatactgccgcgaccggacgaggacgcgatagccgagatgtacgagctaatcggcaaacgctgcgccgagcgaggaatgacgcagtacgaagtctcaaactacgcgatagagggatacgaatccatccacaataaagcatactggttgcgcaaaccctacataggccttggcgcgtcggcgcactcgtacatccatcccaagcgttggggtaatgtttgtgatgtgaatcgatacatatcatcgctatcgtcaggccaaaagccggtagaatttgaggaagtattgactgacagggaattagccgaggaaatgctttttctaggatttaggaacgccgacggtattgacaaacgcgagttagaaactcgcataggccaccggctttgcgataccggtggtcagagagagtcattactacgtgagtacataaaaaccgggctattgatcgattccgaagaacggctgatcccaacgtctaaggggatgctgttcgcggacatgatggctttgggggttattgttttattgtaa

SEQ ID NO: 71614 - protein, 388 aa, Unknown
  Obtained from environmental sample
  DOMAIN (6)...(185): Radical SAM superfamily
  misc_feature (1)..(388): Xaa is any amino acid
MPYGEINKLRRFARNDGHCEERSDEAIQKCNNALINQYIDALINEWNIYESAEMFDVHCIDTVYIGGGTPSILGIDMWERLDRELFSRIDKTGIKEWSIECNPESFSIDKAKAYSKSGATRLTFGVQSLNDRELSVCGRIHNSARTLEVLRDERLSTMFNSIGADIIYGLPGQTIDTLTATLSSILSIPRIKHLSAYELTIADDTPFGRHGKILPRPDEDAIAEMYELIGKRCAERGMTQYEVSNYAIEGYESIHNKAYWLRKPYIGLGASAHSYIHPKRWGNVCDVNRYISSLSSGQKPVEFEEVLTDRELAEEMLFLGFRNADGIDKRELETRIGHRLCDTGGQRESLLREYIKTGLLIDSEERLIPTSKGMLFADMMALGVIVLL

SEQ ID NO: 71615 - DNA, 2208 bp, Unknown
  Obtained from environmental sample
  misc_feature (1)..(2208): n is a, c, g, or t
atgctccggaccgggcgtgcccttcgtgataacctgcttcgtggccgtgaacgtcttcgacttcaacttgtagttcgaagacttctcggtcagctccacagtacccgaaaccgtcttgtccgtgccgaccgtcgccgtgttgtacgacaagctcacggtgtaaccctcttcgaccccgtaagttatggtggtcagcggcagcttgttcgcgtccaagaacttgatgccgggatcggaaccctcgatcacgacgttcttcttcccgtcgaaaggcttcgtgaacgtgtacgtcgccgccgggtcgaagtcgatcgtcataggctcgatcttgaacgtccccgtcagcgtacccgtgtagttgtttatgcccttgatgacgatcttcgccgtgccggcgttcgtcaggctctcctcgtcctgcgtgtcgaagtcccaagcctcgtcccgcgcctcgacgccgatgtcgcccatcctctgcagaacgcggttgttgccgtcggtcaccttgatacggtcgtacgccttcatcttgccgtcgtacacaagctcctccttcaagaacgaaatctccatcttcgcgttcttgaggtctctcggcaagacggtgaacgttatctcctggctgaacccggcggacgggaacccgagcgtgcccggcttcgcctccatcttcacgacgacggagtactcgccggcgaacataacgccgttcaacgtagtcgtgtcgccggacttgcccttaggatccgcgaacttgtcgttcgccttccgcaagaacgacttgctgtgcccgatcgtcgccgccgcgccgctcaccgccgtgtacgtgatagacgtcacctcgtacgtgttgttgttgccgtaaagcttattgtccgtgacgtcgaccacgggaaggtcaataccgtaaaccttgcccggctcccacgtagcccactggaccgtggaaccgactatcgcgccgacacgcttgccgctgtaatggcggaccacgccgtcgccggccgagatgctcacagggtacccgatgatcgcgaacgaccccgaatatccgacctcggtcttcccgccagacgtcaatgtcacctcaaacgagtaaacgccgttgagaccggtctcccagtccggctccttatactccttcttctcaaccgacgcctttacgttcgacgtgttggtcaaagaaccccaagcgttcactatcaagtcctctactatcttgcgggccgcagcttcggtgcccacgaccgactgctcgtactcggccttcagtcccgccatcgcggacgccagctcgctcaccgcggccgtcatcgcgtccttcacagggctgaacgtcgccgttatgacgagatccccgttcgttaccgtcggcgccgtcggctcgggcgttacgctgttgccgaggaaatttctccaagcgtacgtgccgccgtcgaatttgtaattggaatttggagtcagcgtcagagtcgccgtataaacgttcgccccgccctccgtgtaaacgaaacttccgtcccacgcggcggtcggtgtcggcgtcgtctgcgcccacgccagcttagccgtgaagaacgacttgaacgcgtcggagccgtacaccttctcgtaattgctcgagaagttggccgtcggcgtgtacttatcgcccccgaccggcgtcttaatcgtcatcacgaattcgccgtccgcgtcgacctgcgccggcactacggtgaaatcgactttcgcgctcgtccccgtgtagttgccggaaccggaggcggacagccaaattttcgcgttcttaggacgctcaggcgtggaaacgctctcgaaattctcccactggacggttacgttggaaccgacgagatcggccgaccaagtggtgaaatccaccggagtcgtcgccggcgttatcgcgccgacaacgggcttgacaggattcggggaatacgtcatgtttataccgcttccgccgctcggccaagcgtctccggtaacggccgaaatcacaacgccgttaagcttcttcggcgaaacaaccagcgagaaacccgacccgtcgacgccgtcattgcccaaaagaactccggtgccgccgctgccgtccgtcacggtcgtctttaccgtatacgttccggccttcaaagtggccgctccgctggcaagagtggttgtcttcgtcactttcccccctaccgcgtccgcggaagcgattga

SEQ ID NO: 71616 - protein, 735 aa, Unknown
  Obtained from environmental sample
  misc_feature (1)..(735): Xaa is any amino acid
MLRTGRALRDNLLRGRERLRLQLVVRRLLGQLHSTRNRLVRADRRRVVRQAHGVTLFDPVSYGGQRQLVRVQELDAGIGTLDHDVLLPVERLRERVRRRRVEVDRHRLDLERPRQRTRVVVYALDDDLRRAGVRQALLVLRVEVPSLVPRLDADVAHPLQNAVVAVGHLDTVVRLHLAVVHKLLLQERNLHLRVLEVSRQDGERYLLAEPGGREPERARLRLHLHDDGVLAGEHNAVQRSRVAGLALRIRELVVRLPQERLAVPDRRRRAAHRRVRDRRHLVRVVVAVKLIVRDVDHGKVNTVNLARLPRSPLDRGTDYRADTLAAVMADHAVAGRDAHRVPDDRERPRISDLGLPARRQCHLKRVNAVETGLPVRLLILLLLNRRLYVRRVGQRTPSVHYQVLYYLAGRSFGAHDRLLVLGLQSRHRGRQLAHRGRHRVLHRAERRRYDEIPVRYRRRRRLGRYAVAEEISPSVRAAVEFVIGIWSQRQSRRINVRPALRVNETSVPRGGRCRRRLRPRQLSREERLERVGAVHLLVIAREVGRRRVLIAPDRRLNRHHEFAVRVDLRRHYGEIDFRARPRVVAGTGGGQPNFRVLRTLRRGNALEILPLDGYVGTDEIGRPSGEIHRSRRRRYRADNGLDRIRGIRHVYTASAARPSVSGNGRNHNAVKLLRRNNQRETRPVDAVIAQKNSGAAAAVRHGRLYRIRSGLQSGRSAGKSGCLRHFPPYRVRGSD

SEQ ID NO: 71617 - DNA, 942 bp, Unknown
  Obtained from environmental sample
  misc_feature (1)..(942): n is a, c, g, or t
gtgttgggggaagggctttttgaaaaatgcaccagccttgccaacataacaatacctaacggcgttaccgggattgggtttggagctttttccggttgcaccagtcttgccaacgtaacaataccaaacagcgttaccagcattgagcaagaggttttttacaattgcaccagccttgccagcgttaccatagggaacggcgttaccagcattggggataacgcttttagctcttgtagtaaccttaccgcaataaatgttgatccggctaataccacatatagctcagagaacggcataatgtacaacaaagctaaaaccgctattgtcttagtcccgcgcagaataaccggagcgataaccatacccaatagcgttacaagcattggggacggtgcttttagaggctgtaccagccttgccagcgttaccataccgaacagcgttaccagcatcgggggtagtgctttttacggttgcaccagccttaccagcgttaccataccgaacagcgttaccagcatcgggggtagtgctttttacggttgcaccagccttaccagcgttaccataccgaacagcgttaccagcattggggagaccgctttttcctattgtgaaagccttaccagcgtaaccataggaagcggcgttaccagcattgggaatgtggcttttggcgagagtaccggccttaccaacgtaaccataccaagcaacctagcccgcattgggatacaggcttttggcggctgtaccaaccttaccagcgtaacgtttgaagcaagacgcaacatatcagacgcgaattttggagactatgcctttcctgaagggtctgatggatggggaacctaccatacctttaagaatgcctatagtacaggaaaatccgtaacgtatacaagggcaagcggcggcacaacgtgcgcgaagatgtaa

SEQ ID NO: 71618 - protein, 313 aa, Unknown
  Obtained from environmental sample
  misc_feature (1)..(313): Xaa is any amino acid
MLGEGLFEKCTSLANITIPNGVTGIGFGAFSGCTSLANVTIPNSVTSIEQEVFYNCTSLASVTIGNGVTSIGDNAFSSCSNLTAINVDPANTTYSSENGIMYNKAKTAIVLVPRRITGAITIPNSVTSIGDGAFRGCTSLASVTIPNSVTSIGGSAFYGCTSLTSVTIPNSVTSIGGSAFYGCTSLTSVTIPNSVTSIGETAFSYCESLTSVTIGSGVTSIGNVAFGESTGLTNVTIPSNLARIGIQAFGGCTNLTSVTFEARRNISDANFGDYAFPEGSDGWGTYHTFKNAYSTGKSVTYTRASGGTTCAKM

SEQ ID NO: 71619 - DNA, 561 bp, Unknown
  Obtained from environmental sample
  misc_feature (1)..(561): n is a, c, g, or t
atgaaaaggaaagtgtttttagtattggcgctttttgcgctcatggcggcggcggttttcgcacagacggaagccgattttttgacaaagaacagcagcgacggcaaatcggttacaattcgctcttacaagggaaaagcaacggcggtcaacattccggcgaaaataaagaatttgcccgttaccgaaattgaaagaggggctttttctaaaaataacagtattaccagcgtaataataccggacagtgttaccgccattggggatactgcttttggcggatgctccagccttaccagcgtaacattacctgccaactccaattatacagccattaaagatttaactttttacggttgccaaaaacttaccaacattacaataccgaacagtgttaccagcattgggaagaatgcttttggcggttgtaccagccttaccagcgtaacaatacctaacagcgttaccagcattgggcaagcggctttttacggttgcgccagccttaccggcgtaaccataggaaacagcgttaccagtgttgggggaagggctttttga

SEQ ID NO: 71620 - protein, 186 aa, Unknown
  Obtained from environmental sample
  SIGNAL (1)...(21)
  misc_feature (1)..(186): Xaa is any amino acid
MKRKVFLVLALFALMAAAVFAQTEADFLTKNSSDGKSVTIRSYKGKATAVNIPAKIKNLPVTEIERGAFSKNNSITSVIIPDSVTAIGDTAFGGCSSLTSVTLPANSNYTAIKDLTFYGCQKLTNITIPNSVTSIGKNAFGGCTSLTSVTIPNSVTSIGQAAFYGCASLTGVTIGNSVTSVGGRAF

SEQ ID NO: 71621 - DNA, 990 bp, Unknown
  Obtained from environmental sample
  misc_feature (1)..(990): n is a, c, g, or t
ttgtacgcccagacggaagccgattttacggtaagcaagtcgaaagacggtaaatcgatttcgattgacgagtacaatggaaaagcaacggcggtcaacattccggcaaagatacagaatttgcccgttagtagcttttattttggggacaacaagatcatcacaagcgtaattataccaagcggaattacaaaaattcaggaggttgcttttaagagttgctctaaccttaccagtgttaccatacccaacaccgttaccagtattgaaagaggggcttttttatcttgctccaaacttacaagcataacaatacccaatagcgttaccaccattgggaatgaggctttttccggttgcaccagccttaccagtgtaacaatacccgcaagcgttaccagcattgggggtaatgcttttaaagactgcaacaaacttacaagcgtaacattcggtggcgcaattccgtcaagcggtttcgtcgttgccgctttcagcggtttaggcgacattcgtgacaagtaccttgccgcaggcggaggagccggaacgtacacgaaaagcggcacaacatggacgaaaggcgcatcagccaccgctgcgccagccgccgccggtactacagggcttaagtttgatcttaccaaagacggaaagggttacatcgtcagcaggggaacgttacacccaacctcagatgccaatgtggttatacccgccacatacaataatttgcccgtaactactgtcgccaatacagggttcaacgaatgtgctttaattcccagtgtgaccataccggcgagcgtaaccaatattgatttagcggcttttagcggttgcgccagtcttaacagcgtaacctttgggggggcgaatactagatttaaccctcaagacttccccgaaggcggcgacttactcgccaagtacaaagcaggaggagccggaacatacacgagaagcggaaaaacatggacgaaaaagtag

SEQ ID NO: 71622 - protein, 329 aa, Unknown
  Obtained from environmental sample
  misc_feature (1)..(329): Xaa is any amino acid
MYAQTEADFTVSKSKDGKSISIDEYNGKATAVNIPAKIQNLPVSSFYFGDNKIITSVIIPSGITKIQEVAFKSCSNLTSVTIPNTVTSIERGAFLSCSKLTSITIPNSVTTIGNEAFSGCTSLTSVTIPASVTSIGGNAFKDCNKLTSVTFGGAIPSSGFVVAAFSGLGDIRDKYLAAGGGAGTYTKSGTTWTKGASATAAPAAAGTTGLKFDLTKDGKGYIVSRGTLHPTSDANVVIPATYNNLPVTTVANTGFNECALIPSVTIPASVTNIDLAAFSGCASLNSVTFGGANTRFNPQDFPEGGDLLAKYKAGGAGTYTRSGKTWTKK

SEQ ID NO: 71623 - DNA, 2643 bp, Unknown
  Obtained from environmental sample
  misc_feature (1)..(2643): n is a, c, g, or t
ttgcgttcggtacggaatgggacttgtacagcaagtattttgctgtttcaggcggcggcgcgggaacgtatacgaggccggacaccacaagttcaacatggacgaaacgtccttagaacgctagcgcaacgacaacaggggaaaattaacagtcgtcatggggtatcggaaatgaaactatcgcaaatgtcaatcaaaagcaaaatgcttgttttttcaggccttttctttatgaccgtagccgtcctcggaacagcggcgttcttcttttcaatgaggcagatagtccggttaagcgcggcgcaaaaactgacgcaatttgtagaaaccaaaatatttcaactggaaaaatcggtcgttaaagaaatagccatagccgttaaaatggctgactcgcctttaataaaagagcattttttgaatcccgcagatcaaacgcttaaagaacttgcctttagggaatttgcgggatacagaagggcgtttaccggaaacaatattttctggataagcgacacggacaaaaggtattttttcggcgatgagtatgtgtacactttagatatatccgaacccgattcggcgtggtatcccgcaacattaaaacaaaaggaactatacagttttaatataaattatgatatcggagtacaaaagacaatgctgtggatcaacgccccggtctttgaaagcggacgcgcaatcggcattgttgggacaggcatagaccttacaggttttattgactctctgtatgcggactttgatccttccatgcccttctatctgttcaataaattatcagaaataacaggagcgcgggatcattctctggtaatcaacaagaaaacaataaacgattactttggggaggcgggagcttttattcttaaatcagcagagcaatccggcaaagttccgcaaacattttatcttggcaacagcgaatatgtcgtgggaagtattgaaagcctggactggcatatcaccgccattcttcccattaccgctctggacaccctgaacaacggagtaaccatattcttcatggtaatgctggcggtcatagcggtcattctcattatttcttttatatttatcagcagccttctcaaacccatgcgttacatgatacaaacgctggatcaaatagctaaaaaccgggacctcacccggcggcttgaatttaagcaccatgacgaaattggaacagtgggtgatttttttaaccgtacttttgaagaattcagaattcttgtagggacaataaaatataaaatcaacgggcttaaccataccagttttgagctttccgacaatatgagcaaaacctcgacagccgtagagaagatttcgtctaaccttgacaacatggaaaaccttgtagtcaaacaggaaaacggagcgttagtagcaggcgaggcggtaggggctattaaaacaaatattgacagccttaacaaaatgatagaacaacaggctgaaagcgtagataagtcttcttccgcaatagaggaaatgaccgccaacattcattcggtaacacagacgcttgcggaaaacagcaagaatgtcgatgttttagtcgaagcgtcggagaacggcaaaacaggactccagaccgtcgcgcaggagatacgggaaatagcccgtgattccgaagggttgctggaaataaactcggtgatgaacaatatcgcaagccagaccaacctgctttcgatgaacgccgcgattgaagcggctcatgccggggaagtcggcaaaggctttgccgtagtcgccgatgaaatccgcaaacttgccgagtcgtcaagcaagcagtcaaaaaccaccgctacaatgctaaaaaaaataaaagcgtccatagacaacattacaaaatcgtctaatgacgtattagaccgttttggcgctatagactcaagcgtaaaaacagtttccgagcatgaacaaaatatccttaaagcgatgcaggaacaggaaaccggagggaagcaaatactggaatccataggtatattgagagacataacccattcggtaaaaaaagggtctgatgacatggcaaaatcaggcgaaactttagtcaaggaaactgacgatttcataaaaaccagccaggagacagcggaaggcatgaacgagatactgacaggcattaaccagataaaatcttcagtgaaccatgtaaatgaaatgagccatgaaaacaacagtaactttgaattgttaaaacaggaaacggataaatttaatgatactgtcggcaacgaaaaacaaaaagttcttatagtagatgacgacagtattcatctcgaaatggtggaagcggtattacagagtgagtatgaaatatctaccgccaaatccggaaaagaagcgttaggtttattctatcaaggactcgttccccaattagtattattggacttaataatgccggatatggacggttgggatatttacaaaagaataaaagcaataagcggcttacacgataccccgatagcgtttttcacatcttcaaacgatccaaaagatataaagcacgcgcatgaaatgagcgcggttgatttcattaaaaagccatacgataaagacgatctgttacacagggtggggagaattattaagaaatga

SEQ ID NO: 71624 - protein, 880 aa, Unknown
  Obtained from environmental sample
  SIGNAL (1)...(20)
  DOMAIN (348)...(418): HAMP domain
  misc_feature (1)..(880): Xaa is any amino acid
MRSVRNGTCTASILLFQAAARERIRGRTPQVQHGRNVLRTLAQRQQGKINSRHGVSEMKLSQMSIKSKMLVFSGLFFMTVAVLGTAAFFFSMRQIVRLSAAQKLTQFVETKIFQLEKSVVKEIAIAVKMADSPLIKEHFLNPADQTLKELAFREFAGYRRAFTGNNIFWISDTDKRYFFGDEYVYTLDISEPDSAWYPATLKQKELYSFNINYDIGVQKTMLWINAPVFESGRAIGIVGTGIDLTGFIDSLYADFDPSMPFYLFNKLSEITGARDHSLVINKKTINDYFGEAGAFILKSAEQSGKVPQTFYLGNSEYVVGSIESLDWHITAILPITALDTLNNGVTIFFMVMLAVIAVILIISFIFISSLLKPMRYMIQTLDQIAKNRDLTRRLEFKHHDEIGTVGDFFNRTFEEFRILVGTIKYKINGLNHTSFELSDNMSKTSTAVEKISSNLDNMENLVVKQENGALVAGEAVGAIKTNIDSLNKMIEQQAESVDKSSSAIEEMTANIHSVTQTLAENSKNVDVLVEASENGKTGLQTVAQEIREIARDSEGLLEINSVMNNIASQTNLLSMNAAIEAAHAGEVGKGFAVVADEIRKLAESSSKQSKTTATMLKKIKASIDNITKSSNDVLDRFGAIDSSVKTVSEHEQNILKAMQEQETGGKQILESIGILRDITHSVKKGSDDMAKSGETLVKETDDFIKTSQETAEGMNEILTGINQIKSSVNHVNEMSHENNSNFELLKQETDKFNDTVGNEKQKVLIVDDDSIHLEMVEAVLQSEYEISTAKSGKEALGLFYQGLVPQLVLLDLIMPDMDGWDIYKRIKAISGLHDTPIAFFTSSNDPKDIKHAHEMSAVDFIKKPYDKDDLLHRVGRIIKK

SEQ ID NO: 71625 - DNA, 1317 bp, Unknown
  Obtained from environmental sample
  misc_feature (1)..(1317): n is a, c, g, or t
atgaaaaaggagtttcgtatgaaaagaaatgtatcttgtattaaaaacaagaatgtcttggtgtgcgttttattagccgtagcgttgattgccgctctggcgtttaccgcgtgcgatcaggatagtaaccccgacaatgatcccgtacaaggcggcaatcagactaattccggcggcaatcagaccgaccctggcggtaatcaaaccgatcctagcggcactccgaccgaccctggcggtaatcaaaccgatcctagcggcactccgaccgaccctggcggtactccaaccctcaccggcattacggcagtctataacagcatggaacctgttttccggaacacgccgcttgacgacttgaaaaccggcttgaccgtaacggcggcatacagcaacggcacaaatcaaaccgtaacagattacgcattaagcggcacactggctgtcggcacaagcacaataaccgtaacttacgaaagcaaaacaaccaccttcaatgtaaccgttgaagttgatccggaggttgttgcaattgacaacttgtatttatatttaggagggaaaaccgttaataccccgaacacgccttaccgtatcgccataaacggcattaccgatgcaaatgccggcacagcttttggacctggcggaatcagagacaaaatactacagtataggtataatgaggatgatccatcatatgctagatatgtctacattgacctttccggcaacgacataacagctcttccggcttctgctttctcggccttaaacaatcttatcggcataaaactaccgaacagcattaccagcattgggggtagcgctttttccaattgcgggagccttaccagcataaccattccggacagtgtttccagcattgggactatggcttttgacggatgcaccagccttgccagcgtaaccataccccataacgttaccagtattgggactttggctttttacggatgctccagccttgccagcgtaacaatactcgacggcgttctcagccttgggaatgccgcttttcagcgttgcaccagccttaccagcgtaaccataccggacagcgttaccaccattgggagaaacgcttttaacaattgtaccagccttaccagcgtaacgtttaatggcaatattcctgtagagagcggtccgtcgtctaatttaactggtttctcatcgattgcgttcggtacggaatgggacttgtacagcaagtattttgctgtttcaggcggcggcgcgggaacgtatacgaggccggacaccacaagttcaacatggacgaaacgtccttag

SEQ ID NO: 71626 - protein, 438 aa, Unknown
  Obtained from environmental sample
  misc_feature (1)..(438): Xaa is any amino acid
MKKEFRMKRNVSCIKNKNVLVCVLLAVALIAALAFTACDQDSNPDNDPVQGGNQTNSGGNQTDPGGNQTDPSGTPTDPGGNQTDPSGTPTDPGGTPTLTGITAVYNSMEPVFRNTPLDDLKTGLTVTAAYSNGTNQTVTDYALSGTLAVGTSTITVTYESKTTTFNVTVEVDPEVVAIDNLYLYLGGKTVNTPNTPYRIAINGITDANAGTAFGPGGIRDKILQYRYNEDDPSYARYVYIDLSGNDITALPASAFSALNNLIGIKLPNSITSIGGSAFSNCGSLTSITIPDSVSSIGTMAFDGCTSLASVTIPHNVTSIGTLAFYGCSSLASVTILDGVLSLGNAAFQRCTSLTSVTIPDSVTTIGRNAFNNCTSLTSVTFNGNIPVESGPSSNLTGFSSIAFGTEWDLYSKYFAVSGGGAGTYTRPDTTSSTWTKRP

SEQ ID NO: 71627 - DNA, 915 bp, Unknown
  Obtained from environmental sample
  misc_feature (1)..(915): n is a, c, g, or t
atgggtcaataccagccgcaaattcactgggaacttacccgcgccgcggtgagcattgccgcatggtgggtgttgttttaccgtctccaccgacccgaagcgccgtggcggcgcattgtccttcttattgcaattccggcagcttacgccttctggatattcgtaccaatgagcattgtcgccaacgccgtttcatgggcggtcattaccgtagtctttgccttcatctgcggggatttgcgccgatccctatttaccgcgtttttctatatcggcatggaagcatccatcgacaacacccgctccgccttgattgccctgctgtttaaccggtttttcccttcccattcaccctatcaatatttacagtataacctgcaatacctagtcgtgtttgccttgtgctgttgttactacatggtaatgagacgatattctggcaagttaccgcttgccagttggatactcataattatcccgcctttgattctgtgggcggttcttacttatttcgcttatgtcgcagatccgcttttgatggaacagggcatcaatatctatggtcccggtttctgcttcggtctattctgtatattactgaatcttgggatactctatctttatatccgccaactgattattaccgatgcccagcgattaacaatatctatctccgacgcggagccgatctggacgccggagaaaggactgtcggataatttttgtaaacgctaccaatttaccgacagagaaaaagacattgttgaagttatgatgcaaggaaagagcaacaaagaaatctctgatactctgctcatttcaatcaggacagtgggcgcttatcttcaaaatgtttacaaaaaaaccggcgcgccgaaccgcttcgccctttactcgctgataaaaggaaattag

SEQ ID NO: 71628 - protein, 304 aa, Unknown
  Obtained from environmental sample
  DOMAIN (244)...(301): Bacterial regulatory proteins, luxR family
  misc_feature (1)..(304): Xaa is any amino acid
MGQYQPQIHWELTRAAVSIAAWWVLFYRLHRPEAPWRRIVLLIAIPAAYAFWIFVPMSIVANAVSWAVITVVFAFICGDLRRSLFTAFFYIGMEASIDNTRSALIALLFNRFFPSHSPYQYLQYNLQYLVVFALCCCYYMVMRRYSGKLPLASWILIIIPPLILWAVLTYFAYVADPLLMEQGINIYGPGFCFGLFCILLNLGILYLYIRQLIITDAQRLTISISDAEPIWTPEKGLSDNFCKRYQFTDREKDIVEVMMQGKSNKEISDTLLISIRTVGAYLQNVYKKTGAPNRFALYSLIKGN

SEQ ID NO: 71629 - DNA, 1620 bp, Unknown
  Obtained from environmental sample
  misc_feature (1)..(1620): n is a, c, g, or t
gtgaacgatcttacctttacgataacagaactgcgttatgtgtcagcccttgtgcgccagccgaacggcgtttacaaataccagtcaattcaaaaagagtatcctttatcctcaaagcagattaccatacccgccgccggccttgagtacagcctgcccacaaacacgcccggcgattataaacttttaatcacgggtcccggcgatttggaatacaactctctcaatttcagcgtcgccggttcggaaaacgttaaccgcagtcttaaccgcacggcggaacttgaaattacattgaacaaaaccgatttcaaaaacggcgaggaaattgaactgatgatcaaagcgccttacgcgggagcggggcttatcaccattgagcgtgacaaagtttacgcgcatcactggttcagaagcagcggggaaacttccatgcagaccatcacggttcccgccgatcttgaagggaacggttatgtgaacgtccactatttaagatcgcaggattcgccggaaatctttatgtcccccttaagttacggagcggttcctttctccatcagcaaagaaaaccgcaccaacaggatcaagctggacattccgggcgaagcaaaaccgggcgaggattttgtaataaaatactccacttcccgcaaaggaaagataattgttttcgcggttgacgaaggcatacttcagcttgccggatatcgtactcccgatccgctggcgttctttttcaggaaacgcgctcttgaagtgcgtaccgcacaaatactcgacatggtgcttccccgttattccattgttcaaagtttagcggcaatgggcggcggcgccggttttgaggaacttgcgggtaaccttaacccgttcaagcgcaagcagaatgttccggttgcttactggtcggggataattgacgccggtcctgaagtaaaagaagtacgataccgcgtgccggattactttaacggaacattaagagtaatggccgtcgccgtaaacgacagcgcgataggcgcggccgacgacagggccttaatccgcagcacctttatcatttcacctaacgcgcctatgctggcggctcccggagacgaatttgacgtttcgcttactgtgaccaacaaccagaagggcgcgggagaaaaaggcaaggtaagcctgaaagcggttccttcggaacattttactatttcgggtaacaaggaatttaatctggacattcccgaaggcaaggataaaaccctaaccattcaggttaaagccgcgggcaaacttggagcggcgcagatacgctttatcgcctccaacggcggcgaaacctcggaactttccgcttatatgagcgtgcgtcccgccgtaccgtaccgggtatcgctttattcgggagcgataaaaaacaagagcgcggagacagcgatagaccgcaatctttacgaggaatttaacacaagggaagtttcgctttcttatcttcctatgggaatagcaaaagggctttcattcttccttaacaacttcccctacggctgttctgaacaattacaagcgcggtcttccctttcctgtatcccaatcttttcaggaacttggttacacaaaagcgcaggctga

SEQ ID NO: 71630 - protein, 539 aa, Unknown
  Obtained from environmental sample
  DOMAIN (91)...(237): Alpha-2-macroglobulin family N-terminal region
  misc_feature (1)..(539): Xaa is any amino acid
MNDLTFTITELRYVSALVRQPNGVYKYQSIQKEYPLSSKQITIPAAGLEYSLPTNTPGDYKLLITGPGDLEYNSLNFSVAGSENVNRSLNRTAELEITLNKTDFKNGEEIELMIKAPYAGAGLITIERDKVYAHHWFRSSGETSMQTITVPADLEGNGYVNVHYLRSQDSPEIFMSPLSYGAVPFSISKENRTNRIKLDIPGEAKPGEDFVIKYSTSRKGKIIVFAVDEGILQLAGYRTPDPLAFFFRKRALEVRTAQILDMVLPRYSIVQSLAAMGGGAGFEELAGNLNPFKRKQNVPVAYWSGIIDAGPEVKEVRYRVPDYFNGTLRVMAVAVNDSAIGAADDRALIRSTFIISPNAPMLAAPGDEFDVSLTVTNNQKGAGEKGKVSLKAVPSEHFTISGNKEFNLDIPEGKDKTLTIQVKAAGKLGAAQIRFIASNGGETSELSAYMSVRPAVPYRVSLYSGAIKNKSAETAIDRNLYEEFNTREVSLSYLPMGIAKGLSFFLNNFPYGCSEQLQARSSLSCIPIFSGTWLHKSAG

SEQ ID NO: 71631 - DNA, 1224 bp, Unknown
  Obtained from environmental sample
  misc_feature (1)..(1224): n is a, c, g, or t
atgaaagaaaacggcgctatcggtatgtggacttcccgttccttcgacgatccgttaataactatctatgcggcgcatttccttaccgaagcgcgtaacgccaactattatgtttcgtccgcaatgatggataaattgcttcaggcttgccgtaatatcgcttccggttcgggatcgagtttatatgatttttccaaccgttcttacgccatttatattctaactttgaacgaaattgttacaactccgttaattgaatcgcttaagaaagatatgagcagaaacgatgagacgcaaacgggtattgcgggattgtatcttgccggaagttacgctctattgcaaaaaacttccgatgcttcttccattctgggaaaaataaagcgggcgatggctagggacaacagtttccgttatgttgacgatcttatgtatcattcgatatacctcaatattatcgcaaggcatttcccccagcggttacgggatatatcggaatccttgttagttgatatggctcagcaaatggaaaggcagtcatatacaactatttccgcaaactacgctcttatggcaattgacgcttacatgaaagttattccaaccgctgaaacaggacgctttgttgtgcaggaaattttaaaagacaaccagcgccgtgatttgaagccgaccggaaccaacttgttcagagttccgttttccgctaacgccgctaaaatcagtctggataacaaggaaaaccttaatctgttttatcagataacagccgccggttttgacagggaattgccgtctaaagaaataaagaacggtatagaagtttacagagaatttcttgacagttcgggaaggtctgtaacttccgttaaagtgggcgatgtggttacggtaaaactcaatttccgcagtctttcaaacagcgagtaccgtgatgttgcgattgtcgatttatgccccgcaggtcttgagacggaaattgaatcggtgcgtcaggcttccaatcaatcgtcaagcgacggttggaaacccgattacgttgacattcgcgaggacaggctggtaatttacggctctgtaggaagcaggatatcaagtttcagctaccgagcgagagcgattaacgcgggcagttttgtaactccggctctttttgcggaagcgctttactacaagtctgtatgggcgctgcgtccgcagacttcgattaagatcgcgaaatga

SEQ ID NO: 71632 - protein, 407 aa, Unknown
  Obtained from environmental sample
  misc_feature (1)..(407): Xaa is any amino acid
MKENGAIGMWTSRSFDDPLITIYAAHFLTEARNANYYVSSAMMDKLLQACRNIASGSGSSLYDFSNRSYAIYILTLNEIVTTPLIESLKKDMSRNDETQTGIAGLYLAGSYALLQKTSDASSILGKIKRAMARDNSFRYVDDLMYHSIYLNIIARHFPQRLRDISESLLVDMAQQMERQSYTTISANYALMAIDAYMKVIPTAETGRFVVQEILKDNQRRDLKPTGTNLFRVPFSANAAKISLDNKENLNLFYQITAAGFDRELPSKEIKNGIEVYREFLDSSGRSVTSVKVGDVVTVKLNFRSLSNSEYRDVAIVDLCPAGLETEIESVRQASNQSSSDGWKPDYVDIREDRLVIYGSVGSRISSFSYRARAINAGSFVTPALFAEALYYKSVWALRPQTSIKIAK

SEQ ID NO: 71633 - DNA, 2457 bp, Unknown
  Obtained from environmental sample
  misc_feature (1)..(2457): n is a, c, g, or t
atgatatttaagtcccgaaaattcagactgcctaatctatcgcatctgcgttcgggactttctcggcttctcagtaatgtccgcagggtgaaggttcccattttaataccctgcggcatttttctcgcccttgttatttttctgataatcaacgccgcttttatagatatattaaacggcgtttctttttcccgagcctactttgacagaaacggcggactgcttaacatttttcttacaaccgacgacaaatatagactaaaggcaaatctcgccgattttccgcctgcgcttatcgaagcggctctgcttcaggaagatcgttatttttacgggcatatcggtattaaccctatggcaatgttaaaagccggctgggaaacatatataaaaaagaaccgcagaatgggcgcttcgactatcaccatgcagcttgcccgtctgcgttataacctgtatacccgaaacctgcccggaaagatagtacaaatttttacggcgtttttttttgagatatgttattcaaaacaggaaatattggaagcctatcttaacatggctccctgcggcggcaatgtcgaaggtttttcgacggcggcatggtattacttcggcaaagacgtaaaagaactttcgttatctgaaattttaagccttgtcgttattcctcaaaaccccgcaaagcgcgcgccgattaacagaagggcttcgtcagaattgcttgattcccgcaaaacgctgtacgaggcgtgggttgaacagcaccccgaggacattctgctggaaacggaaatggatatgcccccttttcttgtaaatcaatttccccgccgccttcttcacctaacagagtatcttaatacaatgtctatgccccgcgctgatatgccgcctacaaaccgttaccgcactacaatcgacataactatgcaaaatatgtgcgaacgtgaattggaattttatcttgtacgaaacaggggatgggggataaaaaacggcagtcttcttcttgttgattattcaaacatggaagtgttggcggcgataggttcggcggattattttgacgatgatattcaggggcaggttaacggttttgcttccaaacgctcgcccggatcaacccttaaaccttttatttacgcaatagcgctggagcagggattaattcatcctgaaaaaatgctaaaagatacgcccatcggtttcagcgaatatacgcctgataattttcgaggcgtttttaagggacctgtaagcgcatggtacgctcttgtagacagcagaaacattcccgccgtacaactagcgaaagatatacataatcccgacctctacgattttcttaaaatggcgggagtttcagggttaaaagaaaaaggacattacggtctttcaatagtgttgggaagcgcggatttaacaatgctggaattggcgtctctctacgccgcccttgccaacggcggagtaaaaaaagacctgcgttttctttcggcaagagataatttttacacaagcggcgcatctaggggcagcgcgcagggggagaaaattttaacctccgccgcagcggcgattaccgtgaaaatgctggaaagaaaccccgctcccgatgatttgcgtataaagaccgtccgtttggctcctgtcgcctacaagacaggaacttcaatcggttttaaggacgcatggtctatcgctatttttgatcgttatgtgctatgcgtgtggtttgggaatttctcgggcgagggaaacaacgcgtttatcggcagacttagcgccgcccctttgtgttttaatataatagactcgatacttgccgagactccttctgaaaatctttacgcgcgaaaacccctgccgcctgaagttaaagaagttcaagtatgcgctgtttcgggcgacattccgtccgacgactgtccgcaacttatagaaactctttttattccgggcgtttctccgattaaccgctgccgaattcaccgcagggtttatatcgatacccgcacagggtacagaacaaacgagaccgaaggcaaatatatacgcagcgaagtccgtgagttttggtcctctgatattctggaaatttttgaagctgccggtcttccccgtttttcagcgccgccatatccgcccaattcatcagacggcgcgggggcaaacggttttcctcccgtaataatttcgcctctttccaaaaccgattatataatccgttccaaacttccgccggacagccgatataatcaagtggtgcttcttgcctctgcggatcaagatgtaagcgaacttttctggtttgcaaacgcaaattttttaggcagagcgaaacccggagaacgttttgtctggtctcccgaagcgggcatttgggatatttcagtggtagacaatttaggccgttcttcgggagtccgtgtgcatgtggaggcttcaggagagtga

SEQ ID NO: 71634 - protein, 818 aa, Unknown
  Obtained from environmental sample
  DOMAIN (718)...(811): Penicillin-Binding Protein C-terminus Family
  misc_feature (1)..(818): Xaa is any amino acid
MIFKSRKFRLPNLSHLRSGLSRLLSNVRRVKVPILIPCGIFLALVIFLIINAAFIDILNGVSFSRAYFDRNGGLLNIFLTTDDKYRLKANLADFPPALIEAALLQEDRYFYGHIGINPMAMLKAGWETYIKKNRRMGASTITMQLARLRYNLYTRNLPGKIVQIFTAFFFEICYSKQEILEAYLNMAPCGGNVEGFSTAAWYYFGKDVKELSLSEILSLVVIPQNPAKRAPINRRASSELLDSRKTLYEAWVEQHPEDILLETEMDMPPFLVNQFPRRLLHLTEYLNTMSMPRADMPPTNRYRTTIDITMQNMCERELEFYLVRNRGWGIKNGSLLLVDYSNMEVLAAIGSADYFDDDIQGQVNGFASKRSPGSTLKPFIYAIALEQGLIHPEKMLKDTPIGFSEYTPDNFRGVFKGPVSAWYALVDSRNIPAVQLAKDIHNPDLYDFLKMAGVSGLKEKGHYGLSIVLGSADLTMLELASLYAALANGGVKKDLRFLSARDNFYTSGASRGSAQGEKILTSAAAAITVKMLERNPAPDDLRIKTVRLAPVAYKTGTSIGFKDAWSIAIFDRYVLCVWFGNFSGEGNNAFIGRLSAAPLCFNIIDSILAETPSENLYARKPLPPEVKEVQVCAVSGDIPSDDCPQLIETLFIPGVSPINRCRIHRRVYIDTRTGYRTNETEGKYIRSEVREFWSSDILEIFEAAGLPRFSAPPYPPNSSDGAGANGFPPVIISPLSKTDYIIRSKLPPDSRYNQVVLLASADQDVSELFWFANANFLGRAKPGERFVWSPEAGIWDISVVDNLGRSSGVRVHVEASGE

SEQ ID NO: 71635 - DNA, 4329 bp, Unknown
  Obtained from environmental sample
  misc_feature (1)..(4329): n is a, c, g, or t
atgagggacattcaagattttgattcgataatgatacggttggcctcgccggaaatgatccggtcgtggtcttatggcgaagttaaaaagcccgagacaattaactaccggactttgcgcccggaaaaagaagggcttttctgcgaaaaaatattcggcactaccaaagagtgggaatgttactgcggaaagtttaagtcgatacggtacaagggcgtcatctgcgaccgctgcggcgttgaagttacccactttaaggttcgccgcgaaaggatgggccatattgaattggcggcgcctgtttcgcacatctggtattaccgctctgtgccaagccgcatgggacttcttcttgaccttacaaccaacgccctgcgttcggttctgtattatgaaaaatacatcgtaattgattcgggagacaccggtcttaaaaaaggccagctcctttccgaggaagaatacagcgacgcgtataatcgtttcggcagcgcgttcaccgcgggaatgggcgctgaagcaatcagcatcctgcttgagaacatcgaccttgatcagttggcgggggaacttcgcgccaagatgatcgaaaaaggccccaagagcgacaagcgtctcttaaagcgcattgacatcgtggaaaatttccgcaattcggaaaacaagccccaatggatgatcctaaacgtgatacccgttatcccgccggaactgcgccctatggttcagcttgacggcggacgtttcgccacaagcgatcttaacgatctttaccgcagggtaattaacaggaacaaccgccttaaaagactgaaagaccttaccgcgcctgaaattattatccgcaacgaaaagcgtatgctgcaggaagcggtggacgcgttattcgacaattccaagaaaaagaaagtggtaaaaggttcgtccaacaggccgcttaaatcaatcagcgacatgctcaaaggcaagcaggggcgtttccgccagaacctgctcgggaagcgcgttgactattcggggcgctcggtaattacggtaggtcctgacctgcgaatgtggcagtgcggcattcccacaaagatggcgcttgagttgtttaagccctttataatgaaaaaacttgtagacaaggacgttgtcttcaatattaaaaaagcaaagtcgcttgtagagcaggaaacgccggaagttttcgcaattcttgacgaagttgtaaaagaacaccccgtgcttcttaaccgcgccccaaccctccacaggcttggtattcaggcttttgaacccgtgctggtagaggggaaagcgataaaactgcacccgcttgtctgtcacgcttttaacgcggactttgacggcgaccagatggcggttcacgtcccgctcacgcaggcggcccaaatggaatgttggacgctcatgctttccgcgcgcaaccttcttaaccctgccaacggcaagacaatcgtgtttccgtctcaggacatggttttgggcatcaacttccttacaagatttaaacaaaacgcgaaaaggcccggctcttcaaaaccggaaaccgccggcaagattccctattattcatccgtcgaagaagtgctgatggcggtggaaaacaaagctttggattggggagcggcgattaaggttaaaacgccccgtaagcttatttgggacaaggcgggccatgccgtagaagctgacgcaaaaggaataatagtaacatccgcgggcaggcttgtttttaacggcgagatgcccgaggatcttccctatattaattacgagcttaaagacaaggaattacgcgcccttattgagcatgtgttcaaggaaaaaggctcatgggttacggtgcaaatgctggacgcgataaaagctaccggctaccgttatgcgacaatattcggcgcgactataggcgtggatgatattgtgattccgaaagaaaagaccgaaatgatcaataaggcgaataaggacgttgagtcgatccagaagcagagaagagaaggttttattaccgaggaagaacgctataaccgcgtcgtggaaatttggacaagggcgaatgaagagcttacaagcaaaacaatgcagaccctggaattggacagggacggctttaactcaatctacatgatggcaaattccggcgcgcgcggaagccgcaaccagatccgccagcttgcgggcatgcgcggccttatggcgaagccgtctggagatattatcgagctccccattcgttcaaactttaaagaaggcctttcggtcatcgaattctttatttcaactaacggcgcgcgcaaaggtcttgcggataccgcccttaaaacggcggaagccggctaccttacccgccgtcttgtagacatcgcgcaggacatggttgtaaacgaggaagactgcggcacgattaacggtattgcctactcggcggtaaagcagggcgaagaaattgtcgaaccgttaagggaccgtatagtcggaaggtttacgcttgagcgcgttaaacatccgattacgggcgagcttataatcgacgtaaacgaggaaattaacgaagaacttgccgcggcgatcgaagacgcgggcgttgaatctgtgcgcataaggacggttttaacctgcgaagcgaaatacggcgtatgccggaaatgctacggacgcaaccttgccacaaaccgcaccgtagaaataggagaagccgtcggaacaatcgcggcgcagtctatcggacagcccggcactcagcttacaatgcgcaccttccacatcggcggcgttgcgaccaaggccagcgaggaaagccgcatcactttgaaatatccggtatatatcagaaatgtcgccggaacgcacctgacgcttgataacggccacttgctctttacccgcagaggacattctattgtcaacaaggtaatgaaagagtacaaaattgagaaatccgacaaacttgccgccgtagacggaaagaaaatcaaccgtggcgacgtgattatccataggggcggtcaggacatcatttcatcggaaatagcgtatgccatgattctgaagaataatgatgaagaaacgctttacttaatcggcccggatcaaaaaattgaaatcaggaacggttccgattttgaggcgcagatagggactgttgttgacgccgagaaaacaatcgccaccttcgacccgttctccgacccgattatcgcggaaaaaggcggaacggtaaaatttgaggatattattctgggcactactcttaatgaggtaatggacgaagacaccggcaatacggaaaagcgcataacagaatcccagcacgaaaaacagccgcgtatttttattgtagacgacaatgaaaacgaagtcgcgtcttatcctatgccgggcggcgcttacatcctggttgatgaaggagaaaaaatccacgcgggaagaacaatagcaaagacattaaaagaatccgcgagagcgatggatattacttccggtcttccgcgcgtaagcgagctgtttgaggcccgcaagccgaaaagcccggcggttcttgcgcaggtttccggaaccgtatatttccggggcatagtcaaaggcaagcggaaagttgttatagaagacgcgtttggcagggaaacttcacattttattccgatgaacaagaggctgctcgtacgcgacggcgacccgatagaagccggcgaacagctctgtatgggcgcgattaacccgcatgaagttctttacatacagggcgaaagcatgttacagcgttatctgatgaacgagatacagcaggtttaccgtctgcagggcgtgtccataaacgacaaacatataggcgtaataatccggcagatgatgcgcaaagtggaaatccgcaaagtaggcgacaccaagtttatacagggttcttccgtagacaaataccgtttccacgaggaaaacgccagagtaatcgcggaaggcggtcagcccgcaatcgccctgcctatgttccagggcattaccaaggcttcgcttaacattgattcgttcctgtcggccgccagcttccaggaaactacgcgggtacttacggacgccgccattaaaagttctacggattatctgcgcggcttaaaggaaaatatcatcataggccatcctattccggccggcaccggcataaagcgttaccgcaatgtgaaactcttcgatgaagaaagtcaggatttggacgagtatatgcatgaaatccttgataaacgcagacaggaagaggaagaactggcggaagcggccgtcgctcagccagaagaatttccggttgaagataacgacgattaa

SEQ ID NO: 71636 - protein, 1442 aa, Unknown
  Obtained from environmental sample
  DOMAIN (478)...(644): RNA polymerase Rpb1, domain 3
  misc_feature (1)..(1442): Xaa is any amino acid
MRDIQDFDSIMIRLASPEMIRSWSYGEVKKPETINYRTLRPEKEGLFCEKIFGTTKEWECYCGKFKSIRYKGVICDRCGVEVTHFKVRRERMGHIELAAPVSHIWYYRSVPSRMGLLLDLTTNALRSVLYYEKYIVIDSGDTGLKKGQLLSEEEYSDAYNRFGSAFTAGMGAEAISILLENIDLDQLAGELRAKMIEKGPKSDKRLLKRIDIVENFRNSENKPQWMILNVIPVIPPELRPMVQLDGGRFATSDLNDLYRRVINRNNRLKRLKDLTAPEIIIRNEKRMLQEAVDALFDNSKKKKVVKGSSNRPLKSISDMLKGKQGRFRQNLLGKRVDYSGRSVITVGPDLRMWQCGIPTKMALELFKPFIMKKLVDKDVVFNIKKAKSLVEQETPEVFAILDEVVKEHPVLLNRAPTLHRLGIQAFEPVLVEGKAIKLHPLVCHAFNADFDGDQMAVHVPLTQAAQMECWTLMLSARNLLNPANGKTIVFPSQDMVLGINFLTRFKQNAKRPGSSKPETAGKIPYYSSVEEVLMAVENKALDWGAAIKVKTPRKLIWDKAGHAVEADAKGIIVTSAGRLVFNGEMPEDLPYINYELKDKELRALIEHVFKEKGSWVTVQMLDAIKATGYRYATIFGATIGVDDIVIPKEKTEMINKANKDVESIQKQRREGFITEEERYNRVVEIWTRANEELTSKTMQTLELDRDGFNSIYMMANSGARGSRNQIRQLAGMRGLMAKPSGDIIELPIRSNFKEGLSVIEFFISTNGARKGLADTALKTAEAGYLTRRLVDIAQDMVVNEEDCGTINGIAYSAVKQGEEIVEPLRDRIVGRFTLERVKHPITGELIIDVNEEINEELAAAIEDAGVESVRIRTVLTCEAKYGVCRKCYGRNLATNRTVEIGEAVGTIAAQSIGQPGTQLTMRTFHIGGVATKASEESRITLKYPVYIRNVAGTHLTLDNGHLLFTRRGHSIVNKVMKEYKIEKSDKLAAVDGKKINRGDVIIHRGGQDIISSEIAYAMILKNNDEETLYLIGPDQKIEIRNGSDFEAQIGTVVDAEKTIATFDPFSDPIIAEKGGTVKFEDIILGTTLNEVMDEDTGNTEKRITESQHEKQPRIFIVDDNENEVASYPMPGGAYILVDEGEKIHAGRTIAKTLKESARAMDITSGLPRVSELFEARKPKSPAVLAQVSGTVYFRGIVKGKRKVVIEDAFGRETSHFIPMNKRLLVRDGDPIEAGEQLCMGAINPHEVLYIQGESMLQRYLMNEIQQVYRLQGVSINDKHIGVIIRQMMRKVEIRKVGDTKFIQGSSVDKYRFHEENARVIAEGGQPAIALPMFQGITKASLNIDSFLSAASFQETTRVLTDAAIKSSTDYLRGLKENIIIGHPIPAGTGIKRYRNVKLFDEESQDLDEYMHEILDKRRQEEEELAEAAVAQPEEFPVEDNDD

SEQ ID NO: 71637 - DNA, 3594 bp, Unknown
  Obtained from environmental sample
  misc_feature (1)..(3594): n is a, c, g, or t
atgaccaggatgaaaacgaccgacaagcgaaagtatattggaaaagatattcaggatgtaatggatctgccggatcttattgaaattcaagtttcatcctacgaacgctttttacagagagacaaggcaagaaaaggcgaaaagcccgcgttacagggactccaggaagtatttaaatcaacattccctatagaaagccccaacggcgatatggtgcttgaatatgaatactacacctttgacgaagataacatgaaattaaccgaactggaatgtaagcagaaagggataacttattctattccgcttaaagcgcatgttaatctggttttccagcaaaccggcgagatcaggatgaaagatatttatctcggcgatattccgcttatgaccgagagaggcacatttatcatcaacggcgcggagagggtggtagtttcccagatacaccgctcgcccggcgtaattttcagccacgaaaaaggagttttctcttcaaggattattccataccgcggcagttggcttgaatttgaaattgatcaaaaacgcgaattaatctacgcgaaaatagacagaaaaaaacgcatactcggaacaatcttccttcgcacattgggtttttccagcagggaagaaattatcgacgctttctataaaacagatactcttaaaatcaggaaagatcgtgaaactgaagaaaagattttcggtaaaattcttgcaaaagctattttaataaaaaatgataatcctgaaggacaaaagtccggcggaaataagtccgacggacataagtccgacggaactaaaaacgaaagttcgaaaaccctttaccgcgccggcgagaaacttcaagtgcacgatctggaaacgcttttatcaaacggagtaaagtccattgaatatattgattttaaagccgaaggttcccttaactcacccatgcttcttaattgctttgagcgtgaagatataaaatttgtaaaagaaggatccggcggagagccgaccaaagaagaagcgttaatggctgtatattccgtattgatgccgggcgaatctttgtccgtcgatcaggcggataaagacctgcagggaatgttctttacaaaccgccgttacgatcttggcaaagtggggcgttataaattaaataaaaaatttaatcttcagccgcctctgaacgattatacccttacaaagacagacatcatcgaaaccatgaagtttcttataaaagcttatgtcggcgatgaatattttgacgatatagaccatcttggaaacaggcgcatacgctcagtcggagagcttatggcaaatcatatgaaaaccgcctttagccgcatggagcgcattgccaaagaaaggatgagccagaaagagactgatacgattaagccgcaggaattaatttccataaagcctattgtcgccgctatcaaagaatttttcggttcaagccagctttcccagtttatggaccaggttaacccgcttgccgagcttacgcacaagaggcgccttaatgcgcttggtcccggcggcctttcccgtgaccgcgccggttttgaagtgcgcgacgtacattacacccattacggcagaatgtgccccattgagacgcctgaaggcccgaatatcggtcttattgtttcgcttgcgaattatacccgcgttaacgaatacggctttttggaaaccccgtaccgtaaagtaaacaaagggatcgcgacaactgacattgagtacctttccgccattgacgaagaccgctattttatcgcgcaggcttccgccaaagtgaacaacaacggcactttcgccgacgatcaaatttcctgccgcagcaagggcgattacacaacccgcgaacccaaggacattcagtacatggacgtctctcccaagcagatcatttcggtatccgcttcgctgatacctttccttgaacatgacgacgctaaccgcgctttgatgggttccaacatgcagcgtcaggctgttccccttgttttcccggaagcgccgcgcgtaggcaccggaatggaaggaaaatgcgcgtacgattcgggcgtgcttgtaaaagcccgccgcaacggaacagttcttcgcgtaacatcgcaggagatagtcgtaaaaccggaaagggcgggcaacccgaaaccggcggcgcaggtatcgctcgactctcacggcaacgatgtttataaactggtaaagttccagagaaccaaccaggacacatgctataaccagcgccccattgttaatacaggcgataaaattaccacaggacaggtaatcgcggacgggcccgccacgcaaaacggcgaacttgcgcttggacgcaatatattagtaggctttatgccgtggaacggttacaactacgaagactcaattcttatttcagaaaaagtagtaaaagacgatatgtttacctcaatacacataaaggaatttattgtggaaataagggaaacaaaacttggacctgaaaaaatcacacgcgacattccaaacacttcggaaaaaagccttgataacctggacagcgaaggcattatccgcgtcggcgcgaaagtgcgttccggcgacattcttgtcggcaaggtaacgcccaagagcgagaccgagacaacgcctgaattcaaactgctcaattcaatattcggcgaaaaggccaaggaagtgcgggacacttctcttaaagtgccgcacggcatagagggaacaataatcgacattcagcggcttaagcggacagagcatgacagcctcagccccggagttgacgaagtggttaaggtgttaatcgccgcaaagagaaaactccgcgaaggcgataaaatggcgggacgccacgggaacaagggcgtcgtcgcccgcatcctgccggaagaagacatgccgtttatggaagacggaaccccgcttgatatttgccttaccccgcttggcgttccctcgcgcatgaacataggccagcttttggaaacagagcttggctgggcgggctccactcttaacgaatggtattcagcccccgtattccagtctccctcgacggagcaaatagaagaaaaacttaaagaagccggattgcccgtaacaagcaaaaccattttgcgcgacggcagaaccggcgaaccgtttataaatccgattttctgcggagtaatttacttccttaaattgcaccatcttgtcgatgacaaaatgcacgcgcgctcgaccggtccctactcgcttgttacccagcagccgctgggcggaaaggcgcagttcggcggacagcggctgggcgaaatggaagtttgggcgctggaagcgtacggcgccgcaaatacattgcaggaacttttgacaatcaagtcggacgatatgaccggacgcggaaagatttacgaggcaattgtaaagggcgaaccctccacgacggcgggcattcccgaatcgttcaacgtgcttgttcaggaactgcgcggcctcgctctggatctttcgatctttgacaatagaggaaaacaaataccgctcaccgaaaaagatgaggaattaataaccaagtccggaagtaatttttaa

SEQ ID NO: 71638 - protein, 1197 aa, Unknown
  Obtained from environmental sample
  DOMAIN (151)...(434): RNA polymerase Rpb2, domain 2
  misc_feature (1)..(1197): Xaa is any amino acid
MTRMKTTDKRKYIGKDIQDVMDLPDLIEIQVSSYERFLQRDKARKGEKPALQGLQEVFKSTFPIESPNGDMVLEYEYYTFDEDNMKLTELECKQKGITYSIPLKAHVNLVFQQTGEIRMKDIYLGDIPLMTERGTFIINGAERVVVSQIHRSPGVIFSHEKGVFSSRIIPYRGSWLEFEIDQKRELIYAKIDRKKRILGTIFLRTLGFSSREEIIDAFYKTDTLKIRKDRETEEKIFGKILAKAILIKNDNPEGQKSGGNKSDGHKSDGTKNESSKTLYRAGEKLQVHDLETLLSNGVKSIEYIDFKAEGSLNSPMLLNCFEREDIKFVKEGSGGEPTKEEALMAVYSVLMPGESLSVDQADKDLQGMFFTNRRYDLGKVGRYKLNKKFNLQPPLNDYTLTKTDIIETMKFLIKAYVGDEYFDDIDHLGNRRIRSVGELMANHMKTAFSRMERIAKERMSQKETDTIKPQELISIKPIVAAIKEFFGSSQLSQFMDQVNPLAELTHKRRLNALGPGGLSRDRAGFEVRDVHYTHYGRMCPIETPEGPNIGLIVSLANYTRVNEYGFLETPYRKVNKGIATTDIEYLSAIDEDRYFIAQASAKVNNNGTFADDQISCRSKGDYTTREPKDIQYMDVSPKQIISVSASLIPFLEHDDANRALMGSNMQRQAVPLVFPEAPRVGTGMEGKCAYDSGVLVKARRNGTVLRVTSQEIVVKPERAGNPKPAAQVSLDSHGNDVYKLVKFQRTNQDTCYNQRPIVNTGDKITTGQVIADGPATQNGELALGRNILVGFMPWNGYNYEDSILISEKVVKDDMFTSIHIKEFIVEIRETKLGPEKITRDIPNTSEKSLDNLDSEGIIRVGAKVRSGDILVGKVTPKSETETTPEFKLLNSIFGEKAKEVRDTSLKVPHGIEGTIIDIQRLKRTEHDSLSPGVDEVVKVLIAAKRKLREGDKMAGRHGNKGVVARILPEEDMPFMEDGTPLDICLTPLGVPSRMNIGQLLETELGWAGSTLNEWYSAPVFQSPSTEQIEEKLKEAGLPVTSKTILRDGRTGEPFINPIFCGVIYFLKLHHLVDDKMHARSTGPYSLVTQQPLGGKAQFGGQRLGEMEVWALEAYGAANTLQELLTIKSDDMTGRGKIYEAIVKGEPSTTAGIPESFNVLVQELRGLALDLSIFDNRGKQIPLTEKDEELITKSGSNF

SEQ ID NO: 71639 - DNA, 360 bp, Unknown
  Obtained from environmental sample
  misc_feature (1)..(360): n is a, c, g, or t
atgtcgattattgttccctctatgccgtgcggcactttaagagaagtgtcccgcacttccttggccttttcgccgaatattgaattgagcagtttgaattcaggcgttgtctcggtctcgctcttgggcgttaccttgccgacaagaatgtcgccggaacgcactttcgcgccgacgcggataatgccttcgctgtccaggttatcaaggcttttttccgaagtgtttggaatgtcgcgtgtgattttttcaggtccaagttttgtttcccttatttccacaataaattcctttatgtgtattgaggtaaacatatcgtcttttactactttttctgaaataagaattgagtcttcgtag

SEQ ID NO: 71640 - protein, 119 aa, Unknown
  Obtained from environmental sample
  misc_feature (1)..(119): Xaa is any amino acid
MSIIVPSMPCGTLREVSRTSLAFSPNIELSSLNSGVVSVSLLGVTLPTRMSPERTFAPTRIMPSLSRLSRLFSEVFGMSRVIFSGPSFVSLISTINSFMCIEVNISSFTTFSEIRIESS

SEQ ID NO: 71641 - DNA, 870 bp, Unknown
  Obtained from environmental sample
  misc_feature (1)..(870): n is a, c, g, or t
ttgcgtggcgggcccgtccgcgattacctgtcctgtggtaattttatcgcctgtattaacaatggggcgctggttatagcatgtgtcctggttggttctctggaactttaccagtttataaacatcgttgccgtgagagtcgagcgatacctgcgccgccggtttcgggttgcccgccctttccggttttacgactatctcctgcgatgttacgcgaagaactgttccgttgcggcgggcttttacaagcacgcccgaatcgtacgcgcattttccttccattccggtgcctacgcgcggcgcttccgggaaaacaaggggaacagcctgacgctgcatgttggaacccatcaaagcgcggttagcgtcgtcatgttcaaggaaaggtatcagcgaagcggataccgaaatgatctgcttgggagagacgtccatgtactgaatgtccttgggttcgcgggttgtgtaatcgcccttgctgcggcaggaaatttgatcgtcggcgaaagtgccgttgttgttcactttggcggaagcctgcgcgataaaatagcggtcttcgtcaatggcggaaaggtactcaatgtcagttgtcgcgatccctttgtttactttacggtacggggtttccaaaaagccgtattcgttaacgcgggtataattcgcaagcgaaacaataagaccgatattcgggccttcaggcgtctcaatggggcacattctgccgtaatgggtgtaatgtacgtcgcgcacttcaaaaccggcgcggtcacgggaaaggccgccgggaccaagcgcattaaggcgcctcttgtgcgtaagctcggcaagcgggttaacctggtccataaactgggaaagctggcttga

SEQ ID NO: 71642 - protein, 289 aa, Unknown
  Obtained from environmental sample
  misc_feature (1)..(289): Xaa is any amino acid
MRGGPVRDYLSCGNFIACINNGALVIACVLVGSLELYQFINIVAVRVERYLRRRFRVARPFRFYDYLLRCYAKNCSVAAGFYKHARIVRAFSFHSGAYARRFRENKGNSLTLHVGTHQSAVSVVMFKERYQRSGYRNDLLGRDVHVLNVLGFAGCVIALAAAGNLIVGESAVVVHFGGSLRDKIAVFVNGGKVLNVSCRDPFVYFTVRGFQKAVFVNAGIIRKRNNKTDIRAFRRLNGAHSAVMGVMYVAHFKTGAVTGKAAGTKRIKAPLVRKLGKRVNLVHKLGKLA

SEQ ID NO: 71643 - DNA, 396 bp, Unknown
  Obtained from environmental sample
  misc_feature (1)..(396): n is a, c, g, or t
ttgcaatttgtaacaggcggaaagaaattgtacattctggttgaaccggatacatatcagataaaattccaagaacctgtttcaagggcggaaggcgagaaaattccgaaacgctttgccgagttggaaattatcaccgcaaaaaatcaaacaaagataatgatagcgaaagaacccaacgaaagttacggctcttttacaatccttaaaccctcaggaataaactttgccgtagtgttctatcaactgccggaaatatataaatcactttccgacttctttgtagaatcccttaacagacaaagaaaagttcctgagcacgatgcaaaagccgccgcgcagaaagttacagaaattcttaaaaaatatatgagctttgaaggcgaatatagataa

SEQ ID NO: 71644 - protein, 131 aa, Unknown
  Obtained from environmental sample
  misc_feature (1)..(131): Xaa is any amino acid
MQFVTGGKKLYILVEPDTYQIKFQEPVSRAEGEKIPKRFAELEIITAKNQTKIMIAKEPNESYGSFTILKPSGINFAVVFYQLPEIYKSLSDFFVESLNRQRKVPEHDAKAAAQKVTEILKKYMSFEGEYR

SEQ ID NO: 71645 - DNA, 2691 bp, Unknown
  Obtained from environmental sample
  misc_feature (1)..(2691): n is a, c, g, or t
atggattcaagaatacattttttcagtcaaaaagacgttatctccaataaggttgcgccggaattattaggtatccgcggcagacaggcaaatgaatttgccgaacttggttttcccattctgccgggatttattttagataccgatattgcgtcggacattgatattaagagtattaaaaaagatatttcggatcttttggcaaaatgcgcaaaaatggtgggcaaaggttacggcgatgttaataatcccatgttgttaaaactaattatttcttcaaacatggcgattacaacttaccccgtattgcacaacttcggacttgtaaaacctgttcttaacggttttgcaaaatgggtcggcaaggattttgcagcaaatgaagttttatttatgatcaacggcatgatgaacatagaagagaagattaaagaccttgaaggtaaaaccaaagagaaagatgaaattgccgaaaaaaataaaattataaaaagattattggggattcatggaccttccaatgaattgcataaaaaagaagagcctatgccaaagaagaaaaccgctgaagaatatatggacgattacgccaaatatttccccaaaggtttctttgacgacgctgaatcacagttaatgataaccatcagcgaaatttccaagctgcttaaaatggacgaacagaacaatgaagatacagccattgttattcagccgatggtatacggaaattacggtaaagattcctgttcgggttatttcttcacgcgcaatgttgtaaccggcgaaaagaaacttcagggaagttactttacaggtaaatttaacgaagtaggcgagacaggacacgagatcaataaaattgacgcgtctcatcttaaacagcttgaaaagatagcgggagttcttgaggataaattcaaggaaattcgccaggtacgctttacagtggaaaacgaaaaactttggctgatagagcagagactcgtagaccaaaagtccacacaggctgatcttaaactcttgcttgatcttcaaaagagaaaaatagttgacgcggcttatgtagtaaaagctattgatcctttaaggcttaatgaaattctccatcctgtaattaatcctgccagcgttaagggatttaaatcatggaagggcggtatcgcgggcgctcccggcgcggcgataggacgcgtctatttcagcacagacgctctgttggaagcgaaaaaagcggcgacacagcagggaaacaaagacagttttattctctgtcttgaatcttcttttgcggaagacgtaaaggcgattgaagtaagcgccggcgtattaaccgccgagggcgggtattccgctcacgcgtccgtagtagcgcgccagtacgggaaagtgtcgcttgtatctcccgagcttaaaattaaaggaacaaaagcgactctcggcgattttagtttctccgaggggaactacataaccatcgacgttcctttctacggcgaatcaaaagtgtatcttggaacagcggaacttatagagcctgatcctaaaggttcggggcttctggactttatcgatctttccaagggattcttaaaaaatttccatatcaggtgtaacgcggatactccaagggacgctaaacttgctttagacttcggcgcggacggcgtaggtttgtgccgcacggaacatatgttctttaaagcggatcgcatcaatgttttccgcgatatgttgatgtccgatgacaaaaaagaacgccagaaggttttgaataaactgcaaataatgcaaagggaagatttttacggcatcatgaaagtgatggctggcaaggaagtaacaatccgtcttttggattcgccgcttcatgaatttatgcctcataatcctgatgaaattcaggggtatatcgaccatgttgcaaaaacaacaggttcaaaaccgtcaaaggctgatattgccgcgcgcattgacgctctgcatgaatttaaccccatgcttgggcatcgcggatgccgtatcgccgtctcttacccggagatttacgcaatgcaggtaaaggctatttttgaagcgacatataaactgcgctccgaaaaaattgacgcgcgtcctgaaattatggttcccattataatgaacgccgcggaattaaaacttatcgcgtacgggaaaaagatcgaaggttccaactatttaggtattgttgacatcgaggaaaatcttagaaaacttttaaaagccagagaagtggattataaaatcggcactatgattgagcttccggcggcggctctcggcgcaggagaaatcgccaggtacggacgtttcttcagttttggaacaaacgacctgactcagactactttgggaatttcaagagatgactttaccgcgtttatgcccgactacactttgtttgaccttattaacggcaacccgttcagcacattggatccaagagtaaaagagcttatctctcttgcgacggatcgcggacggctgacgcgccccgatcttgtctgcggcttgtgcggcgagcatggagctaatcccgcaaacgttcgcttctgcatggacgcgggacttaactatgtttcctgttctccgtactcagttccaatcgcgctgttagcggtagcgcaggcggaaatcagtaagtccgaggcggggaaagatcaggaataa

SEQ ID NO: 71646 - protein, 896 aa, Unknown
  Obtained from environmental sample
  DOMAIN (394)...(493): PEP-utilising enzyme, mobile domain
  misc_feature (1)..(896): Xaa is any amino acid
MDSRIHFFSQKDVISNKVAPELLGIRGRQANEFAELGFPILPGFILDTDIASDIDIKSIKKDISDLLAKCAKMVGKGYGDVNNPMLLKLIISSNMAITTYPVLHNFGLVKPVLNGFAKWVGKDFAANEVLFMINGMMNIEEKIKDLEGKTKEKDEIAEKNKIIKRLLGIHGPSNELHKKEEPMPKKKTAEEYMDDYAKYFPKGFFDDAESQLMITISEISKLLKMDEQNNEDTAIVIQPMVYGNYGKDSCSGYFFTRNVVTGEKKLQGSYFTGKFNEVGETGHEINKIDASHLKQLEKIAGVLEDKFKEIRQVRFTVENEKLWLIEQRLVDQKSTQADLKLLLDLQKRKIVDAAYVVKAIDPLRLNEILHPVINPASVKGFKSWKGGIAGAPGAAIGRVYFSTDALLEAKKAATQQGNKDSFILCLESSFAEDVKAIEVSAGVLTAEGGYSAHASVVARQYGKVSLVSPELKIKGTKATLGDFSFSEGNYITIDVPFYGESKVYLGTAELIEPDPKGSGLLDFIDLSKGFLKNFHIRCNADTPRDAKLALDFGADGVGLCRTEHMFFKADRINVFRDMLMSDDKKERQKVLNKLQIMQREDFYGIMKVMAGKEVTIRLLDSPLHEFMPHNPDEIQGYIDHVAKTTGSKPSKADIAARIDALHEFNPMLGHRGCRIAVSYPEIYAMQVKAIFEATYKLRSEKIDARPEIMVPIIMNAAELKLIAYGKKIEGSNYLGIVDIEENLRKLLKAREVDYKIGTMIELPAAALGAGEIARYGRFFSFGTNDLTQTTLGISRDDFTAFMPDYTLFDLINGNPFSTLDPRVKELISLATDRGRLTRPDLVCGLCGEHGANPANVRFCMDAGLNYVSCSPYSVPIALLAVAQAEISKSEAGKDQE

SEQ ID NO: 71647 - DNA, 324 bp, Unknown
  Obtained from environmental sample
  misc_feature (1)..(324): n is a, c, g, or t
atgactccccgctatgcggttatagtacaaaatgagcttttccataacggaaacgtagaagcgtggaagagaatcattgcaagttacaaagcaaaacatcccagtctggaagtctttatttactatgaacaggaaagaatactggacattaactcgttgtttaaatggggcaaggtaaaacatggcagcgctattgaatttgccgtagccggaaacgatattcaggatgtcgcaaaattacagcgttatctggctcagggagccagtcatcaatttgaagcgtttttgcgcggacccgttaataccgtgcttaaattgttctaa

SEQ ID NO: 71648 - protein, 107 aa, Unknown
  Obtained from environmental sample
  misc_feature (1)..(107): Xaa is any amino acid
MTPRYAVIVQNELFHNGNVEAWKRIIASYKAKHPSLEVFIYYEQERILDINSLFKWGKVKHGSAIEFAVAGNDIQDVAKLQRYLAQGASHQFEAFLRGPVNTVLKLF

SEQ ID NO: 71649 - DNA, 618 bp, Unknown
  Obtained from environmental sample
  misc_feature (1)..(618): n is a, c, g, or t
atggcggaaaacgctaatttggaaattctttctacccgcgcggggtttaacagcgcggttaggcatataaagaaaacaatggatattgcgtcaaaaacaaatgcaaatcttggcgatattatttttgaattggatgatgaagaattaacaagcggtaaaacaggcttgcttttaagaatgttattggtcgataaacttggttacaagaccgcgtcaactaatctttcttcaacggttaatgatctttccgttttggcgaaagaattcggaaaatggaacggcgttgatcttgtagccgcttatttccatccggaaatgggactcttaatagcgaatccaaaagtagcggaagaacttgccggtttcggtcagcttcgtcagcgtgaattattggtagtgtatgcgggtcttcagggcaaggaaacggacgagaattgtcagaaagccgcggacttggctttaaggctttttgaaggttcaagagttacagccccttcgtcccttacaaggggaaaattcacggttaaaaaagtttctaaaccaaaaaaaatcaatgaaacagaaacagtaaaaaaggtaaaagcaaaaacaacttccaaaggggaaaaccccggctaa

SEQ ID NO: 71650 - protein, 205 aa, Unknown
  Obtained from environmental sample
  misc_feature (1)..(205): Xaa is any amino acid
MAENANLEILSTRAGFNSAVRHIKKTMDIASKTNANLGDIIFELDDEELTSGKTGLLLRMLLVDKLGYKTASTNLSSTVNDLSVLAKEFGKWNGVDLVAAYFHPEMGLLIANPKVAEELAGFGQLRQRELLVVYAGLQGKETDENCQKAADLALRLFEGSRVTAPSSLTRGKFTVKKVSKPKKINETETVKKVKAKTTSKGENPG

SEQ ID NO: 71651 - DNA, 438 bp, Unknown
  Obtained from environmental sample
  misc_feature (1)..(438): n is a, c, g, or t
ttggtacagagtagatttccttcgcaggagttacagcagttttacaatttatcccgcgcgcccgattccatagagggtattacaaaaaccatctccgtgtgggttgccggtcgtaactttaatcatgaactttatgtgcttattcaggatttcttcggaagagattatgaattcagcatgggaaaattaaccttcatgggctggcagaaattgacagcaactattccgccggctcctgaggatggaatgagcggcgtagctcaaagaagctaccattatcagggcaactttggaatcaagataaccggtttcagaattgactgcgatccaatggaagccagaggcagttactatatctacttagatgatcttcgcgcatataccgatttattttccgaaagccaccgcgatccggacgacatggtcgatggctggtag

SEQ ID NO: 71652 - protein, 145 aa, Unknown
  Obtained from environmental sample
  DOMAIN (3)...(137): Flagellar filament outer layer protein FlaA
  misc_feature (1)..(145): Xaa is any amino acid
MVQSRFPSQELQQFYNLSRAPDSIEGITKTISVWVAGRNFNHELYVLIQDFFGRDYEFSMGKLTFMGWQKLTATIPPAPEDGMSGVAQRSYHYQGNFGIKITGFRIDCDPMEARGSYYIYLDDLRAYTDLFSESHRDPDDMVDGW

SEQ ID NO: 71653 - DNA, 1752 bp, Unknown
  Obtained from environmental sample
  misc_feature (1)..(1752): n is a, c, g, or t
ttgttaatcaatcgacagcctttttttagtaccaacatgattttaaaaggaaaaggaactgcccagggatttgccgtagggcatatttatgtctacaatgaaaagtttaatattcccgccgaaagcacggttcctttgggaaaagaaaaggcgcagttagatcgttattattcaataaaaaaagaagcgcttaacgaacttgataaaatcaaacgttctttggaagatattgatcctttaaaagcgggaatctttgacgcgcacaaagaaatagtagaagatattatcattaacgaagaaattccggcaaggatactgaatgatcgctgggcgggcgattgggcgatttatcatgtttacggaacagttatagccgttttaaaaaagacagcggatacgcttatagcggaaagagcggcggactttgacgacgtgcgcgccatgcttttgcgtttatggtacggacagaagacaagctctctttcagatttaaaagaaccttgcatcatcgccgcgcatgaaattaaaccttccggggcggcgggaataaacaacgggaaagtcctcgcgatacttaccgaagagggcggagtaacgtctcacgccgctattatcgctaaaagtttcgggatacccgcggtgttgggcattgacgggcttttaagttttgttaaacaggggcagtatgccgcggttgacgcgcatgaaggctctgtaattcttgacccggaagaagatattgtaaagagttaccggaaaaaaagcggcgatttgtcccgcgacagaaaagacgcggaagtgtttttaaaaaaagaggggaaaacagcctgcggggtaaaaattgacatagggcttaatatttcaagcgcaagcgacgacgagcttcatgcgcaaagttatactgattcagtaggtttgttcagaacggaattcctttttttgggacgcgatactttgccctctgaggaagagcaatttacttcttaccgaaaggttgtaaaaagtttcggaaaaaaaccggtaattctgcgcattcttgatattggaggcgacaagcaaatatcaaatatagaacaaaaaaaggaagataattcttttttgggaaatcgcggtataaggttttgttttagttacccggatatttttacaacccaattaagagccgctttacgcgcgtcttattacggtaatctatggataatgctccctatgatcggctcccttgatgatataagaaaagcgaaggaaataattgaggaaacaaaaaataaattaataaaagagaaagttcagattggcaatgtaaaaatagggataatgatagaagttcccagtatcgcgctgattgcggatcttgccgcaaaggaagtggactttgcgagcataggatcaaacgatctttgccagtatttgtgcgcggcggacagaatgaacgcggcggtggaaaattattatcaaagttatcatccttccgtttttaaattgataaaagagacagtatcggcttttaaaaaagctgaaaagcctatttcaatatgcggggagatgagcggagacccgttggctgttcttgcgcttataggctgcggacttagaaaattcagcatggggtccgcgtctgtcgcggctgtaaaaagggctattgccggcataactgtggcgcaggctgaggaaacagcccaaaaaatgctggaattatctaccgcgcaggaaattgaaagttttttgaatacatcatataatattaattaa

SEQ ID NO: 71654 - protein, 583 aa, Unknown
  Obtained from environmental sample
  DOMAIN (15)...(139): PEP-utilising enzyme, N-terminal
  misc_feature (1)..(583): Xaa is any amino acid
MLINRQPFFSTNMILKGKGTAQGFAVGHIYVYNEKFNIPAESTVPLGKEKAQLDRYYSIKKEALNELDKIKRSLEDIDPLKAGIFDAHKEIVEDIIINEEIPARILNDRWAGDWAIYHVYGTVIAVLKKTADTLIAERAADFDDVRAMLLRLWYGQKTSSLSDLKEPCIIAAHEIKPSGAAGINNGKVLAILTEEGGVTSHAAIIAKSFGIPAVLGIDGLLSFVKQGQYAAVDAHEGSVILDPEEDIVKSYRKKSGDLSRDRKDAEVFLKKEGKTACGVKIDIGLNISSASDDELHAQSYTDSVGLFRTEFLFLGRDTLPSEEEQFTSYRKVVKSFGKKPVILRILDIGGDKQISNIEQKKEDNSFLGNRGIRFCFSYPDIFTTQLRAALRASYYGNLWIMLPMIGSLDDIRKAKEIIEETKNKLIKEKVQIGNVKIGIMIEVPSIALIADLAAKEVDFASIGSNDLCQYLCAADRMNAAVENYYQSYHPSVFKLIKETVSAFKKAEKPISICGEMSGDPLAVLALIGCGLRKFSMGSASVAAVKRAIAGITVAQAEETAQKMLELSTAQEIESFLNTSYNIN

SEQ ID NO: 71655 - DNA, 807 bp, Unknown
  Obtained from environmental sample
  misc_feature (1)..(807): n is a, c, g, or t
ttgctgtttatacttaaaatgtgggctagcgtaatttccggctctatcgctcttgccgccgacgcgtggcatacgctttccgattcattaagctccgtagcggttgttattgccgcaaaattagcgtcaaaaaaagctgacaaggaacacccgttcgggcacggcagatgggagcagatagcgtcgttttttatagcggctattttagccgtaatcgcgtatggatttttggaaaactcaatcaggcatttttgggagagggaaagagtagagtacggaaaaatagcgataattgttaccgctatctcgattattgtaaaagaactgctggcgcaatacgcgttttatatggggcgtaaagccgataattccagcgtaaaagccgacggctggcatcacagatcggacgcgctttcttccgtagttgtgcttgccggtatattgttcgcaaagcgcttctggtggattgacagcgtactgggaataatcatcgccctgatgttgttttacgcggcttttgagattttaaaagaatcaataaataaaatattgggcgaagaacccggacaggaactgataaataaattaacaaacgaaattaaaaatatatattatgacgatttaaaaatacatcatttgcatattcataattatatttcacataaggaattaacttttcatatacggcttaataaagatttaacaatagagaaagggcataagatagcgtcggatattgaggagcttgttttagacaaattgggtatgtccgcaactatccatgtggaaccggcgaatttaacgtaa

SEQ ID NO: 71656 - protein, 268 aa, Unknown
  Obtained from environmental sample
  SIGNAL (1)...(19)
  DOMAIN (1)...(267): Cation efflux family
  misc_feature (1)..(268): Xaa is any amino acid
MLFILKMWASVISGSIALAADAWHTLSDSLSSVAVVIAAKLASKKADKEHPFGHGRWEQIASFFIAAILAVIAYGFLENSIRHFWERERVEYGKIAIIVTAISIIVKELLAQYAFYMGRKADNSSVKADGWHHRSDALSSVVVLAGILFAKRFWWIDSVLGIIIALMLFYAAFEILKESINKILGEEPGQELINKLTNEIKNIYYDDLKIHHLHIHNYISHKELTFHIRLNKDLTIEKGHKIASDIEELVLDKLGMSATIHVEPANLT

SEQ ID NO: 71657 - DNA, 1980 bp, Unknown
  Obtained from environmental sample
  misc_feature (1)..(1980): n is a, c, g, or t
atgcggcgtttcggcattataatttgtctctttttcattttatcgttctttcccgcggcgctctccgcgcagactcaagcgtcttccgcggtgtactatgagcgcggcaaaagtctcatggctgaagaaaactggtattccgcggttgagtcatttcttgaatgtacaaggctcaaccccgcccatgccgagggaaccgcctctcttgcggaatgttattacgagcttgcggaatttgacgaagcgcttaaatgggtaagaaaggcaagacagcttgcgcgcaccaatatgtccgttgcgaatctggaagtctttacccttattgcgcttgggcagttggaaagcgccgcttcccttgtcaacgaaatactggcaaaggaaccctacaacagggaaacgctgtttgccgcgggagagcttgatatcgcccgtaacagaccctctgaggcaatgattcgctaccgagacgccgtaagacgttatcccgacgaccgcaggcttttaatttcactcgcccttgtaaccctttctttgggagacggcgacacagcgcttacctatataaacagcgctcttgtacaacaccccgacgattaccgcgtgttttattacgcggcttacatttattccatgaacaacaaaattaaggacgcaataagctacgcggaacgttctctttactataaacccgatcacttgccaacccgctctttaatgtccgtccttcgttaccgtaacggcgaatatgaggaagcggcgcggctatgcgacgcgttaatcgccggcaacaggcaggatatgagcgcgtggtatttaaaaggcatgtctttaataagacagaaccgcaatcaggacgcgataaccgttctttcaaatgcggttctcgttaatgaagaagatgagtttatccgcgccgttttagaagaaacgcttatctcttcctcacctttggaagatccgcgccgcgtaagattcgctgcatggcattttaataaggcgcgggctttccgccagcgcaacttaaatgaacaggcgctttttgaataccgccgaggattaagattgaacccctttgcgcaggacaggcgtgaatacgccgagattttaagacttttaggctaccctgcccgctaccttgaagaacttcgctttttgcaggatcagggagtttcggacaaaaacataaacgacgctgtggaagcctacgcttccctgctttcaaacgcgctttttaaacaatggcaggtaaaccccgtcgatctggctgaacggcattggaaaatagcggtcttttccctcgcggggcaatcaagcttttaccacgcggacgcgggttctgtcgcagccggagtcatcaaagaattgcttgtacacgacaggaacattaaccccataaatctggaacagcggcaggctatcttttctcaggcgtttaaacaggcaagggaaggcggagccgattactttatacttgtctcggtaacggaaagcgagcgcgatatttcaataaaagccgaagcctttgtgggaaggacaggctctccggcgggaactttttacacttaccgcacaggagtagacagactgcgcgacgcatcccgcggcatagtaacccagctttcagcatcaatgcctattcgcggcagactgcttatccgaaaacagggacaggcgctcattaacaagggaaaagccgatggtattcaaaaagactcggtatacgacgttgtaaaacgcggtcgtttccaaacggcaaacgaagggatcgccgttatttattcaaacgacgagcttgtgggaaagctgacaattaccgacgtagatgaagaaatagccattggaactttggtaagaaacggtttctttgaccgcattgaaccgggagacgagataatcttacaggttaataaatcaaataaacccgcgttggaaagcgcggcaaaccctgagttaagggcgttgttaaggtctttacgttaa

SEQ ID NO: 71658 - protein, 659 aa, Unknown
  Obtained from environmental sample
  SIGNAL (1)...(23)
  DOMAIN (29)...(62): Tetratricopeptide repeat
  misc_feature (1)..(659): Xaa is any amino acid
MRRFGIIICLFFILSFFPAALSAQTQASSAVYYERGKSLMAEENWYSAVESFLECTRLNPAHAEGTASLAECYYELAEFDEALKWVRKARQLARTNMSVANLEVFTLIALGQLESAASLVNEILAKEPYNRETLFAAGELDIARNRPSEAMIRYRDAVRRYPDDRRLLISLALVTLSLGDGDTALTYINSALVQHPDDYRVFYYAAYIYSMNNKIKDAISYAERSLYYKPDHLPTRSLMSVLRYRNGEYEEAARLCDALIAGNRQDMSAWYLKGMSLIRQNRNQDAITVLSNAVLVNEEDEFIRAVLEETLISSSPLEDPRRVRFAAWHFNKARAFRQRNLNEQALFEYRRGLRLNPFAQDRREYAEILRLLGYPARYLEELRFLQDQGVSDKNINDAVEAYASLLSNALFKQWQVNPVDLAERHWKIAVFSLAGQSSFYHADAGSVAAGVIKELLVHDRNINPINLEQRQAIFSQAFKQAREGGADYFILVSVTESERDISIKAEAFVGRTGSPAGTFYTYRTGVDRLRDASRGIVTQLSASMPIRGRLLIRKQGQALINKGKADGIQKDSVYDVVKRGRFQTANEGIAVIYSNDELVGKLTITDVDEEIAIGTLVRNGFFDRIEPGDEIILQVNKSNKPALESAANPELRALLRSLR

SEQ ID NO: 71659 - DNA, 747 bp, Unknown
  Obtained from environmental sample
  misc_feature (1)..(747): n is a, c, g, or t
ttgaaagctccttttaagataaatacacaggcaattaaagatctggaagaagaccaaagacagatgatccgaggcgttgtggaattatccgacactacggtaaaagaggtaatggttcccagaaccgacactgtttttctttcggcggacgcctcaaaagatgaattgcttaaattcataagcgaaagcgaacactcgcgttttcccgtatacaaagatacggttgataacgtaacaggcgtacttcatgtaaaagacgtattaaaagcgcttattaatgataaaccgttcaatattaacacattggcaagaaagccgttttttgtccccgtatcaaaacatatcgacgaccttttgcgggaactgcgccgcaaaaaagtccatatcgccgtagtggtagacgaatacggcggagtgtcgggcattgttaccatggaagacataatcgaagaaataatcggcgacattcaggatgaatttgatcatgaaaccgaagacgtggtggttctcggagagggaacgtggctttgcgacgcaagggtaaaccttgaatttttagccgaagaaataaacatagagtttcctgtcgatgattttgatacgctcggcggctttgtttttgatcttttcggcaggataccggcagtaaatgaaaaaacagtatataagggttatgattttatcatacaggaaattgacgggcatagaatcaactcgataaaaattgtaacccataaaaaggactag

SEQ ID NO: 71660 - protein, 248 aa, Unknown
  Obtained from environmental sample
  DOMAIN (168)...(246): Transporter associated domain
  misc_feature (1)..(248): Xaa is any amino acid
MKAPFKINTQAIKDLEEDQRQMIRGVVELSDTTVKEVMVPRTDTVFLSADASKDELLKFISESEHSRFPVYKDTVDNVTGVLHVKDVLKALINDKPFNINTLARKPFFVPVSKHIDDLLRELRRKKVHIAVVVDEYGGVSGIVTMEDIIEEIIGDIQDEFDHETEDVVVLGEGTWLCDARVNLEFLAEEINIEFPVDDFDTLGGFVFDLFGRIPAVNEKTVYKGYDFIIQEIDGHRINSIKIVTHKKD

SEQ ID NO: 71661 - DNA, 438 bp, Unknown
  Obtained from environmental sample
  misc_feature (1)..(438): n is a, c, g, or t
atgaatttaggattaatcggcgcaggtcttgtaatgggtatttccgcggtcggttcggcaaccggtatagctattgccgggcaggctgttatcggcgcatggaaaaaatgctacgcggccaacaaacccgcgcccatgaccctgctcgccttcggcggcgcgcccctcacccagactttttacggctatatattgggtttcctgtttatgaaacccgcggctttggctaatcccgcaaacggcttattgtacctcggcattggaatcgcttccggtctggctatcgccgcttccgccatcgcgcagggcaaggccggcgccgccggcgcggacgccgccggtgaaacaggcaagggctttgtcaactacatgatgatcgtcggtatctgcgaaaccgtcgcgattttcgcaatggttctttcgatgataagtctgtaa

SEQ ID NO: 71662 - protein, 145 aa, Unknown
  Obtained from environmental sample
  SIGNAL (1)...(26)
  DOMAIN (82)...(145): ATP synthase subunit C
  misc_feature (1)..(145): Xaa is any amino acid
MNLGLIGAGLVMGISAVGSATGIAIAGQAVIGAWKKCYAANKPAPMTLLAFGGAPLTQTFYGYILGFLFMKPAALANPANGLLYLGIGIASGLAIAASAIAQGKAGAAGADAAGETGKGFVNYMMIVGICETVAIFAMVLSMISL

SEQ ID NO: 71663 - DNA, 1998 bp, Unknown
  Obtained from environmental sample
  misc_feature (1)..(1998): n is a, c, g, or t
atgatagtaccgatgaaaaaagtgtgccttatggtacaggataaacaccaggatgaggcgcttgccaaactgcgcgaaacagggatagttcatcttgagatgtccaagcccgcgcctgaaaagttcggctcagtaatggaacgcaaaacgcagacggaaaacgctatcgcccttatccggcaattcaaggcgccgaaagcaaaacctcaaacccaaaccgggagcggaagctgggaacggcgcaaggttacaggcccgcgcagggggcgcagaacttccgacatgctgggcattgaggaagtggaaccgtattcggtggacgcggtaaacgcgcctgacaggccggaactggtaaagctgatgaacagcctcgcgactgagcgtaaaaccatagaagacaggatcattttcctttccagggaactgacgcgcgtcagggcgtggggcgaatttaatcctgaggatttaaaagccctgtcagctaacggcgccatgaatggcggcgccataaatggcggcgccataaatggcgtaaacgtttatccctatgaaatttcaccggagatttttaagaatattccccaggatgtccgttatattaaaataaacgaagacaaagccgcggttcgcctgctggcgctggacaaggaaatccccgatattcagccgttcaaactgccggaaaaatccatttccaaaatcgaaatagaactggcggagttaacaattaaattaaacgcgcttaatgaaagaataaaaaactttgccgaccgccggcccatacttgaaaaagaaatggcggagattaacagcaagctcaactttgaaatggcgaaggcggagcttgcgaaaattgaaggcattccggacgagcacagcctttcatgtatttacggctatgtccccgccgaggatatgggcaggctgaaagtcgccgcggcggaaaacaactgggcgcttatggcccgcgatccaggcccggatgattacgtcccgaccaagctaaggaacaatccgctggcaaacctgataagccctctgaccggtttccttgaagtaacgccaggttataacgaagtcgatatttcaggctggttccttctattcttcaccatatactttggcatgatattcggcgacgcggtttacggcgccatcgttcttatcgccgctataatcggcatattcaaaaccgttaaaaagggagtgccggcagtcctcaagcttatgttcctgctgggtctttcaaactttgtatggggcgtgcttacctgtacctggggcgggattgatgacgtgcagaagctgcctatggtgttacgtgatatttcccttccattgatttcaaacgcgtctccccttgacaaggagattgtccagcagaacctgatgattctgtgtttctcactcgcgctattacagctttgcatcgggcatatcgtcgccattggaaagcacagatcactaaaaatcctggcggaactcggctcaatcgcgatgcttattggcatgtacggcataatccttatcctcatcgcgagcaataaagcccgcaaccttggggactatattcccatgatgccctgcgcgtacatccttggcgtcggcttcgtttttaactttgttttcgcgagttacgacggaagcgtaggcagatcgatccttgagagctgcaagaatatcatttctatgatactcggtatcgccaacgtgttttcggatattatgtcctatatcaggctgtgggcggttggcctggccggagccgccatcgcttcaaccgtaaactcgatggctggccctatgctggggcattttatactgtttatnttcggtatagcccttatcgtgttcgggcacggtttaaacctcgtgttgaatgcgctttcggtattggttcacggggtgcgcctgaatactctggaattttcaggccatgtgggtttaacctgggcgggttttccgtacaagccgttcagcgagaacaagaacaagtag

SEQ ID NO: 71664 - protein, 665 aa, Unknown
  Obtained from environmental sample
  DOMAIN (21)...(662): V-type ATPase 116kDa subunit family
  misc_feature (1)..(665): Xaa is any amino acid
MIVPMKKVCLMVQDKHQDEALAKLRETGIVHLEMSKPAPEKFGSVMERKTQTENAIALIRQFKAPKAKPQTQTGSGSWERRKVTGPRRGRRTSDMLGIEEVEPYSVDAVNAPDRPELVKLMNSLATERKTIEDRIIFLSRELTRVRAWGEFNPEDLKALSANGAMNGGAINGGAINGVNVYPYEISPEIFKNIPQDVRYIKINEDKAAVRLLALDKEIPDIQPFKLPEKSISKIEIELAELTIKLNALNERIKNFADRRPILEKEMAEINSKLNFEMAKAELAKIEGIPDEHSLSCIYGYVPAEDMGRLKVAAAENNWALMARDPGPDDYVPTKLRNNPLANLISPLTGFLEVTPGYNEVDISGWFLLFFTIYFGMIFGDAVYGAIVLIAAIIGIFKTVKKGVPAVLKLMFLLGLSNFVWGVLTCTWGGIDDVQKLPMVLRDISLPLISNASPLDKEIVQQNLMILCFSLALLQLCIGHIVAIGKHRSLKILAELGSIAMLIGMYGIILILIASNKARNLGDYIPMMPCAYILGVGFVFNFVFASYDGSVGRSILESCKNIISMILGIANVFSDIMSYIRLWAVGLAGAAIASTVNSMAGPMLGHFILFXFGIALIVFGHGLNLVLNALSVLVHGVRLNTLEFSGHVGLTWAGFPYKPFSENKNK

SEQ ID NO: 71665 - DNA, 606 bp, Unknown
  Obtained from environmental sample
  misc_feature (1)..(606): n is a, c, g, or t
atggcaaaaatcaggctcactaaaaacgagctgaaaaaacaaaaagactcgcttaaaatgtacaagcgttaccttcccacgctgatgttaaagaaacagcagcttcagggcgagattcgcataacggagctccgtcttaaagaattgaaaaccgccaaggataatctggatgaatcattcaagacatggatcggagttttcggtgagaaaggatattttaccgcgagcatattgaagattacaagcctgcgtacggggcatgggaatgtcgccggcgttgaaatccctatttttgaaggcgctgattttgagataacgccgtacgatctcgcgcgcactccggcatggcttgacaaggccgtagaggcgatgaagcaggccctgcttttagaccttgaatcgcagattgtcgaggaacagcgtaaaaggctggagaaggaactgcggacaactacccagagggttaatctttttgagaaagttaaaatcccacagactataggcaatatcaaaaagattcaggtttatttgggcgatcagcagactgccgccgtcgtgcgcggcaagatagcgaaaagcggaactgaaaaggcggcgggtatatga

SEQ ID NO: 71666 - protein, 201 aa, Unknown
  Obtained from environmental sample
  DOMAIN (2)...(196): ATP synthase subunit D
  misc_feature (1)..(201): Xaa is any amino acid
MAKIRLTKNELKKQKDSLKMYKRYLPTLMLKKQQLQGEIRITELRLKELKTAKDNLDESFKTWIGVFGEKGYFTASILKITSLRTGHGNVAGVEIPIFEGADFEITPYDLARTPAWLDKAVEAMKQALLLDLESQIVEEQRKRLEKELRTTTQRVNLFEKVKIPQTIGNIKKIQVYLGDQQTAAVVRGKIAKSGTEKAAGI

SEQ ID NO: 71667 - DNA, 1296 bp, Unknown
  Obtained from environmental sample
  misc_feature (1)..(1296): n is a, c, g, or t
atgaataaggtatatagcaagattgaatcaataacaggcagcgttattaccgtcaaggcggaagatgtccgttacggagacctcgcggaggtcgatacagtgttcggcacgtcgctcgcggaagtaaaccgcctgcagggcgatattgtttcattacaggtattcgccggcggccgcggtatttccacgggcgacacagtccgcttcctcgggcgccccatgcaggttccgttctccgagaatcttatgggcagggtgttctcaggttcaggcaaaccgcgcgacaacggtcccgcgttacacgagaacttaatcccaatcggcggcccatctgtaaatccgtcccagcgcattatcccgcgcaagatgatccgcacaggtatccccatgatcgacctctttaacaccctggtcgtatcgcagaagcttccgattttctccgtatcaggcgagccttacaatgagttgcttgcgcgtatcgcgatgcaggcggaagtagacgttatcgttctcggcggcatgggccttaaatacgacgactatctttactttaaggacactcttgaaaacggaggcgctttggcgcgtaccgtaatgttcatacataccgcaagcgaccccacggtcgaatgtcttatgataccggacatgtccctcgcggtcgccgaaaagttcgcccttcagggtaaggatgttcttgtccttcttaccgacatgacaaacttcgcggacgccatgaaggaaatctcgattattcaggaacaggttccaagtaaccgcggttatcccggcgatctttacagccagcttgccagccgctacgaaaaagccgtagactttgaaaccgccggttccatcaccgtcctgggcgttaccacgatgcccggcgacgacgtaacgcaccccgtgccggacaataccggatatattacggaaggtcagtactatcttaagaacggccgcatcgaacccttcggctccctctcccgtcttaaacagcaggttaacggcaaaacgcgcgaagaccaccgcgccctcatggacggcatgatcaaactttattccgctttccgcgacacaatggaaaagaaagcgatgggctttatcatgaccaactgggacgagaagctcttaaaatacggcgatcagtttgaaaagaggatgatgtccctttccgtaaatattcccctggaaaaagcgctggatcttgggtgggagattttatcttcctgctttaaccctgaagagacaggattaagaaccgaacttattaataagttctggccgaaaaattag

SEQ ID NO: 71668 - protein, 431 aa, Unknown; identical to SEQ ID NO: 44998
  Obtained from environmental sample
  DOMAIN (8)...(71): ATP synthase alpha/beta family, beta-barrel domain
  misc_feature (1)..(431): Xaa is any amino acid

SEQ ID NO: 71669 - DNA, 1761 bp, Unknown
  Obtained from environmental sample
  misc_feature (1)..(1761): n is a, c, g, or t
atgatcggaacaaaaggaacggtagtagccgttaacggcaatatggtaagcgtccgttttgacggtattgtttccatgaacgaggtcggctatgtaaaggtcgccgattcaaaactgaaaagcgaagttatccggattcgcggcaatatcagccaattacaggtttttgaaattaccaaaggcattactgtcggcgatgaagttgagtttaccggagacatgttgtcggtcgaagtagggccgggattgttgggtcaggtttatgacggccttcaaaaccccctgcctcagctcgcgaaagccgccggctacttcctcgagaggggcgtctacatagaccctctgccgggagattcaagctggcagtttacgccgaaggcaaaagaaggcgacaaggttgaacgcgccgacaccctcggcacagtgccggaaggttcctttacccaccgcatcatggttccgttttacctttacggctcatacaccgtttcatgggtcaagccggaaggtacttataaaattcacgacacaatcgcggaacttaaagacgaaaagggaaacgccatacagataaaattaagcttccgctggccggtaaagcgcgccgtagactgttacgaagaaaggcttaaacccgtagaccctatggttacccgcgtccgccttatcgacacattcttccccgtggcgcgcggcggcacttactgtattcccggccccttcggcgcgggcaagacggttctccagcagattactagccgtttcgcggacgttgacatcgtaatcgtcgccgcctgcggtgagcgcgccggcgaggttgttgaaacccttaaagagttccccgaattaaaagacgaaagaacaggccgctccctcatggaacggacaattattatttgtaacacgtcctccatgccggtagccgcgcgcgaagcgtcggtttacacggccgtgacccttgccgagtactacaggcagatgggccttcacgtccttcttctcgcggactcaaccagccgctgggcgcaggcgatgcgcgaaatgtcaggccgccttgaggaaatacccggcgaggaagcgttccccgcctacatggaatccacaatcgccaacttctacgaaagagccggtattgtgcgcctgcgcgacggaagcctcggctccgtaacaataggcggcacggtaagcccggcgggcggtaactttgaagagccggtaacgcaggcgacattgaaagttgtcggagctttccacggactttcccgcgagcgctccgacgcccgcaaattccccgccatccaccctatggattcatggtcaaagtacaagggaattattccctcagagaaagtggaatacgcgcacaattttatgcgccgcggcagtgaagtagagcagatgatgaaggttgtaggcgaagaaggaacaagccttgaagactatattatttatttgaagggcgaccttatcgactccgtttacttccagcaaaactcattcgacgtggtagacgccgccgttaaaccggaaaggcaaaaatacgtgttccagaaactgctcggcgttctggcgtcccagttttcttttaccgacaagaacgaggcgagaagttggttcaacaggctcaggcaaaagttccttgactataatggttccgaatggaagagcgagcgttttgaagggcttgaaagcgaaattgaaaacgcgatcaagaaccagtcgaaaggcttggacaaagccgcggaaaaaatattggtataa

SEQ ID NO: 71670 - protein, 586 aa, Unknown
  Obtained from environmental sample
  DOMAIN (8)...(72): ATP synthase alpha/beta family, beta-barrel domain
  misc_feature (1)..(586): Xaa is any amino acid
MIGTKGTVVAVNGNMVSVRFDGIVSMNEVGYVKVADSKLKSEVIRIRGNISQLQVFEITKGITVGDEVEFTGDMLSVEVGPGLLGQVYDGLQNPLPQLAKAAGYFLERGVYIDPLPGDSSWQFTPKAKEGDKVERADTLGTVPEGSFTHRIMVPFYLYGSYTVSWVKPEGTYKIHDTIAELKDEKGNAIQIKLSFRWPVKRAVDCYEERLKPVDPMVTRVRLIDTFFPVARGGTYCIPGPFGAGKTVLQQITSRFADVDIVIVAACGERAGEVVETLKEFPELKDERTGRSLMERTIIICNTSSMPVAAREASVYTAVTLAEYYRQMGLHVLLLADSTSRWAQAMREMSGRLEEIPGEEAFPAYMESTIANFYERAGIVRLRDGSLGSVTIGGTVSPAGGNFEEPVTQATLKVVGAFHGLSRERSDARKFPAIHPMDSWSKYKGIIPSEKVEYAHNFMRRGSEVEQMMKVVGEEGTSLEDYIIYLKGDLIDSVYFQQNSFDVVDAAVKPERQKYVFQKLLGVLASQFSFTDKNEARSWFNRLRQKFLDYNGSEWKSERFEGLESEIENAIKNQSKGLDKAAEKILV

SEQ ID NO: 71671 - DNA, 600 bp, Unknown
  Obtained from environmental sample
  misc_feature (1)..(600): n is a, c, g, or t
gtggcatcatattattacctgatggcgcagcttccgtacctcatctatgaacaaaagccgcccatttcgtccgccggtttcaaggcgctggccgaaacccagctaatcgaagaagacgccgcccttttaaactgtctttcgattgatcctgacccggagggtaaaacaatcccgtcttacgcggagcttacgccttccacgggctgtgaatttatcgacagttggcgggaatgggaacgctctttaaggcttaacctcgcgaagaaccgcgcttccaaacttaaaagggacaatgtttcctcgtcgtccgagccgcctttttatccggttgaggcagtagccgccgcgcttagagcggtcaataccgatatctccccgctggaaggggagttccttatcgacaaagcgcgctggaacgccatagatatgctggcgggcaataactatttcgaccgtaacagcgtttacgcttatttacttaaacttatgttaattgagcggcgtatgtcgttcaatactgaaagaggatttacagaatataaatcattgtacgcttctattattgaaagcgagcataaatccctgggggttcctaaatga

SEQ ID NO: 71672 - protein, 199 aa, Unknown
  Obtained from environmental sample
  misc_feature (1)..(199): Xaa is any amino acid
MASYYYLMAQLPYLIYEQKPPISSAGFKALAETQLIEEDAALLNCLSIDPDPEGKTIPSYAELTPSTGCEFIDSWREWERSLRLNLAKNRASKLKRDNVSSSSEPPFYPVEAVAAALRAVNTDISPLEGEFLIDKARWNAIDMLAGNNYFDRNSVYAYLLKLMLIERRMSFNTERGFTEYKSLYASIIESEHKSLGVPK

SEQ ID NO: 71673 - DNA, 336 bp, Unknown
  Obtained from environmental sample
  misc_feature (1)..(336): n is a, c, g, or t
atgtttcatcgcactacggcgacgatgtgtaaaaagccgcgctgcctgaaatcattaaagcgtgggcgcgaaaaggcaccgacaatcttttccgtgcttgtgccggaaagcgaattgtccaagcttcagtctttcttcagcgaaaaacttaccggagaactctggaaaggcgttgaattaaaatccagccgcaaactggcttccggtttccatatttcaaacaagcaaggttcaatttattatgacttctcagcggaagcggtggcgggacttctttcgtcctacttaaatccgaaacttgcggaaatcttaaaaacttcatcaaaaggaatttaa

SEQ ID NO: 71674 - protein, 111 aa, Unknown
  Obtained from environmental sample
  misc_feature (1)..(111): Xaa is any amino acid
MFHRTTATMCKKPRCLKSLKRGREKAPTIFSVLVPESELSKLQSFFSEKLTGELWKGVELKSSRKLASGFHISNKQGSIYYDFSAEAVAGLLSSYLNPKLAEILKTSSKGI

SEQ ID NO: 71675 - DNA, 516 bp, Unknown
  Obtained from environmental sample
  misc_feature (1)..(516): n is a, c, g, or t
atgactaagaagggattaataaaacagcatatcgtttcggctcttgttgaaaacagagccggaactttaagcagggtatcggggcttttcagcagacgaggttttaacattgacagcctcactgtcggcgagaccgataatccgtcaatttccagaatgacaatcgcggtaacaggcgaggagcgtgttcttgagcaaattgttaaacaactggaaaaattagtcgatgtaatcgccgtgcgggaattggacagcgcctcctgtctgcgccgtgaaatcatgctggtaaaagtgggcgttgatgaaaaaaaccgtcccgccattcttgaaatagccggtattttccgcgcccgcattgtcgatgtttcccaaacgagtatcacagttgaagcgacaggcaacatggaaaaacttaacggattgcttcttctcttacgcccctacggtatcctagagcttgcccgcacaggtcttgtcgctcttgagcgcggggcaagtgtgctttccgtaaaataa

SEQ ID NO: 71676 - protein, 171 aa, Unknown
  Obtained from environmental sample
  DOMAIN (10)...(83): ACT domain
  misc_feature (1)..(171): Xaa is any amino acid
MTKKGLIKQHIVSALVENRAGTLSRVSGLFSRRGFNIDSLTVGETDNPSISRMTIAVTGEERVLEQIVKQLEKLVDVIAVRELDSASCLRREIMLVKVGVDEKNRPAILEIAGIFRARIVDVSQTSITVEATGNMEKLNGLLLLLRPYGILELARTGLVALERGASVLSVK

SEQ ID NO: 71677 - DNA, 1275 bp, Unknown
  Obtained from environmental sample
  misc_feature (1)..(1275): n is a, c, g, or t
atgttagattataaatttatcgcggaaaatttgcatgcggtaacggcaaacattgccgaccgttttatgaaagccaatgcagaggcggtagcgcgcctgtataacaaaagaacggaacttgccaccagattgcagtcgttccagcagaagcgtaacgcaaacgccgacgccatgaagggcaagcttgctcaggaagaacgtaatgttcttattgaagaaggaaaaaaattaaaagaggaaatctccgcggcggaaagcgaattaaccgcagtggaagcggagcttttaacagaggcgcggaaaattcccaacatggcgcaccctgacgcaccggtcggcaaggaagacaaggacaatcttgaagtaaagagagtaggggaacctaccaaatttgattttgaacctgccgaccatgtgaaacttggacaagacctcgatgttatcgactttgattcgggaacaaaagtgtcaggcacaaaattttactatcttaaaaacgaaggcgtctatcttgagcttggtcttatccgttacgcgcttgatattctgcaaaagaagggatttaccccatttatcactcccgacatcgcgcgcgaggaaatacttgaaggcatagggtttaatccgcggggagcggaatccaatgtgtacacgctggaaggcgaagaaacctgtcttgtaggaactgcggaaattactcttggcggctattactccaacatgatcttgccgaaagagaaacttcccctgcggatggcgggtctttcgcactgtttccgccgggaagcgggcgcggctggtcagttttccaaaggactctaccgcgttcatcagtttacaaaacttgaaatgtttgtttactgtctgcccgaagagtcgggactctttcatgaggagctgcgcttaatcgaagaagaaatttttaagggtcttaacatacctttccgcgtagtggatacctgtacaggcgacttaggcgcgcccgcctaccgcaaatgggacttggaagcgtggatgcccgggcgcaacggcggcgaatggggagaagtaacctctacctcaaactgcacggattatcaagcgcgccgtcttaacattcgttttaaagacgatgacggtaagaataaatatgtccacatgttgaacggaactgcaatcgctatttcccgcgcaatcatcgccgttctggaaaatttccagcaatcggacggcactgtgcgcctcccaaaagcgttagttccctactgcgggtttgatgtgataaagaagaaataa

SEQ ID NO: 71678 - protein, 424 aa, Unknown
  Obtained from environmental sample
  DOMAIN (1)...(106): Seryl-tRNA synthetase N-terminal domain
  misc_feature (1)..(424): Xaa is any amino acid
MLDYKFIAENLHAVTANIADRFMKANAEAVARLYNKRTELATRLQSFQQKRNANADAMKGKLAQEERNVLIEEGKKLKEEISAAESELTAVEAELLTEARKIPNMAHPDAPVGKEDKDNLEVKRVGEPTKFDFEPADHVKLGQDLDVIDFDSGTKVSGTKFYYLKNEGVYLELGLIRYALDILQKKGFTPFITPDIAREEILEGIGFNPRGAESNVYTLEGEETCLVGTAEITLGGYYSNMILPKEKLPLRMAGLSHCFRREAGAAGQFSKGLYRVHQFTKLEMFVYCLPEESGLFHEELRLIEEEIFKGLNIPFRVVDTCTGDLGAPAYRKWDLEAWMPGRNGGEWGEVTSTSNCTDYQARRLNIRFKDDDGKNKYVHMLNGTAIAISRAIIAVLENFQQSDGTVRLPKALVPYCGFDVIKKK

SEQ ID NO: 71679 - DNA, 2598 bp, Unknown
  Obtained from environmental sample
  misc_feature (1)..(2598): n is a, c, g, or t
ttgggcattatatgtcttgatattaaccttgacaggatcagacaacacgccattaatacgcagtttgccgaaaaaggatacggattccttttaagcgcaagcatggagttaatcgcccatcccgaacattctatcataggtatgcagcttcgcgacgtaaaaagccatatatcaacctatgaagatgaattggaaaagaatggttatgtttatgaagtaatatcaaccgactaccgcaacattgaatccatcgtatttatagaaagacttcaaaacggctggtatatgggtgttgtaacgccaaaagacatatattataaaagcacaagaatcatggcgctggtacttacagcaatgggcgctttattggcagcggcgcttatcgtaatattgcttgtaatttttaacgagataaacaaggaaaacgtaagatcccggacaatggcgcattggtataactcaattcttaacgccatacctttgccgataaccgttacggacacggatacaaattggacgttcataaacgaagccgttgaaaaattattgggaataacgcttgaagacgcaataggcaaaccatgcagtaattgggggtccagtatctgtaatacggaagactgcggtatcgcctgcgcaagaaggggtcttcatcaaacttatttttcacagggagactcatcgtatcagattgatgtcgcaatgcttaaagatgtaaatgaaaaaattatggggtacatcgaagtaatacaggacattacaaatctgaaacagattacaaaaaaacaagccgacgcggaagcggctaacgccgccaaatcagccttccttgcaaaggtaagccacgaaatacgcacgcctatgaacgctattttaggcatcaccgaaattctattgcagaatgaagcgctttcacatgatatgcaggaagcgttaagcagaatctacaattcaggttatttattgctaggcattataaacgacatactcgacttgtcaaaaatagaggcgggtaaacttgagttaacgccgattaattacgacgtgccaagccttatcaacgacactgttcatctgaatatcatgcggttcgacagcaagccgattatatttgatctttatttagacgaaaacattccaatgacattgttcggcgatgaattgcgcattaaacagattttaaacaatctgctttccaacgcgtttaaatataccgaagcgggcaagatttctctgtcaatcgccgttgaaccgtccgatgatccatccacgattacgctcttattccgtgtaagcgacacaggacaaggcatgacccgtgaacagttggacaaattatttgacgagtatacccgttttaatctggaagccaaccgcacaaccgaaggagcggggttaggcatgaatatcacaaaacggcttgtagatttaatggacggcacaattttagtggaaagcgcgaaaggcaaaggctctttattcacggtgcgtctgcctcagaaaattgttgataacggtatattgggcaaagcggtagttgaaaacttgatgcagttccgtcttggcagaatgtcgcagatgaaaaaagcgcctcaggttgtgcgcgaatatatgccttacggcaaagttcttatagtagacgacgtggaaacaaatctgtatgtcgccaaaggacttatggctccttacggattatcgatagatacggcgatgagcggatttgaagctgtagataaagttaaaaacggttcgagttacgacattatttttatggatcactttatgcccaaaatggacggaattgagacgacaaaaattatacgcgaatcggggtatacgcagcccattgtagcgttgacagctaatgcgttgacgggacagacggaagtttttatgacgaacggatttgatggatttatatccaaacccatagatatacatcaattaaacgccgtattaaacaaactgatacgcgacaagtatccggttgaaactgttgaagccgcgcggcaagttaaagacaatgttaaaaagggcgccgatcagcagcagtctgtaaacgccgagattataaaaatctttataagggacgcgcaaaaggctattgccatactggaaacaatacaatcaaataattaccgcagagccgacgatacgcaaatgtatgtcatcaatattcacgcgatgaaaagcgcgttggctaatatcggagagcttgaactttcagccgccgccgccaagttggaagacgcgggacgtgaccagaatattgccgaaatatcaaacgatacgccgggctttatatccgcccttagagcggtaattcaaaaaatcaatcctaataaagacgatactgacgataaagcggatgttgctatgagcgaagaagatcacgcgaatcttattgaacagttgtctattatgcaaaaagccagtattgaatttgacaaaaaaaccgttaaaaatacgctggcgcagattcgggaaaggaaattgccgtttacggttaataaattactggaatcaatatcagaacacctgctccacagcgaatttataaagattgcgaatcttatagacaattacaagaatagctga

SEQ ID NO: 71680 - protein, 865 aa, Unknown
  Obtained from environmental sample
  DOMAIN (689)...(777): Hpt domain
  misc_feature (1)..(865): Xaa is any amino acid
MGIICLDINLDRIRQHAINTQFAEKGYGFLLSASMELIAHPEHSIIGMQLRDVKSHISTYEDELEKNGYVYEVISTDYRNIESIVFIERLQNGWYMGVVTPKDIYYKSTRIMALVLTAMGALLAAALIVILLVIFNEINKENVRSRTMAHWYNSILNAIPLPITVTDTDTNWTFINEAVEKLLGITLEDAIGKPCSNWGSSICNTEDCGIACARRGLHQTYFSQGDSSYQIDVAMLKDVNEKIMGYIEVIQDITNLKQITKKQADAEAANAAKSAFLAKVSHEIRTPMNAILGITEILLQNEALSHDMQEALSRIYNSGYLLLGIINDILDLSKIEAGKLELTPINYDVPSLINDTVHLNIMRFDSKPIIFDLYLDENIPMTLFGDELRIKQILNNLLSNAFKYTEAGKISLSIAVEPSDDPSTITLLFRVSDTGQGMTREQLDKLFDEYTRFNLEANRTTEGAGLGMNITKRLVDLMDGTILVESAKGKGSLFTVRLPQKIVDNGILGKAVVENLMQFRLGRMSQMKKAPQVVREYMPYGKVLIVDDVETNLYVAKGLMAPYGLSIDTAMSGFEAVDKVKNGSSYDIIFMDHFMPKMDGIETTKIIRESGYTQPIVALTANALTGQTEVFMTNGFDGFISKPIDIHQLNAVLNKLIRDKYPVETVEAARQVKDNVKKGADQQQSVNAEIIKIFIRDAQKAIAILETIQSNNYRRADDTQMYVINIHAMKSALANIGELELSAAAAKLEDAGRDQNIAEISNDTPGFISALRAVIQKINPNKDDTDDKADVAMSEEDHANLIEQLSIMQKASIEFDKKTVKNTLAQIRERKLPFTVNKLLESISEHLLHSEFIKIANLIDNYKNS

SEQ ID NO: 71681 - DNA, 2259 bp, Unknown
  Obtained from environmental sample
  misc_feature (1)..(2259): n is a, c, g, or t
atgatgtgtgacgtcgtagtctttctgcgggagagggtaggagcgccattctgcattgataccacggaaccggccgtgatggaggccgcgttgaaagtgtcgccgggttccgtattgatcaattccataaatctcgagcacggcggcgccaaggcgcgtaggattttgccgcttgccgttgatttcggctgccccgttatcgcactcaccattgacgacgtggggatggcgggaacggtcgaccgaaagatggaggttgctaggcggctgatagagattgcttgcggcgagtaccgtttgccggaacattatctatacatagacccgctcgtattcactttagcgaccggagacgcggagacggcgaatgccgcgttgaacagccttgaggccctgcgacggttgaaagcggagtttccaaatgtccgcactgttatgggtgtcagcaacgtgtcattcggtctaaagcccgccgcgagacgcatactcaacaacctaatgctacatcacgccgttaaggccggattagacgcggcgatattcaacccgttacatgtagacgatgttaatacatacgataaggatgttagggaactaggggaggctttgctcttaaatcgtagcgccgacagtctgcaaaagttcgtcgagtatttcgtagcgctggaagcgtcgtcgtcacagtctgtacaaaaaggtaaaccgaacgcgggtacaaagactaaagcgaatcaatcccccgaagagcgtttacgctccgcgattatcgacagggacaagcgcaatctgccggagttgatagataagctactttctacccataaagcacccgatatcctgaataatatccttctccccgcgatgtcggaagtgggcgacctgatggctcgcggcgagatgattctgccctttgtcctgcaggcggcggaggcgatgaaagaggcggtctccatcctcgaaccgcaccttaaagagtccggcggcggcgcggtcaagggcaagatggtcatagccaccgtctacggcgacgttcacgacataggcaagaacctcgtggcgtcgatattgcgcaatcagggttttgacatcatcgacttaggcaagcaggtggcggttcagacaattgttgacgcggtgaggcgcgaaaagccgaacatggtgggtctgtccgcgttgctcgttaccacgagcaagcagatgggggagtgcgtcaaggagttcgcccgtcttgggattgacgtgccgattatcataggcggcgcggctgtaaacaaagatttcgccgcgcgtatatcagcgcttgatgacggcaataagtacgcccccggcgtatattacgcaaaggacgcttttggcgtggtgaagatattcgattcgttcggcgttaataatggtatcgatactaatggtactaatgatgtcaatagtaatgacggtcattgcgagcgaagcgaagcaatccggaaagccgcaaacaaagacgtttccaagtcaaccaaaaaaacgataaaacacgactacataatggaacccccgttttacggcacaagcgagatactgactttcgacgccgccgcgctgcttgccggcatagaccgcgaaaaacttttcaagacccgcttcggcggcggcaaactcgacgcggacgcgtacgccgacgcgcggcggaacgagtttgagccggcctttgagcgcctctcctcggatatcataaaaaattcgcttttagatgcgcgcggattctacggcttcctcccggttatagcggacggcgagacggtgattatcctcgacccctccgactaccacaccgagcgtctgtcgttcctcttcccgcgcatggagaagagcggcgtctccttagccgactacatccgtccggagggcgacatattctccccgcaagccgtaacgataggcgcgaagattggagaacttagccgcgaacttctcgtgaagcaggagcgttacagcgacggttactacttaaacggtatatgcaattacttggtagaggacgttgcggacaaactgtccgccgaaatccgccgcgccctcggtctgccgcgtgacagcggtcggcggtacagtttcggctatccgggtatgccctcgcttgaggaacaggctgaattgctggagtttttgggggtggaggagcgtctcggcataacgcttacgcccggattccagatgcagccggagcactcgaccgttgcgatttttgtgcatcatccggaggcggaatatatatcttaa

SEQ ID NO: 71682 - protein, 752 aa, Unknown
  Obtained from environmental sample
  DOMAIN (1)...(157): Pterin binding enzyme
  misc_feature (1)..(752): Xaa is any amino acid
MMCDVVVFLRERVGAPFCIDTTEPAVMEAALKVSPGSVLINSINLEHGGAKARRILPLAVDFGCPVIALTIDDVGMAGTVDRKMEVARRLIEIACGEYRLPEHYLYIDPLVFTLATGDAETANAALNSLEALRRLKAEFPNVRTVMGVSNVSFGLKPAARRILNNLMLHHAVKAGLDAAIFNPLHVDDVNTYDKDVRELGEALLLNRSADSLQKFVEYFVALEASSSQSVQKGKPNAGTKTKANQSPEERLRSAIIDRDKRNLPELIDKLLSTHKAPDILNNILLPAMSEVGDLMARGEMILPFVLQAAEAMKEAVSILEPHLKESGGGAVKGKMVIATVYGDVHDIGKNLVASILRNQGFDIIDLGKQVAVQTIVDAVRREKPNMVGLSALLVTTSKQMGECVKEFARLGIDVPIIIGGAAVNKDFAARISALDDGNKYAPGVYYAKDAFGVVKIFDSFGVNNGIDTNGTNDVNSNDGHCERSEAIRKAANKDVSKSTKKTIKHDYIMEPPFYGTSEILTFDAAALLAGIDREKLFKTRFGGGKLDADAYADARRNEFEPAFERLSSDIIKNSLLDARGFYGFLPVIADGETVIILDPSDYHTERLSFLFPRMEKSGVSLADYIRPEGDIFSPQAVTIGAKIGELSRELLVKQERYSDGYYLNGICNYLVEDVADKLSAEIRRALGLPRDSGRRYSFGYPGMPSLEEQAELLEFLGVEERLGITLTPGFQMQPEHSTVAIFVHHPEAEYIS

SEQ ID NO: 71683 - DNA, 999 bp, Unknown
  Obtained from environmental sample
  misc_feature (1)..(999): n is a, c, g, or t
ttggtcataccggctgtgggtgttgttgggattggccttgtgttgcgaggtgtttttgtggaaacgggagggaaagtgatgaagcataaatacatagagatgattgacaggcgcgaaccggtcgtctttgacggcgccttcggtacggagttgcagaaagccggtctttccgagagcgatttcggcgggtacgccggatgcaacgagtacctgaacatcacccgcccggacatcgttgagggtattcacgcgagttatcttgaggccggggcgcacgtcattgagaccaatacgttcggcgggagcagggtgaagcttggggagttcgggctgggggagagggcgtacgagatcaacaaggcggcggcggagattgcgcggcgggcgatagaaaagttcgttagtatcgataataatgacggtaccggcagattcgtatgcggaacaatgggccctacgggattcctcccgtcgtcaagcgataaagagttatccaaaataaagtttgacgaattgacggacgtcttcaccgaacaggccaaagggttgattgacggcggcgccgatgttctgttgatagagacgtcgcaggaccttttagaggtacgcgccgtagccatagccgtcaaaaggcttatgtcgtccatgagtaaatacgtccctatccaggcgcagattactatggacggcagcggccgtatgctcctaggcagcgacatatcggcatttctcggcgcggttcacgggcttggcgttgacgttatcgggatgaactgcagcagcgggccggacgagatggggccttatatagataaattgcttgaattgtcaaccatccccgtatccatgctgcccaacgccggattacccgtcaacgttgacgggcgtgcggtttacaagatggacccgcaggagttgccgccaaggtatccgcgttcgttaaaaataagggcgtcgcggtcgtcggcgggtgttgcggcaccgctccggagcacataa

SEQ ID NO: 71684 - protein, 332 aa, Unknown
  Obtained from environmental sample
  DOMAIN (41)...(331): Homocysteine S-methyltransferase
  misc_feature (1)..(332): Xaa is any amino acid
MVIPAVGVVGIGLVLRGVFVETGGKVMKHKYIEMIDRREPVVFDGAFGTELQKAGLSESDFGGYAGCNEYLNITRPDIVEGIHASYLEAGAHVIETNTFGGSRVKLGEFGLGERAYEINKAAAEIARRAIEKFVSIDNNDGTGRFVCGTMGPTGFLPSSSDKELSKIKFDELTDVFTEQAKGLIDGGADVLLIETSQDLLEVRAVAIAVKRLMSSMSKYVPIQAQITMDGSGRMLLGSDISAFLGAVHGLGVDVIGMNCSSGPDEMGPYIDKLLELSTIPVSMLPNAGLPVNVDGRAVYKMDPQELPPRYPRSLKIRASRSSAGVAAPLRST

SEQ ID NO: 71685 - DNA, 1941 bp, Unknown
  Obtained from environmental sample
  misc_feature (1)..(1941): n is a, c, g, or t
ttgtcggtgatactgtttctgcacttcttcaggcgcagggttgttaagcggatggagctttccacgctgcgcttctttccggcatccgccgtcagtaagtcacgggttaagaagctgattgacatactgttactattggcgcggttgcttttggtcgcggcgctggcgttggtttttgcggggttacacgacaaaagcagtccgctcgtggccttgagcgatcccaatacggtcgtctgcacgtggattgatcctacggtcagtatggagtacgtcgagggcggggcgtcggcgggccggcgggcggaggctatcgtcgattcgctgattgccaagttgccgccctccgccgaacgttactgctttgaccacgggagcgggcgttttgttccgccggctgacaaaaaatcatcggcggttacggatgccgataatgacgggcaagagttttccgggcgattcggtccggttaatttaggcgaggccgccgacgctttcgcggcgttgacggaacattccgagcgtcccgccgtattcgtggctctaagcgattttcagaggagtacggtcgacgcctttgattccgtttcgcatcggttgaccggcgataacaagaaggtcgtttgcgtctctctggcggcggcaaatccgtacaactattcggtgagggtgcataggggggcgctgagcggcggcggtctctcggcggtcgtatacgctgccggcgcggcgttggactccacctacgttgagttgaccgtgggggagttgcggattgggcagaggagcgtttcgtgcaaagcgggcgactccgttaccgtgaccttcgatctgccgcagacgaaagacggggcgtgggggaaggcggagcttcatgtcaacgacccgttgcagtttgataacagggcctatttcacactgtcggcggatcagcatagggaggcgctgataatcggcgacgtgcggcgcaacagggtgataggcgcggcgctgaaggcgtcggggccggcgttttggaacgccgtcacgctgaaggagggtaatgagctcacatacgaggacatcaacgcggctaaccttgtgataataaacgggtttaacgggcgctcaagggtgttggagtcgttcataaccggcggcggcggcgacaagggggttatcgtagccttggatccggagcgtgaggacgatttcggacggtcattcatgcgcagcgccggcatacttcctacggcgcagaaagtgaataaggctgagaacggcgtaagtccggtgttgacagacactaattcggctatgtggcgcggttttcccgccatgtctagcaacaattcgcgggtctacagttacgtctcgccgcttgccggcagtacgcttgtgaggttgggcggttcgtcggcgctggtcgcttcggtgtcccgtacaggctccgaattgttgataatttccaccccgataggcgtgactcagtccaataatctctgcgagacgggcttcttcgtgcccttcgtagaccgtctcggccgccgtgcgctggctgggcgcgggcagtcggaggagcgttggtacgccggctacgtggtgcgcaacccgtttttgggcggcgggcgcaccggaacgctgtacggcgcggacggcaagctcgtggccgcgtggtcaagccagcccaatgtccgtgttgatagacccggcgtctactcgttggtatcgtcagcgggggaggcggcgaacattgcggtctccccgcaccctattgagggcgagatgatttttaggcagccggattttggaacggccgggggcatatattattttgaatccggggagtttttggagcggatgggcaaccttgccaataatatttggtcataccggctgtgggtgttgttgggattggccttgtgttgcgaggtgtttttgtggaaacgggagggaaagtga

SEQ ID NO: 71686 - protein, 646 aa, Unknown
  Obtained from environmental sample
  DOMAIN (3)...(70): Protein of unknown function (DUF1550)
  misc_feature (1)..(646): Xaa is any amino acid
MSVILFLHFFRRRVVKRMELSTLRFFPASAVSKSRVKKLIDILLLLARLLLVAALALVFAGLHDKSSPLVALSDPNTVVCTWIDPTVSMEYVEGGASAGRRAEAIVDSLIAKLPPSAERYCFDHGSGRFVPPADKKSSAVTDADNDGQEFSGRFGPVNLGEAADAFAALTEHSERPAVFVALSDFQRSTVDAFDSVSHRLTGDNKKVVCVSLAAANPYNYSVRVHRGALSGGGLSAVVYAAGAALDSTYVELTVGELRIGQRSVSCKAGDSVTVTFDLPQTKDGAWGKAELHVNDPLQFDNRAYFTLSADQHREALIIGDVRRNRVIGAALKASGPAFWNAVTLKEGNELTYEDINAANLVIINGFNGRSRVLESFITGGGGDKGVIVALDPEREDDFGRSFMRSAGILPTAQKVNKAENGVSPVLTDTNSAMWRGFPAMSSNNSRVYSYVSPLAGSTLVRLGGSSALVASVSRTGSELLIISTPIGVTQSNNLCETGFFVPFVDRLGRRALAGRGQSEERWYAGYVVRNPFLGGGRTGTLYGADGKLVAAWSSQPNVRVDRPGVYSLVSSAGEAANIAVSPHPIEGEMIFRQPDFGTAGGIYYFESGEFLERMGNLANNIWSYRLWVLLGLALCCEVFLWKREGK

SEQ ID NO: 71687 - DNA, 2241 bp, Unknown
  Obtained from environmental sample
  misc_feature (1)..(2241): n is a, c, g, or t
gtgaaagactgccttcccaatgataatgatatcaacgccggcgaagtcatcagactcgcaagcgcccatcataacccttccgcggacgacgaacagctcattgcccgcggcgacaggttaagcaacggcgcggagaagagcgatgaaaataaaaacaatgatgataagacttctctaaaaccccttgtccatccggctacgaaactgcatagaaaaggaaaagacgcgccgcatcctttgtttgttccgttaaaagcaatggaaagcaagacagtttttccccgggaaaatgtcaatgttgatgaacaagaatataaagcagaatataatgcattatggaaagattttaaagaagacttcctcgcgttaaaaggactgcaatataataactttatccgttcccttgacacgttaatggaacgatattgctggtgtattccctcttcgccgcttaatgacgatataagtttatatcaacattcaaaacttgccgccgctttcgccggaaccctgtatttatttcataaagaaaaaggcgctaatacggaagagccccccttcctttttatacagggggatatgtccggaattcaaaaatatatctttgatttaaaaacaaccaaagacaacgccaaactgcttagggcgcgtagttttcaagtgtgggctttaagcgaattaatagcggaataccttgccgtacaattcggggtttcaggcgaaaacataataacttcttccggtggaaaatttcttttgcttgcgcctaacaccgacagcgttacaaataatttgccgaaattacgccgggatatagaatggtattttttaagggattttgccggtatatttacatttgtactgagcgacggcgcccccgccgcggattccgattttcaaccgggatacgtaaaaaaattgcttgacgatatcggcatgaaaggtgatgaggcaaaacaaaaaaagatgcaggccgcgcttggcgaacacggtcatgtgcttaaagacctgtatgatgatcttaaaaaatacggcggtgtatgcgattattgcggcaccttgccggctgattataaaccaaaagataaaccagaagataagccagaagataagccagaagataaaactaaaaaaataaaattgtgcaagaactgcaataaattaatagaaataggcggattattgcttaagactaagacaagtaaaatcgttcttgagccgccggaaaagctgtcagacgaggagtcacattttcataatatgatccgtatcataggtgaaaatgataaagattttgggtatctgactaagtacaccccgggaaatcctctgatatccctgccttatgccgcgccgtttgataaaaacgacgatctatgcacttttgatgatattgccaaaaaagcggagggagataaaaaacttgccatgttcaaggcggatgttgacaatttgggcctggtatttacatcatcgtggggagaaggaaaagataacaaaatctctctttcccgttatgcgcaattaagccgccatctgcattattttttctcgggcgttgtcgcggattttataagcgataaccctgatcccgggaaaaagaaagagtacgcggaaaatatttatactgtattttccggcggcgatgatctttgcgttataggcgcgtggaatacaattatgcattttgccgccgatttcagaaaatatttttcaaaatttacaaacaacaatccttctgtgacgctttcaggcggcattgccatgttcagcccccacctgcctgtgcgctccgccgtggcaatggcggaagaagcccttgatgagtcaaaaggccgcaaagaaatagataaaaaggaccagaaagaaaagacagtaaaagacggcatttccatgttcggcgttacgttagactgggaagaatacgaaaaaagccttaaagacgcaaaaaaacttcttgattatatggatgaaaagaaacaacaaaaaccggtcagcaccgcggttgtctataagatgattgatttcgctaaccgcgcaaaaaagtcggataaaaaaagcctgagggatatggcctggctgagcaattaccggtatataattgccagaaatatcgatcatgaaaacaaaaaagctgttgatttttttagagatttcggcgcctgcccggaggctatggaaaaatcgcgcattgcggtaagttatgcgttatatgcaaaaaggactaaaaaggaggattga

SEQ ID NO: 71688 - protein, 746 aa, Unknown
  Obtained from environmental sample
  misc_feature (1)..(746): Xaa is any amino acid
MKDCLPNDNDINAGEVIRLASAHHNPSADDEQLIARGDRLSNGAEKSDENKNNDDKTSLKPLVHPATKLHRKGKDAPHPLFVPLKAMESKTVFPRENVNVDEQEYKAEYNALWKDFKEDFLALKGLQYNNFIRSLDTLMERYCWCIPSSPLNDDISLYQHSKLAAAFAGTLYLFHKEKGANTEEPPFLFIQGDMSGIQKYIFDLKTTKDNAKLLRARSFQVWALSELIAEYLAVQFGVSGENIITSSGGKFLLLAPNTDSVTNNLPKLRRDIEWYFLRDFAGIFTFVLSDGAPAADSDFQPGYVKKLLDDIGMKGDEAKQKKMQAALGEHGHVLKDLYDDLKKYGGVCDYCGTLPADYKPKDKPEDKPEDKPEDKTKKIKLCKNCNKLIEIGGLLLKTKTSKIVLEPPEKLSDEESHFHNMIRIIGENDKDFGYLTKYTPGNPLISLPYAAPFDKNDDLCTFDDIAKKAEGDKKLAMFKADVDNLGLVFTSSWGEGKDNKISLSRYAQLSRHLHYFFSGVVADFISDNPDPGKKKEYAENIYTVFSGGDDLCVIGAWNTIMHFAADFRKYFSKFTNNNPSVTLSGGIAMFSPHLPVRSAVAMAEEALDESKGRKEIDKKDQKEKTVKDGISMFGVTLDWEEYEKSLKDAKKLLDYMDEKKQQKPVSTAVVYKMIDFANRAKKSDKKSLRDMAWLSNYRYIIARNIDHENKKAVDFFRDFGACPEAMEKSRIAVSYALYAKRTKKED

SEQ ID NO: 71689 - DNA, 678 bp, Unknown
  Obtained from environmental sample
  misc_feature (1)..(678): n is a, c, g, or t
atgatacagaagccatcaaaaaaattatccggaaaaattgaagtattaacaggtttacatataggcgccggtaacgacaaggttgaaataggcggtattgacggccctgtaataaaaaatcctctaacaagggagccgtatattcccggttcttccataaaagggaaaatgcgcgcgcttcttgaatggtcaatagaaggcaaggttaaagaatataacggcgatccttgcaaatgcggaaaaagcagctgccctatttgccgggttttcggaagcgcaaacaacagtgaagtaaaaaccgaaatccgcggaccgacccgcctgattataagggatgcggtacttgatgaggaatccaaaaaaaagtttgaagcggagaagccgattattgaggaaaaatacgaaaacaacataaacaggatcgatgccagtgcgggcctgcggcaaatggaacgtgttgttcccagcgtaaagtttaaatttgaacttgtctaccgtatttttgatatggacgacgacaaaggtaaaaaagacttagaattattcgactctgtagtaatcaaaggattaaaactactgcaaaacgacttccttggaggaggcggaagcaggggtaacggccggattagatttatcggtttggaagacaatgaaggcaataaatatcaattgggatga

SEQ ID NO: 71690 - protein, 225 aa, Unknown
  Obtained from environmental sample
  DOMAIN (11)...(210): RAMP superfamily
  misc_feature (1)..(225): Xaa is any amino acid
MIQKPSKKLSGKIEVLTGLHIGAGNDKVEIGGIDGPVIKNPLTREPYIPGSSIKGKMRALLEWSIEGKVKEYNGDPCKCGKSSCPICRVFGSANNSEVKTEIRGPTRLIIRDAVLDEESKKKFEAEKPIIEEKYENNINRIDASAGLRQMERVVPSVKFKFELVYRIFDMDDDKGKKDLELFDSVVIKGLKLLQNDFLGGGGSRGNGRIRFIGLEDNEGNKYQLG

SEQ ID NO: 71691 - DNA, 978 bp, Unknown
  Obtained from environmental sample
  misc_feature (1)..(978): n is a, c, g, or t
atgacagacgataaaacaaaactttaccgcgtacgtttaaaattatattcctctattgttaccccgttaaaaggcgacaccatttgggggcacattgtatggggaatagcgaacaataaaggcgataaagaagttgacatatttttggatcaggaaaaatccgatccgcccgccttggtagtttccagcgcttttcccgcgggaatgttatgccgcaatttgccgcttccggttgaaagaggggaattggatgaggaagaatatgccaaaataaaaaaggaaaagaaaaaaaaatataaattggcgtctgaatattttgaggaagcggaaacacccaatgataaaatgaaaaatattcagaaagatattaaagaaggagtttctgttatgcataatatcccggttatgcacaataccattgaccgttctaataatacagtcctggatggtggcggaggcccgtattcaatcgaagaaaaatggtccggaatacttaaagatgatacctatacaaatattgactgggatttatatatcctttcatattttgacccggatcgcattagagagcttgttgattgggcatttgagaacggttacggcgccgacgcgtcaacggggaaaggaaaaatagaaagaataggcgatccgattcaagttaagccaaaagttaagccaaagaaggaaggaaataaatatatggctttggggccttttgtcggaaccgataaaacaaagaaaatccgcgctgatgtttttgtccgctcgggcaaactgggcggttctttcgcttccggtttgtctccttataaaaaaccggttgtgcttttcgatgaaggggcggtatttgaatgtgatacagagattaaatacgccggaaggctgctggaaaaaatgcacgaaatgcacgggactgacgaattaaatatatgtcagtccggttttgcgcctgtaataccgattgaacaagaggattga

SEQ ID NO: 71692 - protein, 325 aa, Unknown
  Obtained from environmental sample
  misc_feature (1)..(325): Xaa is any amino acid
MTDDKTKLYRVRLKLYSSIVTPLKGDTIWGHIVWGIANNKGDKEVDIFLDQEKSDPPALVVSSAFPAGMLCRNLPLPVERGELDEEEYAKIKKEKKKKYKLASEYFEEAETPNDKMKNIQKDIKEGVSVMHNIPVMHNTIDRSNNTVLDGGGGPYSIEEKWSGILKDDTYTNIDWDLYILSYFDPDRIRELVDWAFENGYGADASTGKGKIERIGDPIQVKPKVKPKKEGNKYMALGPFVGTDKTKKIRADVFVRSGKLGGSFASGLSPYKKPVVLFDEGAVFECDTEIKYAGRLLEKMHEMHGTDELNICQSGFAPVIPIEQED

SEQ ID NO: 71693 - DNA, 951 bp, Unknown
  Obtained from environmental sample
  misc_feature (1)..(951): n is a, c, g, or t
atggctgaagagatggagattccatccggcttttgggatgccggaaggggtggaattattcatgtcgccaacataaagggcggcgtgggcaagtctactctagccacaaaccttgccgcctccctaggtaggcacgggccgaccttgctcatagacttggacatgcagggcagcgccggcgtcgctctcggcattggcgccgaagccgcccccaagtatacgtcgtgggacctctttaaacggcggtttaaatctcggttacccatatccgcgtacttaaaaacgcttgacatagtagggtttctcgccaaattagaggagattaccatcagtaaaatcttcggcgggggatcggtggacgacgccatagtgcgggcgacgccggggttgcacgtggtaccggcgagctccgggcttttcaacgcgccggccggctaccagtacggcaattttttgcacaacctgaacatagtcagacagcgttataaatatatagtaattgataccccctcagtctggaataggcttacgcggttcctatatgtcaacagtgatttgaacctgattcccgtcacgctcgacgcgttatcgacaaatagtttcaaggagtaccttacccacatcaagcgtctgatttcgcacaattcccacgttcgtttgcgcatagtgaaaaacgaagtgggccgcggcggcgactatggcgccaacgggaagacgggcaccataaacctaaaccgccgctttctcgactcgctttgcgagcaggtcgccgtgcacaacgacagcgggtttgcgcttctgccgcagtcgatcatgtttgatttggagataccggagtcctcggccattagggacgcgcaggacgccggaaagagcgttcacgaacacggcggcgaccccgccgtcgtcaaggcttttgacctgctggcccaaatgtccaacaggtgctaa

SEQ ID NO: 71694 - protein, 316 aa, Unknown
  Obtained from environmental sample
  DOMAIN (20)...(260): CobQ/CobB/MinD/ParA nucleotide binding domain
  misc_feature (1)..(316): Xaa is any amino acid
MAEEMEIPSGFWDAGRGGIIHVANIKGGVGKSTLATNLAASLGRHGPTLLIDLDMQGSAGVALGIGAEAAPKYTSWDLFKRRFKSRLPISAYLKTLDIVGFLAKLEEITISKIFGGGSVDDAIVRATPGLHVVPASSGLFNAPAGYQYGNFLHNLNIVRQRYKYIVIDTPSVWNRLTRFLYVNSDLNLIPVTLDALSTNSFKEYLTHIKRLISHNSHVRLRIVKNEVGRGGDYGANGKTGTINLNRRFLDSLCEQVAVHNDSGFALLPQSIMFDLEIPESSAIRDAQDAGKSVHEHGGDPAVVKAFDLLAQMSNRC

SEQ ID NO: 71695 - DNA, 876 bp, Unknown
  Obtained from environmental sample
  misc_feature (1)..(876): n is a, c, g, or t
gtgttgctcgctatcgtagcaataaatcccgcgataccggacgccgccgcgccgcgtccgttcgcgccgcagcagattatggagcatgccggcaccaactccttcgtccacaccttcggcaagggcgacaacgccacccgtatggcaaagtacgccataagcgtgttcagggcgatggtgccgtcgcagaaggagatatcccagtacctgaccgagacgatcgacgcctacaatatgacgcgtatgccgagcgagcccaagatcgtagatccaagcagaatcccggagggcacaaagctcacattctatccgcctatgtccataatgaacaagcaggaaaaggcgctcgcgccggcgtacaaattctttatggatatggtaaacgacccgtatccctacgtgaccggcgattggtgcgaacgcggaaccggcggagggcagccgcactacgccattgatgtggccggcacatacggcagcgagatacttagcccggtggacggcatagccgcgcttaaaacggagccggccggcggcagaaccgtggccgtgatgttcgggaacgaggtgatagctttttcgcacctagaaaaccgcttcgtgaaagacggggacgccgtcaaaaagggcatgcccgttgggacgataggaatgacgggaaggacgagcgggccgcacgtgcacgttacctacggcataatgagcctgtcgcgccacgacataaacttcgcgcaaaacaactatagggtgaccgaccccaagcacctattctataagatggcgttcggcggtatggtggaaggtgtggatggggaaccgttgccgttgccgatgcaacaactgacatccccctcttcggtaccgatactggagtag

SEQ ID NO: 71696 - protein, 291 aa, Unknown
  Obtained from environmental sample
  DOMAIN (147)...(253): Peptidase family M23
  misc_feature (1)..(291): Xaa is any amino acid
MLLAIVAINPAIPDAAAPRPFAPQQIMEHAGTNSFVHTFGKGDNATRMAKYAISVFRAMVPSQKEISQYLTETIDAYNMTRMPSEPKIVDPSRIPEGTKLTFYPPMSIMNKQEKALAPAYKFFMDMVNDPYPYVTGDWCERGTGGGQPHYAIDVAGTYGSEILSPVDGIAALKTEPAGGRTVAVMFGNEVIAFSHLENRFVKDGDAVKKGMPVGTIGMTGRTSGPHVHVTYGIMSLSRHDINFAQNNYRVTDPKHLFYKMAFGGMVEGVDGEPLPLPMQQLTSPSSVPILE

SEQ ID NO: 71697 - DNA, 1644 bp, Unknown
  Obtained from environmental sample
  misc_feature (1)..(1644): n is a, c, g, or t
atgtctatagtaaattttataaaccagcaattaaaagccgaagtgccggagaatacgccgcttgttacggcggcaagaacagccggggttacaattgaaacgccatgtaacggcgttggaacctgcggcaaatgcaaagtgcgccttgccgaaagagtccagcttgaaaatgtcgagattcacgggtcgcatccttctttaaccgaagcggaaatacaggacggctatattctggcttgtcaggtgaaggtaaaaggaaatatcgacatactctgcaatgaaaagacaacggaaaaccgtaatgtgcgtattatttcatcggggcatacttttgattacgagataaaatcttttataacaaaaaaaacggacggcaagaatacaaaagtattcggcggcgaagcattgctcggaaccgaggacggcgatactgtgaatcagatgtacggcattgctttggacattggaacaacgacaatggtttcggaactttacgatctgacagacggcaaacttctggcaagcgaaagcatgctgaaccctcaaagcgcgtacgctcaggacgtgttgtcgcgtattcaattcgcaaaaggagaaaacggacttactgttttgtatgaagcgtttttaaaagcgtttggagcattgcgcgattcaatcgtgaacacggcgcggattgaccccaagtacatatatgaggttgtgttttccggcaataccgccatgcttcatcttgccgtaaacacagacccctctccgcttggcaaatatccttatatttcaaatgttaagggaggagagagtatacccgcagcaggacttggaatttcaaactttggtctggtttatctgccgccgattatttccgcgtttgtcggcgcggacataacgtcgggaatttttatatcaaaattgaaagagaagaaagggaaaactctttttattgacataggaacgaacggggaaattgtaatggcgaataacggtcgtcttgccgctacctctaccgccgccggtcccgcgtttgagggaatgaacatcgcgtgcggtatgcgcgcggctccgggcgcggtggaacaatttacgattgatgaaaacggcggctttagttttaaaactatcggcggcaataaagcgacaggcatttgcggaagcgggcttttggatattacgggagaacttgtaagaacaaaagtaattgaaaaaacaggcagattcgcgaaggctaacccattactcaaagagcataacggcaaaccggcgttttttattacagacgatgtatttcttacattgcaagacgtgcgtcaggtgcagttagctaagggtgcgatacgttccggcattaccgcgctgttgaattcgttgggtatcggcgcggacgatattgacgaagcgttgattgcaggctcctttgggtatcatctttcagaaagcagtctgctcaatataggactgcttcctcccgagctaaagggaaaaataaagttcttgggcaacacatcgcaatcaggcgcggcggcgtttttgctgaacgccgattttagaaaaaccattccgcaaataattgacggcgttgaaaaaatagaacttgccaacacgccgcattttgacgacatttttgtgcagtcgctgggattctga

SEQ ID NO: 71698 - protein, 547 aa, Unknown
  Obtained from environmental sample
  DOMAIN (5)...(86): 2Fe-2S iron-sulfur cluster binding domain
  misc_feature (1)..(547): Xaa is any amino acid
MSIVNFINQQLKAEVPENTPLVTAARTAGVTIETPCNGVGTCGKCKVRLAERVQLENVEIHGSHPSLTEAEIQDGYILACQVKVKGNIDILCNEKTTENRNVRIISSGHTFDYEIKSFITKKTDGKNTKVFGGEALLGTEDGDTVNQMYGIALDIGTTTMVSELYDLTDGKLLASESMLNPQSAYAQDVLSRIQFAKGENGLTVLYEAFLKAFGALRDSIVNTARIDPKYIYEVVFSGNTAMLHLAVNTDPSPLGKYPYISNVKGGESIPAAGLGISNFGLVYLPPIISAFVGADITSGIFISKLKEKKGKTLFIDIGTNGEIVMANNGRLAATSTAAGPAFEGMNIACGMRAAPGAVEQFTIDENGGFSFKTIGGNKATGICGSGLLDITGELVRTKVIEKTGRFAKANPLLKEHNGKPAFFITDDVFLTLQDVRQVQLAKGAIRSGITALLNSLGIGADDIDEALIAGSFGYHLSESSLLNIGLLPPELKGKIKFLGNTSQSGAAAFLLNADFRKTIPQIIDGVEKIELANTPHFDDIFVQSLGF

SEQ ID NO: 71699 - DNA, 2514 bp, Unknown
  Obtained from environmental sample
  misc_feature (1)..(2514): n is a, c, g, or t
ttgaagggaaagacaatgacgactaaagattcattgaaagaaaaaactcaagcccttcttgagtatccgcaaataatggagaaagcggcaaatctttccgtcagcgaagaagcggcgtcgataataagaaattcatcgcccgtatacgacgattcaatcgagaaaataaaatcaatggtacacgcgatttttacattgcttaaaacccgcaatgacgaaccgcgcttgggactcccctctatcggcttcctgattccaaagattgaaacagagggcgcggttctggctcttgacgaagttttagccgtcgggctttttgtcgagcgcgcggacgaatttacaaaatggataatcaaagataaaaacgaaaacagggaacagtcgtcggaaggcaaagaagcgcttttttctctgctggaaaatttacccgtctgcgctcccgtctctacagaaatttttaaaataatcgacagagaaggcaatttgcgcgatcttcccgcgttacgcgccattaagaagcggataaacacacttgaaaaagaacttgataaagcggtttccggttatattgctaacgaggattataagcgtatgcttcaatcgcctctgccgtcgcaaagggacggaagggctgtacttgcggtaaaggtgaattttcgcggaagaattcccggcattttgcatgaagtgtcgtccagcgggcagacagtctttgtagagccgcttgatgtcgtggataaaaataatgaaatcttagtggaaaaaagaaatctggacgcggaagtgcaaaaaatcctgcgcgagcttacggaaaatatttccgttcacgctgaaagtttaaaaaagtttcaccaaacgattatcgagcttgagtgtttaagaactaaggcaaggtattcggcggaaaccaaaggacacttcgcgctgaatacggacacagggcaaagtcttttgttaaaacaggcgcgccaccctatgttaaaaaaagcggttcccatcaatatagaaatgggcagttctatccgcacattgattatcacaggtcccaacacgggcggaaaaacggtcgcgttaaaaacgctcggtctttttgccatgatgaatcagagcgcccttgctctgccgcttgacgaggggagcgtacttcccattttcgacggaatattcgccgacatcggcgacgagcagtcgattaatcagtctctttcaactttttccgcccacattacgaacatatcgggaataacatctcacgcgacggaaaactctctcattctgcttgacgagcttggctccggaacagacccgcaggaaggcggcgcaatagcgatggcggttttggattatttaatagaaaaaaacgcaaggatgatcattacaacccaccacggaattttaaaacattacggctacacgaggcagggcgtggaaaacgcgtccgtggaatttgacgcgcatacattatcgcccacctacaaaattattaacggactgccgggcgaaagcagagcgttagatatcgcgctgtccaacggtcttaattccgaaattgtatccaaggcgagaagttacattgacgaagaaaagtccgatgtctcagagatgataaaaagtcttgaggaaaaacaaagagaacttgccggactggaaaaaaagagtacgctagagcaaaacaaattaacggaagaaaaaagaaaagccgatttaaaagaattgcaattacgtcagaaggaagccgaattaaaacgcgaatcggtcggaaaactccagcaattcctgagtgaaagcagaaaaacgctggaaaaccttgtgcgcgagttaaaagagggcgaagttgaccgcgagaagacgctgaaagtaaaagaatttttaaacgagcttgcgcgcaatgcggaaacggagagcgaaacgctggaagccgaagaacgcgctatccgcaaattaaccaaagaaaaaagtcatgtctcttctcgcgcctacggaaacgccgccgaagaaaacgattctgtctttgcccccggcgcggaagtttttgcaggtaaatcaaaacagcgcggggtaattatccgcgcggacaaaaaaacagcccgctcatcggaagacgcggacatttcatggctggtaaaaatcggttcgctgaaaataagttttccggagagcgagttaattccagcggaaagcgtaaaccccggcgcaaaaacttccggtaaatccgcgggcaaaaaaaacgcgtttaagtcgtgggaagcggaatacggcgcatcaacggaagtggcttacgagataatgattcgcggaatgcgctttgaggacgcgatggaagctgtccgcaaacagttagacgcggcggtaatcttcggtatgaaacatttcgctgtcattcacgggaagggggaaggtattctgcggcagggcgtacacgactatttaaaaaaacaccccgcggtagcggagttttatttctcacgccccgaaatgggcgggtatgggcgcacggaggtcgtgcttaaataa

SEQ ID NO: 71700 - protein, 837 aa, Unknown
  Obtained from environmental sample
  DOMAIN (312)...(531): MutS domain V
  misc_feature (1)..(837): Xaa is any amino acid
MKGKTMTTKDSLKEKTQALLEYPQIMEKAANLSVSEEAASIIRNSSPVYDDSIEKIKSMVHAIFTLLKTRNDEPRLGLPSIGFLIPKIETEGAVLALDEVLAVGLFVERADEFTKWIIKDKNENREQSSEGKEALFSLLENLPVCAPVSTEIFKIIDREGNLRDLPALRAIKKRINTLEKELDKAVSGYIANEDYKRMLQSPLPSQRDGRAVLAVKVNFRGRIPGILHEVSSSGQTVFVEPLDVVDKNNEILVEKRNLDAEVQKILRELTENISVHAESLKKFHQTIIELECLRTKARYSAETKGHFALNTDTGQSLLLKQARHPMLKKAVPINIEMGSSIRTLIITGPNTGGKTVALKTLGLFAMMNQSALALPLDEGSVLPIFDGIFADIGDEQSINQSLSTFSAHITNISGITSHATENSLILLDELGSGTDPQEGGAIAMAVLDYLIEKNARMIITTHHGILKHYGYTRQGVENASVEFDAHTLSPTYKIINGLPGESRALDIALSNGLNSEIVSKARSYIDEEKSDVSEMIKSLEEKQRELAGLEKKSTLEQNKLTEEKRKADLKELQLRQKEAELKRESVGKLQQFLSESRKTLENLVRELKEGEVDREKTLKVKEFLNELARNAETESETLEAEERAIRKLTKEKSHVSSRAYGNAAEENDSVFAPGAEVFAGKSKQRGVIIRADKKTARSSEDADISWLVKIGSLKISFPESELIPAESVNPGAKTSGKSAGKKNAFKSWEAEYGASTEVAYEIMIRGMRFEDAMEAVRKQLDAAVIFGMKHFAVIHGKGEGILRQGVHDYLKKHPAVAEFYFSRPEMGGYGRTEVVLK

SEQ ID NO: 71701 - DNA, 405 bp, Unknown
  Obtained from environmental sample
  misc_feature (1)..(405): n is a, c, g, or t
ttgcgttcttcgggacaatcgggagtggggaaatcgagtattataaacgcgctggagccggggtttgggataaaggaaggggaactgaacgaaaagtacgacaggggcgttcacacaacaacaatgtcgtatatgtttcagctaacggacggaaccagttttatcgacacgccgggagttcgccgttttattcccgacaggatagactcaagcgaggtgataaattatcttcgcgaatttgcgccgcttgccggtaagtgcagttacgggctttcatgctcccacagaacggaaataggctgtaaaataatggaggcggttcacgccggcgttattcacgaggacagatacgagagttttctgcggataatcgacgatcttgaagggaaagacaatgacgactaa

SEQ ID NO: 71702 - protein, 134 aa, Unknown
  Obtained from environmental sample
  DOMAIN (1)...(125): Protein of unknown function, DUF258
  misc_feature (1)..(134): Xaa is any amino acid
MRSSGQSGVGKSSIINALEPGFGIKEGELNEKYDRGVHTTTMSYMFQLTDGTSFIDTPGVRRFIPDRIDSSEVINYLREFAPLAGKCSYGLSCSHRTEIGCKIMEAVHAGVIHEDRYESFLRIIDDLEGKDNDD

SEQ ID NO: 71703 - DNA, 1395 bp, Unknown
  Obtained from environmental sample
  misc_feature (1)..(1395): n is a, c, g, or t
atggccgaggtacaaaacggcgagccgctgtgggcagggcggcttgcggaagttccgcaggcggaggcttttgcttttcaggcgtcaatcaatgttgacagccgccttgtcttcgacgacattgcggggagtaaagcccacgccgctatgttgggcaaacagggaattatcacaaaggacagcgcagggaaaattgtaaaagaacttaacgctattgcaagcgaaattaaagcgggcaaattgacgatagatacaacgcatgaggatattcattcttttttggaagcggttttaacggagcgtctcggcgatacaggcaaaatggttcacgcgggacgaagcagaaacgatcaggtggcggtcgctttccgcctgtacctgaaacgcacagtgccgcaattacaaaatgaattggctgcgcttgttaatgttcttcttgatacggcgttgtctcatgtaaacagcataatgcccggttacacgcatcttcaaagggcgcagcctgtaacgcttggacatcacctaacggcatggtgcgccgcgctggaaagggattattcccgctttagcgacgctcttaaaagatttgacgagtgtcctttgggaagcggagcgttagccgccactaccctgccgttggatcgcaagactgtagcgcaggatttggggttcagcaggttatgtgtcaattccatggacgccgtggcggatcgtgattttgttttggaactttcaagcgcctgcgctgtcactatggttcatttatcgcgtttttgcgaggacgtggttctgtgggcaagcgaagaatttaaatttatcgatcttgccgaatcgtggagtacgggttcttcgatcatgcctcagaaaaaaaatcccgactttgcggagcttatccgtggaaagacaggacgaacaacgggcaaccttgtcgctcttttcactctgttaaaaggactgccctatgcgtataacaaagatttacaggaagataaagaaaatcttttcgacagcatcgacacattgaacgcctgccttcgtatgtttacgggaatgattaaaagcgctcaatttaacattaagcgaatgaaaacggcttgcacaggcggctttttggaagcgacagacacggcggaataccttgtccgcaaggggcttcctttccgagccgcccacgaaaccgccgcttctttggtgcgtgattgtatcgaggcggggcataaacatatcggcgcgttgacgcttgagcagttaaaaaaacgctccaaactttttgaggatgatatttacaaactgataacgccgtcagcctgcgtaaaagcgagagatatagcggggggacccgctcccaaagaagtccgcaggcagataaaactgttacgcaaaaaaatcaattaa

SEQ ID NO: 71704 - protein, 464 aa, Unknown
  Obtained from environmental sample
  DOMAIN (13)...(307): Lyase
  misc_feature (1)..(464): Xaa is any amino acid
MAEVQNGEPLWAGRLAEVPQAEAFAFQASINVDSRLVFDDIAGSKAHAAMLGKQGIITKDSAGKIVKELNAIASEIKAGKLTIDTTHEDIHSFLEAVLTERLGDTGKMVHAGRSRNDQVAVAFRLYLKRTVPQLQNELAALVNVLLDTALSHVNSIMPGYTHLQRAQPVTLGHHLTAWCAALERDYSRFSDALKRFDECPLGSGALAATTLPLDRKTVAQDLGFSRLCVNSMDAVADRDFVLELSSACAVTMVHLSRFCEDVVLWASEEFKFIDLAESWSTGSSIMPQKKNPDFAELIRGKTGRTTGNLVALFTLLKGLPYAYNKDLQEDKENLFDSIDTLNACLRMFTGMIKSAQFNIKRMKTACTGGFLEATDTAEYLVRKGLPFRAAHETAASLVRDCIEAGHKHIGALTLEQLKKRSKLFEDDIYKLITPSACVKARDIAGGPAPKEVRRQIKLLRKKIN

SEQ ID NO: 71705 - DNA, 891 bp, Unknown
  Obtained from environmental sample
  misc_feature (1)..(891): n is a, c, g, or t
atgagcgaaaaagaaaaatttataacgcttatagaaaaacttatcgcgcttgcggcggtcagattaagcgacgatgttatggctcggctggaagaaatgcgcaaagccgaagactcagcattacaaaaatcaatctacgacagttattttgaaaatttggcgttagctgaaaaacttaaccgcccatgttgtcaggatacgggtatgcttcaattttttgtaaaagcgggaaccgcattccctcatttggatattacggcggaagcgataaccgaagcggtgcgcagagcgaccgtaagcgtccccttaagaccgaacgctgtaaactattttgatgaaatcaatacaggcaacaacacgggagagcgaactccgtggatagattgggaaattattcccgactccaaagagatggaaataactctgtacttttcgggcgcaggctgcagtcttccggcgcaagcgaaagtttttaagccgtcggacggactggaggcgattattccctttgtgtacgacattgtcagcggattgggaattaacgcctgccctcccctgcttgtgggagtcggtcttgggcataacatcgaaaacgcatcgacgctttccaagaaggcgattttaagaccgttgggaacaaaacacccgcatccaaaaggagcggaacttgaaaaacagctaacggaaggtcttaacagtcttggcatgggcgctcaaggattaagagggaatcaggctgtaatgggagtgcatattgaatcatcggctagacacacggcgacaagggcgtgcgctgtaaatgtttcgtgttacacgctaaggcgcggaaagctccgcattaaagaaaatctttcctgcgaactgacaggttttaagggagcgaaaatttga

SEQ ID NO: 71706 - protein, 296 aa, Unknown
  Obtained from environmental sample
  DOMAIN (7)...(280): Fumarate hydratase (Fumerase)
  misc_feature (1)..(296): Xaa is any amino acid
MSEKEKFITLIEKLIALAAVRLSDDVMARLEEMRKAEDSALQKSIYDSYFENLALAEKLNRPCCQDTGMLQFFVKAGTAFPHLDITAEAITEAVRRATVSVPLRPNAVNYFDEINTGNNTGERTPWIDWEIIPDSKEMEITLYFSGAGCSLPAQAKVFKPSDGLEAIIPFVYDIVSGLGINACPPLLVGVGLGHNIENASTLSKKAILRPLGTKHPHPKGAELEKQLTEGLNSLGMGAQGLRGNQAVMGVHIESSARHTATRACAVNVSCYTLRRGKLRIKENLSCELTGFKGAKI

SEQ ID NO: 71707 - DNA, 564 bp, Unknown
  Obtained from environmental sample
  misc_feature (1)..(564): n is a, c, g, or t
ttgaacacgattaatttgcctttgactgccgatgacattctcaagtttcatatcggcgatgtaatttatctttcggggacaatcgtaacgggaagggacgaggtttatcacagggtggtggaagaaaatattatgccgcctgttgccttaaacggtatggcgatttatcacgccggtccaattgtaaaaaaaacggggcaaaatcacgagcttatttcgataggaccgactacatctatgcgtatggaaaaatgggcggcggattttattaaaaaaacaggcgtaaaagtgatgatcggcaagggcggtatgggagagaaaacggcgtccgcttgccgtgagttaggcgcaattcactgtgtttatcctggcggctgcgctgtgttaggcgctagtcaaatagagagtatcgaaaattgccactgggaagaatttggtatggctgaatgtctttgggtgatgaagactgcaacgtttggtccgctgattgtcagcattgatgcgcatggggggaatctttttgcggagaatgctttggtttatgcggagaggaaggggagataa

SEQ ID NO: 71708 - protein, 187 aa, Unknown
  Obtained from environmental sample
  DOMAIN (1)...(180): Fumarase C-terminus
  misc_feature (1)..(187): Xaa is any amino acid
MNTINLPLTADDILKFHIGDVIYLSGTIVTGRDEVYHRVVEENIMPPVALNGMAIYHAGPIVKKTGQNHELISIGPTTSMRMEKWAADFIKKTGVKVMIGKGGMGEKTASACRELGAIHCVYPGGCAVLGASQIESIENCHWEEFGMAECLWVMKTATFGPLIVSIDAHGGNLFAENALVYAERKGR

SEQ ID NO: 71709 - DNA, 1110 bp, Unknown
  Obtained from environmental sample
  misc_feature (1)..(1110): n is a, c, g, or t
atggaggatttaattatgccagaggcaataataaatgcaaaaatggttagaaaaaacataaacctaagaaaagcacaagaacaagagaaaaaagtaaacggtaaggggttttggaggccattaaaaaactatttaggtaaggttgtttctttatcttcttatgatttgaacggaaaagaatcaggaattcaaaactttacaactgatattacaaaagaaaatttactggaatcacttgagagtacaaatattacaggaatgagcggtaatggatttcctttatacaaaaaaatggctagttttctttcttctaaatcaggcgaaaagatattattaataaatgctgttgaatgtgatcctgcattgttacatgatgagtggttattaaaaaatcggtataatgaaatatcacagacaattaattatttgacaaagataattagcttggataaagtagttttagcgacaaaaaataaatttatcaaatcaaatgacaaatttttaataaaagttgttccgccaagatacccaatgggagaagaacatttccttatacggcagacactgggtattccattggaaaataatgaaattccagcggagcatggaattttagtgttaaatattcaaagtatttatcaaataggtaaaattgtgaataaatgttatgataacggacgttttataactattgctgatttgacaaaagcatctgcaagaattgcatatgtatatccaaacgataatatattagaatttttaaagcgcgcttttggtaaaatggatagtaaatatttttatcgtggttatggtgtgatggagtgtgcagaagcggaagaaacagacgttttttctaatcatgaaaattttgccgcttatgcagataaattgggattagataacaaaaataaatgcaaacgatgcggaagttgtacaagaaaatgtcccgtaaaaattaaagtttctaaaattattcaatcaattgataataataaggttatggactacattatttatgatccaaagcggtgtatcaaatgtggaagctgtacatttttttgccctgcatataaaaatgtttccagttatattaggaaattaaataattaa

SEQ ID NO: 71710 - protein, 369 aa, Unknown
  Obtained from environmental sample
  DOMAIN (57)...(250): Respiratory-chain NADH dehydrogenase 51 Kd subunit
  misc_feature (1)..(369): Xaa is any amino acid
MEDLIMPEAIINAKMVRKNINLRKAQEQEKKVNGKGFWRPLKNYLGKVVSLSSYDLNGKESGIQNFTTDITKENLLESLESTNITGMSGNGFPLYKKMASFLSSKSGEKILLINAVECDPALLHDEWLLKNRYNEISQTINYLTKIISLDKVVLATKNKFIKSNDKFLIKVVPPRYPMGEEHFLIRQTLGIPLENNEIPAEHGILVLNIQSIYQIGKIVNKCYDNGRFITIADLTKASARIAYVYPNDNILEFLKRAFGKMDSKYFYRGYGVMECAEAEETDVFSNHENFAAYADKLGLDNKNKCKRCGSCTRKCPVKIKVSKIIQSIDNNKVMDYIIYDPKRCIKCGSCTFFCPAYKNVSSYIRKLNN

SEQ ID NO: 71711 - DNA, 504 bp, Unknown
  Obtained from environmental sample
  misc_feature (1)..(504): n is a, c, g, or t
ttgaatattaaaatagaaattgtacaaaaagatgaaaaagaaatactcaaaaatttattggaaaaatataggtatgaattttcccaatatgatgatacagatgttaatatttttggattatttggatatagttattttgatcattattggacagaagaaaaaagacacccatattttataaaagttgacggtaaattggctggttttatattggtaaacgattatcctgaaataaaaattgaaacagattattcaatggctgaattttttgttttatataaatataggcggtatggagttggaaaatatgcggcaaaatatatttttgataaattgaaagggaaatggcaagtaaaattacatcccaaaaatattatttctgaaaagttttggctaaaaataatagatgaatatacaaaagggaattataaaataataaaaaatgctccggaagcaatatgtgaaggaggtgcattaggacatgtaatattatttgaaatatga

SEQ ID NO: 71712 - protein, 167 aa, Unknown
  Obtained from environmental sample
  misc_feature (1)..(167): Xaa is any amino acid
MNIKIEIVQKDEKEILKNLLEKYRYEFSQYDDTDVNIFGLFGYSYFDHYWTEEKRHPYFIKVDGKLAGFILVNDYPEIKIETDYSMAEFFVLYKYRRYGVGKYAAKYIFDKLKGKWQVKLHPKNIISEKFWLKIIDEYTKGNYKIIKNAPEAICEGGALGHVILFEI

SEQ ID NO: 71713 - DNA, 990 bp, Unknown
  Obtained from environmental sample
  misc_feature (1)..(990): n is a, c, g, or t
atgtccggtaacactgcggttttagatacagcggttgatgttcccgcacaagcgctctctaaccccgctctgttattcttatatcaccggattgaacaaattctcggcataaaaacagaatacgacgctctttttaaattaaatgaatatatagaatttacctgcggcgcttcgtttatcgaaaatcccgccgtctttgagtaccttcttacttcccgcgaacaaatatatattatcgcaaaatatcttaccgttaatgaaacatattttttcagggaagacgcccattttaatcttctttctgagcttttaccggaactggtaaaactcgaccgcccattgcaaatatgttcagccgccgtttcaatcggctgcgaggcttacagtatcgccatgcttcttgattaccataaaaaaaacggtcttgattttgatttttcagttgacgcttttgacatatgcgccgaatcaatagatatagcaaaaaacgcccgttatacctctaacgctcttcgcgctgacggctcttcatgcaggcatattcttgattcctatttgattcaagacggcgatgaatatatagtaccggaaaacattcgtaaaaaggttcgcttttttcctcataatataatgcgcgggcttgacaagcagtatgatattattttttttagaaactcgttaatttatttttcctcaaagtcaagaatttccgttatcaataatatttccgaatcgcttttcattaacggacttttatttatcggcgcttcggaaacggcgtccgtaagacaccctctgcttgcaagtaaaaatttatccggtgttttttattttcaaaaaacgggaaccccgtatatttatgaacgaatagaaaatcatccccctattacagagcatcgtaaatatgctgattacaaacacaaaaaacatgaaaagcctcccgtgaaaataaaaataaatcttttcatccaaaaaatgaaattactgtaa

SEQ ID NO: 71714 - protein, 329 aa, Unknown
  Obtained from environmental sample
  DOMAIN (86)...(279): CheR methyltransferase, SAM binding domain
  misc_feature (1)..(329): Xaa is any amino acid
MSGNTAVLDTAVDVPAQALSNPALLFLYHRIEQILGIKTEYDALFKLNEYIEFTCGASFIENPAVFEYLLTSREQIYIIAKYLTVNETYFFREDAHFNLLSELLPELVKLDRPLQICSAAVSIGCEAYSIAMLLDYHKKNGLDFDFSVDAFDICAESIDIAKNARYTSNALRADGSSCRHILDSYLIQDGDEYIVPENIRKKVRFFPHNIMRGLDKQYDIIFFRNSLIYFSSKSRISVINNISESLFINGLLFIGASETASVRHPLLASKNLSGVFYFQKTGTPYIYERIENHPPITEHRKYADYKHKKHEKPPVKIKINLFIQKMKLL

SEQ ID NO: 71715 - DNA, 387 bp, Unknown
  Obtained from environmental sample
  misc_feature (1)..(387): n is a, c, g, or t
ttgccgaagaaggaatctatccaattgaaggcaatgtttatgtcggacctaccgaaaagcattaaccgtgggagcagagggcatagcttttatttagacgcccctgtctgtaatcaaagaccgtcggctgacatttattttaaaaccgccgcagaacattacggcgattctcttatcagcgtagttcttaccggaatgggaagcgacggagcggaaggaacgagggctgttaaaaaagccggcggtattactatcgctcaggatgaggcgacttccatgatcttcggtatgccgcaagaggcaatcgctacaggctgtgtagacattgtactcccattaaatgaaatcgcgcaaaaattattggaattaacagggggagaaagttaa

SEQ ID NO: 71716 - protein, 128 aa, Unknown
  Obtained from environmental sample
  DOMAIN (10)...(123): CheB methylesterase
  misc_feature (1)..(128): Xaa is any amino acid
MPKKESIQLKAMFMSDLPKSINRGSRGHSFYLDAPVCNQRPSADIYFKTAAEHYGDSLISVVLTGMGSDGAEGTRAVKKAGGITIAQDEATSMIFGMPQEAIATGCVDIVLPLNEIAQKLLELTGGES

SEQ ID NO: 71717 - DNA, 684 bp, Unknown
  Obtained from environmental sample
  misc_feature (1)..(684): n is a, c, g, or t
atgattaaaacgctgattgttgacgacagtccgctggttcgttcaattttaagggattttcttgaaagcgaaggctcatttgaaattatagatgaagccgaaaacggacaggacggcgtaaataaagccaaagaatgtaatcccgatcttatcactatggattatgaaatgcccgtaatgaacgggcttgacgctattgtagaaattagaaaattcagttcatgcggcatagtggtaataagcacccacgataccgcaaagatggcttatgaagccaccgttaagggagcgcatgaattcttcgccaaggataatttcacttctaaaatgagcgacatgcaaagaagcgaaatatataacactttaaagcatataacaaatattagaaataaagagcatgtacaaagcgaaattacggaacagattagcactgttcaaagaaaaataaactgcatcgttatagcgtcctctacgggcggtcctatggctttatgccaattactctccgcccttccggccgattttccggttccgatattgcttgtacagcacaacacgtcagggtttgacaaaggctttgtacaatggctggacggttattcacagctcgacgtaaaacttgccgaagaaggaatctatccaattgaaggcaatgtttatgtcggacctaccgaaaagcattaa

SEQ ID NO: 71718 - protein, 227 aa, Unknown
  Obtained from environmental sample
  DOMAIN (151)...(226): CheB methylesterase
  misc_feature (1)..(227): Xaa is any amino acid
MIKTLIVDDSPLVRSILRDFLESEGSFEIIDEAENGQDGVNKAKECNPDLITMDYEMPVMNGLDAIVEIRKFSSCGIVVISTHDTAKMAYEATVKGAHEFFAKDNFTSKMSDMQRSEIYNTLKHITNIRNKEHVQSEITEQISTVQRKINCIVIASSTGGPMALCQLLSALPADFPVPILLVQHNTSGFDKGFVQWLDGYSQLDVKLAEEGIYPIEGNVYVGPTEKH

SEQ ID NO: 71719 - DNA, 1989 bp, Unknown
  Obtained from environmental sample
  misc_feature (1)..(1989): n is a, c, g, or t
ttgcttgccctgattatccgcgcttttaacgaggacgcgcttgttatggcggaagcgggaaccggcgtaggcaagtcattcgcctaccttcttcccgccatgcgttttgcgcttgaaaataaggaaaaagttgtcatctccaccgctactatcacactccaacagcaattatttgaaaaggatatcccccttgtcgcttcaagtatgggagatgtaaaaataaaatccgttattatgaaaggaaggggcaattatctatgcctgcgaaggcttaacgacacgttgcgcgaaggtttgctttttgagttcgataaaaaagaaattgacagtattgttgaatggtcgcataacacaaaaacaggggcgaaatcggaactttcatttatgccttccgagacattatgggcgggcgtatgctctgaatccgatctatgtttggggaatcactgcccctggagagaacagtgctttatatttgccttgcgcaaagaggcaaataacgcgcacattatcgttgtaaatcatcatctgctctttgccgacttggcggcgaggtatcagggcgcgggttatgaaaacgcagtggttctgccgcccttcaaccgccttgtcatagacgaagcgcacacgattgaaaacgcggctacttcattcttttcgcaggagttttcaagaacgggaatttttcgtcagcttacaagactctacaatacacgcaaggcaaacatacacggcttgctggtaagactctgcgctatgctgccttcaagcgaagaccggttagacgatatggctgacgctatccaaaaaatacgcgtatcggttgaaagcttggataattgcgctttggaactatgcggcatagagggaattttcaggctctccccttccgttgatgaatcatttttaaaaaaatctttgttccctaattttaaagatttacgaaaagatatactcggttttacaaatttgatccgcgatattctggaaaaccttgacgatgaacaaacggctgaccctgttgtctgggaaattaaaactattgtaagacggctggacggcgttgctgaaatctgcgatgttttttgcaaatacaaaaaacacgaggacaatgttttatggatagaaaaattaaaccttaaaaatacaccctgggctgtctttacaaaaacacctctggagttagcgcccattctgaaagacagcgtattctcgccaaacaaaaccgtagtttgcgtatccgcgactctggcgattaacgatgattttactttctgggcaagccgctgcggcattgacagtatcaatacccgccagccgttatcgggctgtttcccctctccattcccctactcaagcgcggttctccttgcctctcccacagacgcccccctccccgacgaagaaggatatcaggaatttgttaacaaggctgtggcaaaacttgccgccgtcgcgggaggttccgcccttgtgctgttcacttcctaccagtccttaacaggcagttacaacgcagccacagcggaacttacccccatgggaatacgttgtcttaagcagggggacgacgaccgtacccgcctgttacaagcttttttatccgatgaaagttcctgcctgtttgccacagactcgttttgggaaggggtagacgcgcccggcgacaccctgcggctggtcattatctgccgcctgcccttccgcaccccaggtgaccccgtccacgaggcgcgcagggaggctgtggaaaaacgcggcggaaacccttttatggaactttccctgcctcaggctgttatgaagtttaaacagggctttggcaggctcatgcgccggagcgccgacaaaggcgtcgtcgcggttcttgacgggcgtatcctgaaaaaagcctatggtaatttattccgacagtccttacccgatacaaaaacaacttttagcgatcttaattttattttacaagacatagaaaactttttttattaa

SEQ ID NO: 71720 - protein, 662 aa, Unknown
  Obtained from environmental sample
  misc_feature (1)..(662): Xaa is any amino acid
MLALIIRAFNEDALVMAEAGTGVGKSFAYLLPAMRFALENKEKVVISTATITLQQQLFEKDIPLVASSMGDVKIKSVIMKGRGNYLCLRRLNDTLREGLLFEFDKKEIDSIVEWSHNTKTGAKSELSFMPSETLWAGVCSESDLCLGNHCPWREQCFIFALRKEANNAHIIVVNHHLLFADLAARYQGAGYENAVVLPPFNRLVIDEAHTIENAATSFFSQEFSRTGIFRQLTRLYNTRKANIHGLLVRLCAMLPSSEDRLDDMADAIQKIRVSVESLDNCALELCGIEGIFRLSPSVDESFLKKSLFPNFKDLRKDILGFTNLIRDILENLDDEQTADPVVWEIKTIVRRLDGVAEICDVFCKYKKHEDNVLWIEKLNLKNTPWAVFTKTPLELAPILKDSVFSPNKTVVCVSATLAINDDFTFWASRCGIDSINTRQPLSGCFPSPFPYSSAVLLASPTDAPLPDEEGYQEFVNKAVAKLAAVAGGSALVLFTSYQSLTGSYNAATAELTPMGIRCLKQGDDDRTRLLQAFLSDESSCLFATDSFWEGVDAPGDTLRLVIICRLPFRTPGDPVHEARREAVEKRGGNPFMELSLPQAVMKFKQGFGRLMRRSADKGVVAVLDGRILKKAYGNLFRQSLPDTKTTFSDLNFILQDIENFFY

SEQ ID NO: 71721 - DNA, 1239 bp, Unknown
  Obtained from environmental sample
  misc_feature (1)..(1239): n is a, c, g, or t
atgaaagaaaaaatattttcgtatatcaataattccgctgatttggcggttgagcttgagacggagcttacaaaacgtcccgccatcgcgcctgaatcgggcggtgacggcgaattggaaaaatgtcttttcctagaaaactggcttcgcgctcacggcataacgcagcttaaacgttttgacgcgcccgatgacagggtaaaaagcaaaattcgcccaaacttaatcgcgacaattgacggcggcgataaagacaaaggaagactttggattttaagccaccttgacgttgttccgcccggagaggataaattgtggaacagcgatccgtggactgttattcgcaaagatgactctccgggaccaagagttatcgggcggggggtggaagataatcaacaggggcttgtgtcctccgttcttaccgcgctggctttcgcaagtcaggggttaaagccttcccgaacaataaaacttttgtttgcggctgacgaagaagtgggttccgctttcggcattgaatggcttgtaaacaatcaccgcgatttattcaacaagaacgacatggtgcttgttcccgacggcggagatacaaagggcgaatgtatcgaagtagccgaaaaaaatattttatggatgaagtttgcgactcacggaaaacaggcgcacggttcaatgccggatttgggagcaaacgcttttcttgcgggggcaattcttggtttccgcctgcacaaagaactgtcggctaagtttaacaagagaaatcagatgtttgatcccgactactctacttttcaaccgacaaaaaaagaggcgaacgttcctaatatcaatactattcccggcgaagatgttttttatatggatatgcgcgtccttccctgttattctcaggaagccgtactagccaaaattgataaaataaaatcccgaatagaaaaagaatttcacgttaaagttgaatataatattgagcaatcaacgtgctcaaaagcgactgatgtaaaagcgcccattgttacattactgaataaagcgatacctgaagtttattccgttaagccgcgccctatcggtatcggaggcggcactatggcggcatatcttcgtaacatcggaattgactgcgcggtctggacaaagacgcaggaaacccttcaccagccgaatgaatatgcgctgctggagaatattctgggggacgcaaaggtttttgcgctattggcaatgagttag

SEQ ID NO: 71722 - protein, 412 aa, Unknown
  Obtained from environmental sample
  DOMAIN (205)...(318): Peptidase dimerisation domain
  misc_feature (1)..(412): Xaa is any amino acid
MKEKIFSYINNSADLAVELETELTKRPAIAPESGGDGELEKCLFLENWLRAHGITQLKRFDAPDDRVKSKIRPNLIATIDGGDKDKGRLWILSHLDVVPPGEDKLWNSDPWTVIRKDDSPGPRVIGRGVEDNQQGLVSSVLTALAFASQGLKPSRTIKLLFAADEEVGSAFGIEWLVNNHRDLFNKNDMVLVPDGGDTKGECIEVAEKNILWMKFATHGKQAHGSMPDLGANAFLAGAILGFRLHKELSAKFNKRNQMFDPDYSTFQPTKKEANVPNINTIPGEDVFYMDMRVLPCYSQEAVLAKIDKIKSRIEKEFHVKVEYNIEQSTCSKATDVKAPIVTLLNKAIPEVYSVKPRPIGIGGGTMAAYLRNIGIDCAVWTKTQETLHQPNEYALLENILGDAKVFALLAMS

SEQ ID NO: 71723 - DNA, 969 bp, Unknown
  Obtained from environmental sample
  misc_feature (1)..(969): n is a, c, g, or t
atgaatatattaatcattggcggcgcgggatacataggcagtcatgtaacaagggaattccttgacaagaactgtaactgcgttgtttacgacaatctttcaagcggacttagagagaatctttttcctgaggcaaaatttatacacggcgatattcacgattaccaatcgctccttgccgccatgaaaagcgcaaaatttgacgctctcatacatctggcggcgtccaaagccgcaggcgaatcaatgctgaacccggaaaaatattcccataacaacatagcgggtacgcttaatattttaaacgccgcctgcgaggcgggtattaaaaatatcgttttttcatcaagcgccgccgtttacggtgagcctcaatatcttcccattgacgaaaaacatcctacaaacccggaaaattattacggctttacaaaattggaaatcgagcgttttttaagctggtacgataaactaaaaaacatccgttacgcaagtcttcgctacttcaacgccgcaggctacgacgtaaaggggcgcataaaagggcttgaacaaaatccggcgaatctgctccctgtcatcatggaaaccgcctgcggtatgagaaaagaaatgcaggtcttcggtaacgattacgatactcccgacggcacttgtatccgagattatatccatgtaagcgatctcgcatcaggtcattttatggctcttgagtacattataataaacaataaaagcgttaccgttaaccttggaagcgaaaaaggtttttccgtaaccgaagtacttgaaacggcgcgcaaggtaacgggaaaatcaatacccgcaaaaatcacagaccgccgaccgggagaccccgcaaaacttacggcatccgcgtctcttgcgcgggaattattcggctggcagtcgcgttattctgatatagaaacattaataaaaacaagctggggcgcgtattcaaaatga

SEQ ID NO: 71724 - protein, 322 aa, Unknown
  Obtained from environmental sample
  DOMAIN (5)...(195): Male sterility protein
  misc_feature (1)..(322): Xaa is any amino acid
MNILIIGGAGYIGSHVTREFLDKNCNCVVYDNLSSGLRENLFPEAKFIHGDIHDYQSLLAAMKSAKFDALIHLAASKAAGESMLNPEKYSHNNIAGTLNILNAACEAGIKNIVFSSSAAVYGEPQYLPIDEKHPTNPENYYGFTKLEIERFLSWYDKLKNIRYASLRYFNAAGYDVKGRIKGLEQNPANLLPVIMETACGMRKEMQVFGNDYDTPDGTCIRDYIHVSDLASGHFMALEYIIINNKSVTVNLGSEKGFSVTEVLETARKVTGKSIPAKITDRRPGDPAKLTASASLARELFGWQSRYSDIETLIKTSWGAYSK

SEQ ID NO: 71725 - DNA, 819 bp, Unknown
  Obtained from environmental sample
  misc_feature (1)..(819): n is a, c, g, or t
gtgaatattgaagcgggttaccgtaaattaacgtggggaaaagttgacagcaacggtccgttagatgtaattaaccctattgactatacagaccttatagatattacggatataagagaaagaaaaatagcccgtccaatggttcacattacatggaacgcgggcagtttttcaaaattggaaggagtatttattcccaactttacgccgcatcgctttgccgccgaaggacgatgggcgccctcacaatacggaaaaacaaaagaaatgaccaaagatgagatatataacagaatagtagaaatcgttccgggcggacaaagtacaatagatactatgtatccttcaggattacccgaatattcttttgattttccgtttccggatacatcagacaaaaattattttcaaacaggtcttaggtttacaactactgtaaaatcggtagattttggtcttcaatatttttacggtaatttattcagaccaacctattgtcttacagaggagggaataaacaagtttattgaagatcttattattaataatttaagcaatccgggcagttataccggcgatatttctttattagacccacagataaaatatacccgttatcatcaaattggatttgattacgcgcaggttcttttggattttaatctgcgcgcggaagccgctattaatataacagaagatatacacggcgatgacggctctcttcaaaatccgtttgccgcgtgggcgtttggttttgacagaaatcttttttggggtattattttaatatgncatgcgatgaaactatacgtttattaa

SEQ ID NO: 71726 - protein, 272 aa, Unknown
  Obtained from environmental sample
  misc_feature (1)..(272): Xaa is any amino acid
MNIEAGYRKLTWGKVDSNGPLDVINPIDYTDLIDITDIRERKIARPMVHITWNAGSFSKLEGVFIPNFTPHRFAAEGRWAPSQYGKTKEMTKDEIYNRIVEIVPGGQSTIDTMYPSGLPEYSFDFPFPDTSDKNYFQTGLRFTTTVKSVDFGLQYFYGNLFRPTYCLTEEGINKFIEDLIINNLSNPGSYTGDISLLDPQIKYTRYHQIGFDYAQVLLDFNLRAEAAINITEDIHGDDGSLQNPFAAWAFGFDRNLFWGIILIXHAMKLYVY

SEQ ID NO: 71727 - DNA, 3609 bp, Unknown
  Obtained from environmental sample
  misc_feature (1)..(3609): n is a, c, g, or t
atggccgagatccccaaaaaagacgtatccgaccgccgcgccgccattattgacgctttaatcaaatcaatagaaatattttcggctaataaagaagaaacatttgacgaagtaataaccaacggaatacgaccctttgcggacgctgttggtttggatcgcgtagttttttacaagatggtggataccgaagaaggcaaacgtccggggcaaatctatcgctgggacaagtcggaaggcggtttgatgtcccttgatgaagaactgaaaattttacccaagcatcctgttttggatgaatggttctcaacattatcaaagggcggtcacatacgttttagaaaaagcgattataccaaagatgtggcggctttgatgaaagtctatggcataatgtcaatattgatagtgcctattttcacgcgcggtgaattctggggagttatcaattttcaggagcataccgacgacagatattttgacgaagactgctccgatttgctgcataccgcggcgcgcgtattttcaaacgcggttataagaaaagaatttaactatagcgcggaggaagcactcaaggcgctcaaacgccgcgaaaaaatggaagccgcgctgaataaagccgctatcatgtttctctcgcaaactgaaaaaacatttgaagccaccatgacggcgggcgttaaggaaatagccaattcattaaatttggacaggtttgccatttatcgcaacttccccatgcccgacgcattgcatgtttcccagatataccgatgggacagagactcaggcgggactactctgccgacaaaaggacttgaggacgccacttatgccaaatttgcgccgcgatgggaaaaacttcttgcatcaggcgaagtaattaacagtccggtaagactcctgccggaagaggcaatgctgaaatcatttggctgcgtaacggcgtttgtcatgcctatttttatcagcaataatttttggggttttgcccttcttgaagatcgtcataccgagcgtttttttgaacctgacagcgttgaaataatacgctccgcgacgtttctatgcgcgaataccgttatacgcgccgatatggaacgtgaaatagccgacgctaacgaatttaacaactccatccttaaatcttcgcccgtaggctttaccgtttttgacgaaaacttccgcgttattgactgcagcgatataactttaaaaacattgggaacaacaaaagaatattatcttgaacactttcacgaattttcacctgaataccagagcgacggcgtaaaatccgcggataaagcggctgaaataatgagccgggcgttcaaaggcgagaaactgatgttagagtgggataattgtacggctgcgggagagattattccttatgatgttacgctggtacgcgcgacatacaaaggaagaaatgtggtgctgggttatcaatatgatttgcgtaatcttaaaaaaatgacggaaagcatacgagagcagggtgaacagcttaaaatgagattggaacagcaagaactgatttccgaactatcaagaggatttatttcgtccggcgactctaaaacattggtaaaggaagctgttgccaaattgggacactaccataaagtgtcattagtgtttgttttttctattgattatgaacataaaggcactcatctggcgtatcattggacagccgatgaattgccgccaagaatggcaatagccaatctgtatgattatttaataaaaatttttcctgtaacgctgcccgactgcgccacgataccaatagtctcttccgataatacctttaataaccccgaacaggtttaccagacgttatattctattaatgtcatggcggttatcggtgcgccgctttatgttgaaggacgcttatggggcgtgttatgcgtagaacagagtaataagccgcgcaagtggacggaaaatgaaaagggatttgtcgccatgacggcaagcacaatcgccggcgtaatcatgcgcgacatatataccataaaactaaaagaggcgctgaataaggcgatggaggcaagtaaggcaaagagcgagttcctttccaacatgagccatgaaatgcgcacgcctctgaacgcgataaccggcatgacgacaatcggcaaaaacgcgaaggatgtggaacgcaaagactacgctctggacaagattcaggacgcgtcaacgcatctgctcggcgttattaacgatgtgcttgatatgtcaaaaatcgaagctaatatgctggaattgtctcctgttgaatttaattttgaaaagatgctgcaaaaagtagtcgcggttgtaaacttccgcgtggacgaaaaacagcaaaatctttcggtgcatattgacagtacaattcctaaaaccttaatagccgatgatcagcggctagcccaagttgttaccaatcttttgagtaacgctgtaaaattcactccggaaaaaggttcgattatgcttgaagcgcgttgtatggaagagaaaaacaattactatacaatacaaatttccgtaattgataccggaatcggaataagcgaagaacagcaaaaacgattgtttaattcttttcagcaggcggagtccagcacaacgcgcaaatacggcggtacggggctggggcttgctatttcaaaaagtattgtggaaatgatgggcggaaaaatttgggtcaaatcagaactcgataaaggcgcaaacttcgctttttccattaaggtgaaacgcggtgaaacaaaagaaaagaacggtcttttgtcccctgacgtgaattggagcaatatccgtattatggtagtagatgacgatgccgatatattgtcgtatttcaaagatataacgcatggattcggcttatcctgtgataccgcagcaagcggaaaagaggcgcttcgtcttgtagataataacggttcctatcatatttattttgtggatttgaagatgccgggaatggacggcatacaactgacgcgggaactcaaggcgcgagcgtcggaaaactccgtagtaataatgatttccgccgccgaatggagcgcaattgccgatgaagctaaacaggctaaagttgacaaatttatgtccaaacctttgttttcgtctatcattcttgacgttgtcaaagaatgtatcggtatagaagaagagaagaaaaaagaaacgcaaaacgatatgaacggtatttttgccggacgtcgtattttattggtagaagatatggaaattaaccgcgaagttgtgcttgccctgcttgaacctacaaagttggaaatagaatgtgcggaaaacggcaaagaagccgtgcatatgttcagcgaagccccaagcaaatacggtttgattttcatggatatacagatgcccgaaatggacggctacgaggcgacgcggcgtatcaggtcgcttaaaacgccggaagcggtgcatattcctattatcgcaatgacggcaaatgtttttagggaagacattgaaaaatgtcttagcgccggcatggacggtcatatcggtaaaccgattgatttagaagaagtaatggagaaacttcgcgcttatttattaaaatag

SEQ ID NO: 71728 - protein, 1202 aa, Unknown
  Obtained from environmental sample
  DOMAIN (693)...(758): His Kinase A (phosphoacceptor) domain
  misc_feature (1)..(1202): Xaa is any amino acid
MAEIPKKDVSDRRAAIIDALIKSIEIFSANKEETFDEVITNGIRPFADAVGLDRVVFYKMVDTEEGKRPGQIYRWDKSEGGLMSLDEELKILPKHPVLDEWFSTLSKGGHIRFRKSDYTKDVAALMKVYGIMSILIVPIFTRGEFWGVINFQEHTDDRYFDEDCSDLLHTAARVFSNAVIRKEFNYSAEEALKALKRREKMEAALNKAAIMFLSQTEKTFEATMTAGVKEIANSLNLDRFAIYRNFPMPDALHVSQIYRWDRDSGGTTLPTKGLEDATYAKFAPRWEKLLASGEVINSPVRLLPEEAMLKSFGCVTAFVMPIFISNNFWGFALLEDRHTERFFEPDSVEIIRSATFLCANTVIRADMEREIADANEFNNSILKSSPVGFTVFDENFRVIDCSDITLKTLGTTKEYYLEHFHEFSPEYQSDGVKSADKAAEIMSRAFKGEKLMLEWDNCTAAGEIIPYDVTLVRATYKGRNVVLGYQYDLRNLKKMTESIREQGEQLKMRLEQQELISELSRGFISSGDSKTLVKEAVAKLGHYHKVSLVFVFSIDYEHKGTHLAYHWTADELPPRMAIANLYDYLIKIFPVTLPDCATIPIVSSDNTFNNPEQVYQTLYSINVMAVIGAPLYVEGRLWGVLCVEQSNKPRKWTENEKGFVAMTASTIAGVIMRDIYTIKLKEALNKAMEASKAKSEFLSNMSHEMRTPLNAITGMTTIGKNAKDVERKDYALDKIQDASTHLLGVINDVLDMSKIEANMLELSPVEFNFEKMLQKVVAVVNFRVDEKQQNLSVHIDSTIPKTLIADDQRLAQVVTNLLSNAVKFTPEKGSIMLEARCMEEKNNYYTIQISVIDTGIGISEEQQKRLFNSFQQAESSTTRKYGGTGLGLAISKSIVEMMGGKIWVKSELDKGANFAFSIKVKRGETKEKNGLLSPDVNWSNIRIMVVDDDADILSYFKDITHGFGLSCDTAASGKEALRLVDNNGSYHIYFVDLKMPGMDGIQLTRELKARASENSVVIMISAAEWSAIADEAKQAKVDKFMSKPLFSSIILDVVKECIGIEEEKKKETQNDMNGIFAGRRILLVEDMEINREVVLALLEPTKLEIECAENGKEAVHMFSEAPSKYGLIFMDIQMPEMDGYEATRRIRSLKTPEAVHIPIIAMTANVFREDIEKCLSAGMDGHIGKPIDLEEVMEKLRAYLLK

SEQ ID NO: 71729 - DNA, 2007 bp, Unknown
  Obtained from environmental sample
  misc_feature (1)..(2007): n is a, c, g, or t
atgttaattttctctatgggtttattgtttgcaatattcgccgccgcattattattcatgtacaaaaaaaacgccaaacttgcaaaaactctggaagatgaaagaatcctgaacagaaaaaaaatctattggctggaatccatacttgacgctgtaaattcccccattaccgtaacaaacaaggacatggagtggacttttgtaaacaaagcggttgaacagtttctaggcgtgaaacgggaaaacattatgggcttaaaatgcagttcgtggaaagccaatatttgtaatacgccgaactgcggtataacaagattaaaaaacggttataaagaaacatactttcagcaattcggcggcgaataccatgtgctggtttcttatttgtataatgaaaacggcgaagtagacggtcatgtcgaagttgtttatgaagatactgccgtaatagccagagaaaaaaagaaattcgaggaattggctcactggtatgaatctattcttgacgccatacctttctttatttccgttaccgacacggatatgaaatggacatttgttaacgcggcgcttgagaaagatttaaaattaaagcgaaaggatattatcggcaaacattgcagttattggggatttgaccattgcaatacaagcgagtgcagtatagagcgcgcaaagcgcgggttaaaccaaacttattttacaaaaggaaatacgttatatcaggttgatgttcaagaattcatgaacatgagcggcgagataatgggttatatcaagcttttgcaggatattaccaaattggaacaaatgacaaaacagcaggcggaagcggaagcgtccgaccgcgcaaaatcggcttttcttgccaacatgagccacgagatgcgcactcccatgaacgccattatcggcatgaccacgataggaaaagccgccgccgctattgagcgtaaggattattgtcttgccaagattgaggacgcctcccggcatctgttaggtgtaatcaacgatattcttgatatgtcaaaaatagaagcgaacaaatttgaacttgctccggtaaaatttgattttgagaagatgattcagcggtcggtggacgtaatcactttccgcgttgacgaaaaaaagcaaaaacttaccgtgcagattgacagcgctattcctaaaacgctgattgccgatgatcaaaggctggcgcaggttgtcattaatcttcttgggaacgcggttaaatttacgccggaaaacggttccatcagtcttgacgcaagtttgttaaaagaagaagacaacctttgcaccgtaaaaatcagcgtaaccgatacgggtatcggcataagcgaagaacatcagaaaaaactgtttaaaacatttcaacaggcggaagcggatacgtcgcgcagattcggaggatcgggtcttggtcttgttatttcacgcagtattgtggaaatgatgaacggagaaataggggttgcatccgagcttggaaaaggctctgtttttacatttacggtacaggcaaagaaagattccttagcaaacgataattcgtccgctgagaagactcatgataacgctaagcaggatattacaggtctttacgcggggcggcgcatacttctggctgaagatgtggaaataaaccgcgagattgttcaagtcttgcttgaacccactcagttggagatagattttgcggaaaacggcaaagaagccgtgcgtatgtacagcgaatcgcccgaaaaatatggaatgatcttcatggacatacaaatgcccgaaatggacggctacgaagcaaccaagcgtataagggctatagaagcggaacgcaatgtgagtaatagaatccccattattgccatgacggcaaatgtgttcaaggaggacgttcaaaaatgtctggatgcgggtatggacagccatgtcgggaagccgtttaatcttgatgatgttttggaaaagctgtatgtttttttgaaaaagcgagtataa

SEQ ID NO: 71730 - protein, 668 aa, Unknown
  Obtained from environmental sample
  SIGNAL (1)...(25)
  DOMAIN (49)...(151): PAS fold
  misc_feature (1)..(668): Xaa is any amino acid
MLIFSMGLLFAIFAAALLFMYKKNAKLAKTLEDERILNRKKIYWLESILDAVNSPITVTNKDMEWTFVNKAVEQFLGVKRENIMGLKCSSWKANICNTPNCGITRLKNGYKETYFQQFGGEYHVLVSYLYNENGEVDGHVEVVYEDTAVIAREKKKFEELAHWYESILDAIPFFISVTDTDMKWTFVNAALEKDLKLKRKDIIGKHCSYWGFDHCNTSECSIERAKRGLNQTYFTKGNTLYQVDVQEFMNMSGEIMGYIKLLQDITKLEQMTKQQAEAEASDRAKSAFLANMSHEMRTPMNAIIGMTTIGKAAAAIERKDYCLAKIEDASRHLLGVINDILDMSKIEANKFELAPVKFDFEKMIQRSVDVITFRVDEKKQKLTVQIDSAIPKTLIADDQRLAQVVINLLGNAVKFTPENGSISLDASLLKEEDNLCTVKISVTDTGIGISEEHQKKLFKTFQQAEADTSRRFGGSGLGLVISRSIVEMMNGEIGVASELGKGSVFTFTVQAKKDSLANDNSSAEKTHDNAKQDITGLYAGRRILLAEDVEINREIVQVLLEPTQLEIDFAENGKEAVRMYSESPEKYGMIFMDIQMPEMDGYEATKRIRAIEAERNVSNRIPIIAMTANVFKEDVQKCLDAGMDSHVGKPFNLDDVLEKLYVFLKKRV

SEQ ID NO: 71731 - DNA, 441 bp, Unknown
  Obtained from environmental sample
  misc_feature (1)..(441): n is a, c, g, or t
atgcgtgaagcaatcggtgatgagtctgtttttttacggattaatgaattcaagaatggcttaattcagtttacggacagcactaacgctatgcgtcttattaaagagcatgggcgggatattcgctataatgcttcttggaaaaaatggattgtgtggaacggtaagtattgggaaattgacgaaggtaatgctttagtccatgaaaaagggcttgaaatggtgcggaatatttatgacgaacttttgaaaaccgccgattatcgggaaaggatagacattgaaaaagcggctattatgagcgagagcgtgaggcggcgaaaggcttttgttgaagccgctacatgggtttccgctttaagagtaaaaactgaagagctagactgtaatccgtggcttttgaatgttaaaaacggaactattgatatgttaaacnggtga

SEQ ID NO: 71732 - protein, 146 aa, Unknown
  Obtained from environmental sample
  misc_feature (1)..(146): Xaa is any amino acid
MREAIGDESVFLRINEFKNGLIQFTDSTNAMRLIKEHGRDIRYNASWKKWIVWNGKYWEIDEGNALVHEKGLEMVRNIYDELLKTADYRERIDIEKAAIMSESVRRRKAFVEAATWVSALRVKTEELDCNPWLLNVKNGTIDMLNX

SEQ ID NO: 71733 - DNA, 921 bp, Unknown
  Obtained from environmental sample
  misc_feature (1)..(921): n is a, c, g, or t
atgataacgaaaatcgccaatgttgaatttgacccaaaggctgactgccctctgtggaaacagtttgtccgtgaaattatggactataaagcggaaattataagatttgttcaaacggccgccggatggtcattgtcgggcgatacttcggaacaaactatgtttatcctgtacggtactggcgcaaatggcaagtcaacatttctcaatacgataatgtacctgttaggcgaatatgctcttgcaacgccaacggaaacatttatgaaaaaaaacggagataattattccaatgacgtggcgcgtctgcggggtactcggtttgtaacgactacggaagtagagcaaggtcggcggatgtctgaaccgttaataaaaaagattactggaaatgacgagatgacggctcgcttcctgtacggagaattttttaatttcaaaccgacttgtaaaattttcatggctaccaaccataagcctgtaataaaaggcgcggattacggtatatggcggcgaattaagctaatcccttttaatacaaggattacggaagaaaaacaggataaacaccttgaaatgaaattgagggaagaagcaagtggaattcttaactggcttttagaaggtatggtgatttggcaacaggaaagattgaaaacgcccaaagcggttttgttcgctactgacgaataccgaggggaaatggacgttatcgggaatttcattcaagaaaaatgcgtccaagatacaaaaatgaccataacgattaagaggttatacaagacttattctgactggtgcgagggaaaccacgaacaccctgtaagcgagagatttcttactttgcggcttaaagaaatggggtttgtccaggacaggacggcaacggagaggttttggacggggataacaatgaattag

SEQ ID NO: 71734 - protein, 306 aa, Unknown
  Obtained from environmental sample
  DOMAIN (1)...(290): Poxvirus D5 protein-like
  misc_feature (1)..(306): Xaa is any amino acid
MITKIANVEFDPKADCPLWKQFVREIMDYKAEIIRFVQTAAGWSLSGDTSEQTMFILYGTGANGKSTFLNTIMYLLGEYALATPTETFMKKNGDNYSNDVARLRGTRFVTTTEVEQGRRMSEPLIKKITGNDEMTARFLYGEFFNFKPTCKIFMATNHKPVIKGADYGIWRRIKLIPFNTRITEEKQDKHLEMKLREEASGILNWLLEGMVIWQQERLKTPKAVLFATDEYRGEMDVIGNFIQEKCVQDTKMTITIKRLYKTYSDWCEGNHEHPVSERFLTLRLKEMGFVQDRTATERFWTGITMN

SEQ ID NO: 71735 - DNA, 891 bp, Unknown
  Obtained from environmental sample
  misc_feature (1)..(891): n is a, c, g, or t
ttgttattttccgccggttgtctgttttccttgggaaacagggacgcggggcgggcggtaactcctgaagaacttgatcctactttgataacagacgctgaacttgtaatgaaagctttgtacgaggcttttagtgataaaatagataaagtggaatatcgaaaaaacgattgggcttttatgatgaacggcgtttggtattattacgctaaaggaagattgttacctaaaagagaattatggaaagcggcaaaatttaggccgtatcagttttacaaatacccggcggagttgccgccgcagactgaggcttctcccgaagaaatagaactgtatcttggctggacaaaccaggcaagcgcgcaaacactcagccgttccgtttcttttccgggcgcgttttggaaagcgtctacgcgtaaaaaaacggagaaacaaattgtagatataacttttcttgggaaagacacaagcgttcatacaggaattcaacccaaacttgcgattatcgaagaaaaaattaaagaagccgcaaaaacggataaaacgattcaaacatggatagataatctgggttccgcgggatgttattattggcgggttatcgcaaaaaccaaatcgcgttcttatcactcttatggtttagccattgatttgcttcctgaaaagctgggcggcaaacaaacatattggctgtgggcttcccaggagagagacgactggtggaatattccctacagcgagcggtaccatccgcccgagaaagtaataaaaatatttgagtcacatggctttgtctggggcggcaagtgggtccagtttgataccatgcatttcgaataccgccccgaagtgtttattctgaatggactgccgttagcggaagaatag

SEQ ID NO: 71736 - protein, 296 aa, Unknown
  Obtained from environmental sample
  misc_feature (1)..(296): Xaa is any amino acid
MLFSAGCLFSLGNRDAGRAVTPEELDPTLITDAELVMKALYEAFSDKIDKVEYRKNDWAFMMNGVWYYYAKGRLLPKRELWKAAKFRPYQFYKYPAELPPQTEASPEEIELYLGWTNQASAQTLSRSVSFPGAFWKASTRKKTEKQIVDITFLGKDTSVHTGIQPKLAIIEEKIKEAAKTDKTIQTWIDNLGSAGCYYWRVIAKTKSRSYHSYGLAIDLLPEKLGGKQTYWLWASQERDDWWNIPYSERYHPPEKVIKIFESHGFVWGGKWVQFDTMHFEYRPEVFILNGLPLAEE

SEQ ID NO: 71737 - DNA, 303 bp, Unknown
  Obtained from environmental sample
  misc_feature (1)..(303): n is a, c, g, or t
atgagaaaaagaagagagtacacaaaggagttcaaggaatcagcaatagaactctatcaacgaagcggcgacaagaccttaaaggaagtcgcagagggattaggaatcagttccgagaacctaaggcgctggctgaaagaaagcaagaaagctgaaaacacaaacatccgtgtgtttccaggacgcgggaatgcgcgggatgaagaagtggcgcggctgaagaaagagaacgaggatcttagggagtcgaatgaaatcctaaaaaaagcaatggccttctttgtggtaaaaaccccaagatag

SEQ ID NO: 71738 - protein, 100 aa, Unknown
  Obtained from environmental sample
  DOMAIN (4)...(87): Transposase
  misc_feature (1)..(100): Xaa is any amino acid
MRKRREYTKEFKESAIELYQRSGDKTLKEVAEGLGISSENLRRWLKESKKAENTNIRVFPGRGNARDEEVARLKKENEDLRESNEILKKAMAFFVVKTPR

SEQ ID NO: 71739 - DNA, 852 bp, Unknown
  Obtained from environmental sample
  misc_feature (1)..(852): n is a, c, g, or t
atgaaagagtacaaaggacagtacgccgtagcaaagatggccaaggttttgggggtaagccggagcggatattacgcgtgggaaaagcggaaagcgtgtcggcatgaagaagaagaccgagacttgattttaataataaaacggatattcaaagaacaccacgggcggtatgggagtccaagggtctgggaagaattaaagaggatgggctttcgagttgggcggaaacgggtggaaaggctgatgcgggagcataaattaatagctcggccacggaggaaatgggtgaatacgacggattccaaacataagctggcaacagcggacaatatcctgaaccgtgagtttaaggcgtcgtatcccggagagaagtgggtgtcggatattacctatctgcgtacagataagggctggctgtacttaaccgcgatacttgatttgtgggacaggaaagtaattggctggtcaatgtcaagagaattgacggctgaacaaacgtgccttgctttagagatggctgtgatgaaccgccctccgcgggaagggttaatatttcattccgaccgcgggattcaatactgcagcgacgagtttcgttctgctttgaaacggctgtgtccttcagtccgccagagcatgagccggaaagggaattgctgggacaatgcctgcgctgaaagtttcttcaaaacaataaaaacggaacttgatatctcgaaaaaaggaggtaacgaaagagaagtaaaaacagaggtttttgagtacattgaagcttattacaacagaagccgtagacattcggctatcggatatgctataccaatagcattaacacctaacacagcggcttaa

SEQ ID NO: 71740 - protein, 283 aa, Unknown
  Obtained from environmental sample
  DOMAIN (117)...(279): Integrase core domain
  misc_feature (1)..(283): Xaa is any amino acid
MKEYKGQYAVAKMAKVLGVSRSGYYAWEKRKACRHEEEDRDLILIIKRIFKEHHGRYGSPRVWEELKRMGFRVGRKRVERLMREHKLIARPRRKWVNTTDSKHKLATADNILNREFKASYPGEKWVSDITYLRTDKGWLYLTAILDLWDRKVIGWSMSRELTAEQTCLALEMAVMNRPPREGLIFHSDRGIQYCSDEFRSALKRLCPSVRQSMSRKGNCWDNACAESFFKTIKTELDISKKGGNEREVKTEVFEYIEAYYNRSRRHSAIGYAIPIALTPNTAA

SEQ ID NO: 71741 - DNA, 1821 bp, Unknown
  Obtained from environmental sample
  misc_feature (1)..(1821): n is a, c, g, or t
ttgcgccttaaatttgattctcttacttcccatgatattacttatgtggggataatccaaacggcgcgggcgagcggaatggacaggtttccaatgccttatgtgctgacaaattgccacaacagcctttgcgcggtcggggggacaatcaatcaggacgatcatgtgttcgctctttcagccgcgaaaaagtacggcggtatttatgtgccgccccaccttgccgtaatccacagttacaaccgcgaaatgatggcgggctgcggcaggatgatactgggttctgacagccacacccgttacggcgcgctggggacaatggcggtcggcgaaggcggcggggagttggcgaagcagttggtgggcaggacttacgacatggctttccctcaggtggtggggatttaccttgaaggcgtactcgcaaatggagtagggccccaggatgttgctctcgcgattattggggaagttttcaataacggttatgtaaaaaacaaggtgatggaatttatcggggacggagtcgataaattgacggttgatttccgaaacggaattgacgtaatgacaaccgagaccgcctgctggtcttcaatatggaaaacagacgctcaggtgaaaaaatatcttgaagaacggggcaggggaggcgattataaagagttaaaaccctccgccgccgcatactacgacggatttataaaggttgatctttctaaaatagagccgtgtatcgcgcttcctttccatccgagtaatgtttacactataaaaaacctgcaaaatgacgcgaaagatatttttgccaaaattgaaaaagaaaacaaagacgcgggtattaacctgaatctgggcgttaaatgccatgacggcggaatatgggcggatcaggcggttatcgccggctgttccggcggcattttttccaacataatggcggcgtccgacatattaaagggacactcgacgggaaacagtaatttttctttaagcgtgtatcctgaaagccagcctacctaccttgaactggtaaaaaacggcgcagtagaaacatttatgaaagcgggcgcccttgtccgcgaagctttctgcggcccgtgtttcggcgcgggagacacgcccgcgaacaacgagctttccatccgccacgttacgcgcaatttccctaaccgcgaaggctccaagccgggagacgggcagattgcctgtgtcgctctcatggacgcgcgttcaatcgccgcgaccgctgctaacggcggaaaaataaccgccgcaaccgaaataaacgtaaaatacggcaaatacaagttcttttttgacaaaaccatttacgaaaagcgggtatacaacggcgcgggaaagccgaatccgcaaattgaattgacattcggtcccaatattaaagactggcccaaaatgcccgccctgcctgagaacctcttaataaaagtgatcagttttattaccgaccccgttactaccacagacgaacttatcccgtccggagaaacttcttcctaccgttcaaacccgcttaagctggctgaattcaccctaagcagaaaagacccgtcctatgtaaaacgggcaaaagaagttcagtctcttgaagaacaaagagccaaaggaacaacgggcggcgaactggataaagcgctgaaaaaaataaacagcattgccggctgttcaggaataatgcccgcgaatataggcattggaagcgctatttttgcccgcaagcccggagacggctccgccagagagcaagccgcctcctgccagcgcgtattaggcggcgcccgcaaacctcgctcttga

SEQ ID NO: 71742 - protein, 606 aa, Unknown
  Obtained from environmental sample
  DOMAIN (1)...(415): Aconitase family (aconitate hydratase)
  misc_feature (1)..(606): Xaa is any amino acid
MRLKFDSLTSHDITYVGIIQTARASGMDRFPMPYVLTNCHNSLCAVGGTINQDDHVFALSAAKKYGGIYVPPHLAVIHSYNREMMAGCGRMILGSDSHTRYGALGTMAVGEGGGELAKQLVGRTYDMAFPQVVGIYLEGVLANGVGPQDVALAIIGEVFNNGYVKNKVMEFIGDGVDKLTVDFRNGIDVMTTETACWSSIWKTDAQVKKYLEERGRGGDYKELKPSAAAYYDGFIKVDLSKIEPCIALPFHPSNVYTIKNLQNDAKDIFAKIEKENKDAGINLNLGVKCHDGGIWADQAVIAGCSGGIFSNIMAASDILKGHSTGNSNFSLSVYPESQPTYLELVKNGAVETFMKAGALVREAFCGPCFGAGDTPANNELSIRHVTRNFPNREGSKPGDGQIACVALMDARSIAATAANGGKITAATEINVKYGKYKFFFDKTIYEKRVYNGAGKPNPQIELTFGPNIKDWPKMPALPENLLIKVISFITDPVTTTDELIPSGETSSYRSNPLKLAEFTLSRKDPSYVKRAKEVQSLEEQRAKGTTGGELDKALKKINSIAGCSGIMPANIGIGSAIFARKPGDGSAREQAASCQRVLGGARKPRS

SEQ ID NO: 71743 - DNA, 1497 bp, Unknown
  Obtained from environmental sample
  misc_feature (1)..(1497): n is a, c, g, or t
ttggcgcaggctctggctttaaacggcaatagctggtctacaataaatctttgggcgtatcagctgagcggcgaacaagcggaacgccgctcccttgccgaacagcttttttcgtaccctgtaaacgccgcacctaacgcgccgcagggagcggggatgattgatattttgcccgcgcttccaattttcgccgctgccgcgaaaggagccggttataccaacgttgaacttgataatgacggcgtaagaagacgcatttatcttacgcagaatatgcacgaccattggtacttacagcttgcctttgccccgttaattgattatctgggcaaaccggaaatatttctggaaaaacgcaaattgacggttaagcaggcgaaatttcccaacggcaaagttgaagatatcgttataccgctggattacaagggcagaatgatgcttgactggcccaagacagattacaacgacagttatacccatgtttctttcgccgaattcagtttgttagacgaaattgaaatggaaatagaaaaatacagccgcgctcttgccgacgccgacataatgctttttattaatcaggataactctttatctttcattcctgtcgctcttggcaatatggcgcagtaccttgatttgtcgcgtgaaacaaaaaatcacgccatggaaaacgcttctcacggctcttttgccgcttttcttgaatatcgaaactccgcttattatttactgcaggaaatattacaagaggataccgcgtctaagatacaaacaatcagcgaacagttaagcgaaaaacatcccgatttatccggcgaaatagaagatgaagccgattacattgtctcgttattggaagcgctggaagtagatttgtctcgtcaccgcgagttaaccaacgctaataaaaaaactttttatgataaatttgtaattataggacgggttgataccggcactaccgactacggcgcgaatcctttttacggcaaatacatcaatgtaggaactcacggcgttgtgctggacacaattctttccaaatctttcattgtctgccttgataatatttggaaaataatttttatgctgatttttgttcctgtcttttttaaatttacggataaatttgcgcctgttttacgcgcggcgttggggttcggcgcggtgttatttatttttatcatttccgtatcgatattcagtttatcgggatttttcacgggaccgcttggagtaataacggcaatggttatcgccattattatccgcgaaattatttcttactcccattcggaaaaagaaaaacaatttataagaacggcgttttccacttatgtttcgggcgacatagtanaagaaataatttccgatccttcgcgcttgcagttgggcggaacaaaacgccgcatgaccgctatttttacggacgtaaaaggttttttcacaatttccgaacaacttgatcctgaggaacttgtcagtctgtaa

SEQ ID NO: 71744 - protein, 498 aa, Unknown
  Obtained from environmental sample
  misc_feature (1)..(498): Xaa is any amino acid
MAQALALNGNSWSTINLWAYQLSGEQAERRSLAEQLFSYPVNAAPNAPQGAGMIDILPALPIFAAAAKGAGYTNVELDNDGVRRRIYLTQNMHDHWYLQLAFAPLIDYLGKPEIFLEKRKLTVKQAKFPNGKVEDIVIPLDYKGRMMLDWPKTDYNDSYTHVSFAEFSLLDEIEMEIEKYSRALADADIMLFINQDNSLSFIPVALGNMAQYLDLSRETKNHAMENASHGSFAAFLEYRNSAYYLLQEILQEDTASKIQTISEQLSEKHPDLSGEIEDEADYIVSLLEALEVDLSRHRELTNANKKTFYDKFVIIGRVDTGTTDYGANPFYGKYINVGTHGVVLDTILSKSFIVCLDNIWKIIFMLIFVPVFFKFTDKFAPVLRAALGFGAVLFIFIISVSIFSLSGFFTGPLGVITAMVIAIIIREIISYSHSEKEKQFIRTAFSTYVSGDIVXEIISDPSRLQLGGTKRRMTAIFTDVKGFFTISEQLDPEELVSL

SEQ ID NO: 71745 - DNA, 675 bp, Unknown
  Obtained from environmental sample
  misc_feature (1)..(675): n is a, c, g, or t
atggtatctctccgaaaaagcacgatagacaaatacgaaagcgacgccattatcgctttcctcggcgcgcctttggatcttccggatcacgctctgcgggcgtgcgtttccgccataaaaataaaaaaaattgaggctgaactgaacaaaacaatcatggagcaaaaattgtcgccgacgccccttttaacgcgcataggcgtaaacacgggcgacatggtagcgggtaacatgggaaccgccaacaagatgaactatacaatcatgggaaatgcggtaaatcttgcggcgcgtcttgaaggcgtaaacaaacaatacggaacatggatacttgcctcggaatatacggcgcgcgaagccggagattctttgctttacagaaaattggacagggtgcgcgttgtcggcataaacgagcctgtgcgtctttgcgaacttatagaccttgcggatcaggcggacgaacagcaaaagaaacttgtacaagtcttccatgaagcgctggactattttgaaaaacgcgattggacgcaggctgaaaaaggttttcaggaaacgctttcgattgtacccggcgacagtccgtcagtcctttatcttgatcgatgcaaaggattccttgataatccgcccgaagataattgggacggcgtttacaaccttacatctaaataa

SEQ ID NO: 71746 - protein, 224 aa, Unknown
  Obtained from environmental sample
  DOMAIN (1)...(148): Adenylate and Guanylate cyclase catalytic domain
  misc_feature (1)..(224): Xaa is any amino acid
MVSLRKSTIDKYESDAIIAFLGAPLDLPDHALRACVSAIKIKKIEAELNKTIMEQKLSPTPLLTRIGVNTGDMVAGNMGTANKMNYTIMGNAVNLAARLEGVNKQYGTWILASEYTAREAGDSLLYRKLDRVRVVGINEPVRLCELIDLADQADEQQKKLVQVFHEALDYFEKRDWTQAEKGFQETLSIVPGDSPSVLYLDRCKGFLDNPPEDNWDGVYNLTSK

SEQ ID NO: 71747 - DNA, 1119 bp, Unknown
  Obtained from environmental sample
  misc_feature (1)..(1119): n is a, c, g, or t
ttgcataaggagcaagttatggcaaagattccggtaggcattctgggcgcgaccggcatggtcggtcaacagtatatcgcccttctcaacgatcacccctggtttgaggtgctttatgtagcagcctcgccaaggagcgcgggaaaaaaatattctgaagcggtcgcgggaagatggcagttaacaaaaacttacgctcctcatgtcggcgcaataatggtagaagacgccaacgacgtgagccgcgcggtggcggcgttcaaaaaaggcgaatgttcttttgtgttttccgctcttgaaatgggcaaggatgaaacccgcgccttagaggaagcctatgcctcggcgggtattccggtaatctcaaacgcgtcggctcaccgctggacaaatgacgttccggttttaatcgccgaaataaatcccgaacacgcggatattattcccgcacaaaaaaaagcgcgcggctgggatcgcggttttatcgccgtaaaacccaactgttcgatacaaagttatatgaaacccattcacgctctcgcgcgcgcgggctacccgtcgcataggatcatcgtgtctacaatgcaggcggtttccggcgcgggctaccccggcgtcccgtcgctcgacatagttgataacatcgttccgtacatcggcggcgaggaggaaaagtctgaaaaagaaccgcttaagattttcggctccatagaaaacggcgcgtttaagaacgccgagtttccgaaaatttccgctcattgtaacagagtgccggtaagggacggacacacggcttgcgtttcgctggaattcaccgccgaaaaaccgtctctggaagaaatcaaggcgatttgggcggcttacaagggactgccgcaggatgcggatttgccttttgcgcccaaacagccgatcatttaccgcgaggaagaaaatcgtccgcagcccagcaaagatcgcgacgccgacaaggcaatggcggtcgttgtcgggcggcttagaccctgcaatgtgtttgacatacgttttgcggcggtttcacataacaccgtgcgaggagccgccggcggcggtattttgaacgcggagcttttaaagcacaagggatatataagctga

SEQ ID NO: 71748 - protein, 372 aa, Unknown
  Obtained from environmental sample
  DOMAIN (11)...(148): Semialdehyde dehydrogenase, NAD binding domain
  misc_feature (1)..(372): Xaa is any amino acid
MHKEQVMAKIPVGILGATGMVGQQYIALLNDHPWFEVLYVAASPRSAGKKYSEAVAGRWQLTKTYAPHVGAIMVEDANDVSRAVAAFKKGECSFVFSALEMGKDETRALEEAYASAGIPVISNASAHRWTNDVPVLIAEINPEHADIIPAQKKARGWDRGFIAVKPNCSIQSYMKPIHALARAGYPSHRIIVSTMQAVSGAGYPGVPSLDIVDNIVPYIGGEEEKSEKEPLKIFGSIENGAFKNAEFPKISAHCNRVPVRDGHTACVSLEFTAEKPSLEEIKAIWAAYKGLPQDADLPFAPKQPIIYREEENRPQPSKDRDADKAMAVVVGRLRPCNVFDIRFAAVSHNTVRGAAGGGILNAELLKHKGYIS

SEQ ID NO: 71749 - DNA, 1296 bp, Unknown
  Obtained from environmental sample
  misc_feature (1)..(1296): n is a, c, g, or t
atgactcaaaaaaattttccgttggacaagaacgcgctggaaaagattgcgcggcagtacccgacgccgttttacatttacgatgaaaaggcgataatcgaaaatgcccgccgaatcaaggcggcgttttcggtttttccgacttacaagaaccattttgcggtgaaggctctgcccaatccctacatactcaaaatcctcgccgccgagggttttggagccgattgttccagctatcccgaactgttgttagctgacatggcgggcatgaagggcgaagatattatgctcacttccaatgaaacgcccgcgagcgaatatgaagccgcaaaaaaactcggcgctgtgatcaatttagacgattacacccatattgagtttttggagaaaacggcgggcttgcccgaattaatttcttttcgctacaatcccggtcccctcaaggaaggcaacgccataatcggcaagcccgaagaggcaaagtacggctttacgcgcgagcggctcattgagggttattcaatttgcaaggaaaagggagtaaagcgttttgctctgcacacaatggtcgcttccaacgagctttccgttccgtatcacatagaaaccgcgcgtatgctctttgagcttgccgtggaaataaaggaaaaagcgggagtgcgtcttgagtttatcaatctaggcggcggcgtaggcatcccctacaagcccgaacaggaagcggtagattatcaggttttgacagcgggaattcaaaaagcgtacaacgagattatcaaacccgcgggacttgatccgatgaacattcacacggagtggggcagggtgataaccggtccttacggctggcttgtaacccgcgcggtacacaaaaaagaaatttaccgcagttatatcgccctggacgcctgcatggcggacttaatgcgccccgccctatacggcgcgtatcatcacataacggtttccggcaaggaaaacgcgccgttatctgaaacttacgacatagtgggcagtctgtgtgaaaacaacgacaagttcgccattcaaagaaaactgcccaaaatagacgttgccgccgacggcgggggcgttgtaaacaacgggggagacttcgttattattcatgacgcaggcgcacatggtagagcgatgggctttaactacaacggcaaactccgctgcggcgaattgcttctgcgccaagacggctctatagtgcaaatccgccgcgccgagacagtagacgattatttcactacactggatactgccggtgtaaaaaattttatttaa

SEQ ID NO: 71750 - protein, 431 aa, Unknown
  Obtained from environmental sample
  DOMAIN (283)...(400): Pyridoxal-dependent decarboxylase, C-terminal sheet domain
  misc_feature (1)..(431): Xaa is any amino acid
MTQKNFPLDKNALEKIARQYPTPFYIYDEKAIIENARRIKAAFSVFPTYKNHFAVKALPNPYILKILAAEGFGADCSSYPELLLADMAGMKGEDIMLTSNETPASEYEAAKKLGAVINLDDYTHIEFLEKTAGLPELISFRYNPGPLKEGNAIIGKPEEAKYGFTRERLIEGYSICKEKGVKRFALHTMVASNELSVPYHIETARMLFELAVEIKEKAGVRLEFINLGGGVGIPYKPEQEAVDYQVLTAGIQKAYNEIIKPAGLDPMNIHTEWGRVITGPYGWLVTRAVHKKEIYRSYIALDACMADLMRPALYGAYHHITVSGKENAPLSETYDIVGSLCENNDKFAIQRKLPKIDVAADGGGVVNNGGDFVIIHDAGAHGRAMGFNYNGKLRCGELLLRQDGSIVQIRRAETVDDYFTTLDTAGVKNFI

SEQ ID NO: 71751 - DNA, 873 bp, Unknown
  Obtained from environmental sample
  misc_feature (1)..(873): n is a, c, g, or t
ttgcagacgctctttggggcgggaacaaaaatagcggttcaagacccctcataccccgtctacgttgacggctccgttctggtgggagctgcgggcggctgggaaggcgagggttacgcgggaattacataccttccctgcacaacggaaaataatttcttccccaacttggacttgattccgcaaaacagccttatctatttttgttcacctaacaacccgacaggcgcggtttccacccgcgatcagcttaccgcgctggtaaaagccgcccgcgaaaaaggctgtatcatagtctttgacgccgcctacagcgaatttatccgcgatccgtcgcttccaaaaaccatctacgaaattgacggagcggacaaatgcgccatcgaagtaaactcattctcaaagcctgcgggatttaccggagtgcgcctcggctggtcgatagttccaaaggcgatcaagtatgcaggcggcgaaagcgtcaacgcggactggagccgcatagcgggaacaatctttaacggcgcgtcaaacatcgctcaggcgggaggacttgccgcgttagacgacaatgggctgaaagaaatccgcaagctgacggatttttatcttggaaacgcaaagttgataagagccgcccttcaaaagctgagaataaattgcataggcggcgataattccccgtacatctgggcgcatttcccgggcagagacagttgggaagtattttcccaaatactggaaatgtgtcacgttgtaaccactcccggcgcaggcttcggtcccgccggacagagcttcatacgcttttcggctttcggtcacagagaggatgtagaagaagcgtgcagacggctcggctctttgatttaa

SEQ ID NO: 71752 - protein, 290 aa, Unknown
  Obtained from environmental sample
  DOMAIN (1)...(286): Aminotransferase class I and II
  misc_feature (1)..(290): Xaa is any amino acid
MQTLFGAGTKIAVQDPSYPVYVDGSVLVGAAGGWEGEGYAGITYLPCTTENNFFPNLDLIPQNSLIYFCSPNNPTGAVSTRDQLTALVKAAREKGCIIVFDAAYSEFIRDPSLPKTIYEIDGADKCAIEVNSFSKPAGFTGVRLGWSIVPKAIKYAGGESVNADWSRIAGTIFNGASNIAQAGGLAALDDNGLKEIRKLTDFYLGNAKLIRAALQKLRINCIGGDNSPYIWAHFPGRDSWEVFSQILEMCHVVTTPGAGFGPAGQSFIRFSAFGHREDVEEACRRLGSLI

SEQ ID NO: 71753 - DNA, 792 bp, Unknown
  Obtained from environmental sample
  misc_feature (1)..(792): n is a, c, g, or t
atgacaagcgaatcaaacttaaaatatcccatcgttcttgtgcatggaattatcgcgcatgacagaccgagttttaacaaattttggggcaggattccggaagctttacgggaaacaggagcgaaggtattttttggggacactgacgcgtggggcgatattaagtcaaacgcgaaaattttaaaaacatcgatagataaaatattagacgaaacaaaaagcgaaaaagtaaacataatagcgcactccaagggcggacttgattcccgttattttatctggaagtacaattacggagacaagacagcaagtttgactacaatatcgacgcctcatcacggcgcggaattatccgatcttatttacaggcaaaggattcttcattcacggggcgcgaaaaaagcgttaaaattatttggaaaattatacggcgacaaaaacccgtctttatttaaattaaattatcaattaacaacaaaatatatgaaaaaatttaacggcgaagtattgccggacgacagagtatattaccaaagtatttattccacaatgaaaaacgctcttgatgatttactgttttttcacacttacaggtacataaaaaaagtaaacggcgataacgacggctttgtaagcgagtcctccgcaaaatggggcgataacattacaaagatagaaggcggcatttcccacgcggagatacttgattacaatatgagaaaaatatcggggataaatatactcgatatatataaaaatattgtacaggggttacgcgaaaaagggttttag

SEQ ID NO: 71754 - protein, 263 aa, Unknown
  Obtained from environmental sample
  DOMAIN (3)...(183): Putative serine esterase (DUF676)
  misc_feature (1)..(263): Xaa is any amino acid
MTSESNLKYPIVLVHGIIAHDRPSFNKFWGRIPEALRETGAKVFFGDTDAWGDIKSNAKILKTSIDKILDETKSEKVNIIAHSKGGLDSRYFIWKYNYGDKTASLTTISTPHHGAELSDLIYRQRILHSRGAKKALKLFGKLYGDKNPSLFKLNYQLTTKYMKKFNGEVLPDDRVYYQSIYSTMKNALDDLLFFHTYRYIKKVNGDNDGFVSESSAKWGDNITKIEGGISHAEILDYNMRKISGINILDIYKNIVQGLREKGF

SEQ ID NO: 71755 - DNA, 5541 bp, Unknown
  Obtained from environmental sample
  misc_feature (1)..(5541): n is a, c, g, or t
atggccgagtcggacccgaaaggtggtaaaatttacggggactcggctatagtcaccgggtcggacttcggtctgtccagtgacggaaagatatttactttcggtattgcgcataattatgttgcgcagcctaagattgtctcagctaagacaatcgaagtggattataattcggaaggtgtaaaaggcggagactctttggtcgccttgtataaagacgctacaaacccctcgaccggattaattccaaaagatgttacgttcgagaccacgttcagcggggaggtaactcccagcccgagcactgtgagtatcttcaacgatggaacctggacagcggactcaatcaagttgccggcaggcattgccacgctgcctcctaaggagaacaacggcacctacgacttcagggtggctatccgtgatccgcgcggaacccgcggtatcgatacgtctttcgtgttgaaggtaaacgtgaaaaacgtcggtgtcgcgctcgactcgattgaagcgatgcctttgccggtcatcggcgcttccgtccctgcggcggctacggtcaaagtaggcgaagatacggtcggagttgagagcatttcgcttctcgggtggtataagacctcgacggctgaaacgaataagcttaacgctggggataagttcacagcgggatctaacgtcttcgcggcttttgaggtaaaggcgaaagtgggttattggtttaacgacacttgggacaattacacgactaagatgatcgactctttgaaaaaatcaatgaccacgatcaccgcggaacaagtgtcgggaacgcccaagatcagcaccgataaaaagacgctgactttcgcgataaaattccccactatcgcacagcctcctataacggctctgccggcgacgaaagtgtacggggaacccggcgtggacgttactctgcaattccctgtagggttcgttattccggctgatttatacgcaaacgggtcgattacggtcggcacgaatttgatgagagattccgtttcggtgtcgcagttcaccgcgggcgacgcgggcaacgggcctaccggtaagtttacgctgaccgggctggcctcgcaggccgtcactacgactcctcttccggtgactcttactttgaagaccactgaaaagaccccggtgatcaatacgacgtcgacgctctccgtcacggtggtcggcgcgccggtaattccgagcgtgctggcggtggtggatcctctcaagagcgccccgagcgtcaatatgacggctccgtccgcccccacttcaggcatcgcggtgtcgaaactggccgacggcagggacaactacaccgtcgcaaccggatcggccactacgtttagaggttggtactcggcggttaaggggaatgacgacttgtatacgttgacatcgcataccggcgtctttaaggcgggcgtggcttatgtcggcgccttccaggttaccgcagccactaattacaagtttgacggctcggacgccaggggcgccgcggaagggttcagaggcgcgtacgggaaatccgtgcttgtcaaagaggacgtaacgggagccaacaacccgttcggcgtaacgccggttccggggcttgagaatgtcttaactttcggtatcttgtttgagacgctcggccagccgacgttcacggcggagcctatcacgaaggtatacgcagcgctgagcgccgcgtgctcgctttcgctgcccgacgtgtttacggcaaatatgagcggggtgacggttaacgctaagttcgggacggaaaccgcggataaatatccgacggcgaaaaccgtgacggtgacaaagccgaccacgggggcgttcgccggaaagacgctgggcacgtttacgctggacagcttgggcaaattgagcgtgggcggttcgccgtacactataacactgacagtcaagagcgcggcgctcggcgttgacatgagctcgaatgtggccgtcacggttgttccgaagtcgctaacggcgccgaacggcactgtggctctgacctcgacgcccgcgtcgctggtttacaacgggcttgaccaaaaggggaacattaaggtagtcgtgacagacaacactcttgacgccaaggttagcgcgatcaagacactggcggaggacttggactacgtcttggagtggggcgcgaccataaacgtcggaaccgccaccgcgccgaacagggtgcttgtccgcggtacgggcaactacaaagattcgctcgtggcgacatacacaattgccaaagcgcccgctccggcggttgcggttgtgcagccctctattacggtagagtggaagcgcagcatcgctcttgcggatctcggcttgttccgtgtaaatccgacggccgcgggtcttgtggtagccggtcctgacgtgttcactgtgtctgccgctactgccgcgacggttggcaatgcgatagtattcgactcggtcgcgctgggcgacggggcgttggtggttgacacgaccaccggtgaggcgacgttcgagattacgtacggcacggcgaacacggataacgtggcggcgtcctcgaacagcgtgaaagcgacggtgacggtgcttgccgcgagcgcgacgaagctgagcgtgacgaatccggcgaacataacgatagcgccgaggtctcctcgcggggctttggaggtgaaggtgacggttaatccttcggacgcggtatatcacgtgcagtggtacaggagggacgcgaacaacgttcttacgcctgtcggcaaggacagcacggttctgccattggaggacgcgagggtgccggccgccgtgggcagctattcgtacttctgcgtggtgtcgtcacgcggcgcgctgagcaaggagtctcaggacgcgatcgtaacggtcaggccgcaggacttcgaggcctctccggtggttgcgactatgaacttctcgaatcagagcgtgccgttcgagcacgggaaagagttcaaagtgacccttccgacggtcagcgtcgcgaacgcggcggtggcgggcagggcgaacgattacgagtgggtggacataacatatatgaggggcggcgcggttgtcgcgacggcctccgacccgatcgcgctcaagtcttcggatcacaagggcgtgtttgacgtcggcgtttacgacgtgagcgtgacgatggagaacacgaaggaggggtctgtcgggtacggtctgaaatcgacgaagacggtcacgttcacggttctgccccgcagcatgaacaacgtgacggttaccgtggctccgcttgtgggcaacgacgcaatctacgacggcagtcagaaagccgtcgaggggcgcgtgacggtgacggacgggagcggcaagactcttattccgggcgaggacttcacggtcgtcgatcctcgtgaatggacggacgccggcacccgcgaggtttggatcgagggcgtcgacggcggcaactacagcggccgcaagagcggtacgttcgtgatcaataagggcacgctcacgatcagcacggaaggcatcccgacgttctcgaaggagtacgacggaaccgtggacgtggacacgacgacgaacaagcttgatatcgggtttatcagcgacttcctgaaccgcgtgactctgactctcgggacggactacacggtgacgaacctgaagtacaactcgaaggacgtcggcacggataagaccgtgtcttgcatagtggcgcttaaggagaccgacttgacgaagaattacaagctgggcggcacgtcgttctctatggcgaagcagatcataaggaaaggcgagccgaaggcggcgcacctgaaggccacctatggttcgccggcgaagacgatggtcacggacggggagaattcggttctgtacaagaacgcgacgtaccctgtgtccgtaacatgggcgagcggcatctccaacagcggcagcaagatcaccgtcaactacggtctcgagggcggcgcgctgcccaaagatgtcgggtcgtacacgatcacggctgacgtgacggagggcggaagcttcttggcggcgacgaacatcccgctgggcacgctgacgatccttgatcctctggcgcctgttatcacgaagcagcctgagagcgtcgagtactacgccggcgcctccgccgcggttacggttgtggccgtcaacccgaaggacggcaagacgagcggcctcaagtaccagtggtacgaagtggccgataccggcaacgtgctcttgaagggcaagacgtccgcgtcgcttacggtgaacacgaagacgaccggagcgtacacctacttcgtgcaggtgtcgtactccggcagcgagcagtcggcgacgtccgtgaacagcgacctcgcgacggtgacggtgcatccggagcctgtgtctctggccgacgccatcgtatcgataacgcaggcgtacgagtacaacgggagcaagatagagcccgcgctgaacgacgtgcttgtgacgctgggcggccagacgctgacgccggggagcgactacgagttcgcctcgagcgcggttaagcacaacggcgacgccggcgtggacgtaggcacggttacgataaagggcatccgcgcctacaagggcgaagcccgcggctcgtttacggttaataagatccaggtcacggaagcgcacctcgcgatcagctacggtacggatttcaacggcacggagcagcctgtccgcgtgggcctcaggggcaacctgaagggcttgggcgaggtgaccgcgtcgtacgatcccgacacggcggcgcgtctgggagccggttcgtggcaggtgacgctgagcataaaggacggccagaacttctacggagtggaaggcctcacgcttcccagcccgtacgttatccgcaaggcggagtggacggaagagatgtacaaggtcgtcggcttcaacgaggagggcgtgaaagaggtaaggtggaacggccaggatcagggcatcgctctgcctgagcttatcggcgtgggcgagttctacaagggcacttacgccctcgtgtacgagcatgaaggcgtaacggtgaagtctgtggtggattccagcgacgcgccttacacggtgatactgaagatagacggagacgcgaacttcaagggcgacgatatcgtattaggcgagatcatcgtccacgagtcgaactgggtcggcgtagcggaaagcaatcgcgagatacccggctccgtgacggtcgagcaggtgacggtgaagccggtggtcgtaacggcgggcgaggtaacggttggtccgaacccgactacgagcggcagcctcatgaacatctactggaacggcagcaagtccgtgagcggcaagctcgcggtgtacaccacggtcggcaagaagatcgcggcgatagaagtgaacggcacgaagaagatcggcacctggaacacaaccggagttaacgtgggcacctacctcgtaagaggcgtgctgaccacgaaggacggcggcaaggtgaaggtttcgacggtcgtgggcgtggcgaagtaa

SEQ ID NO: 71756 - protein, 1846 aa, Unknown
  Obtained from environmental sample
  misc_feature (1)..(1846): Xaa is any amino acid
MAESDPKGGKIYGDSAIVTGSDFGLSSDGKIFTFGIAHNYVAQPKIVSAKTIEVDYNSEGVKGGDSLVALYKDATNPSTGLIPKDVTFETTFSGEVTPSPSTVSIFNDGTWTADSIKLPAGIATLPPKENNGTYDFRVAIRDPRGTRGIDTSFVLKVNVKNVGVALDSIEAMPLPVIGASVPAAATVKVGEDTVGVESISLLGWYKTSTAETNKLNAGDKFTAGSNVFAAFEVKAKVGYWFNDTWDNYTTKMIDSLKKSMTTITAEQVSGTPKISTDKKTLTFAIKFPTIAQPPITALPATKVYGEPGVDVTLQFPVGFVIPADLYANGSITVGTNLMRDSVSVSQFTAGDAGNGPTGKFTLTGLASQAVTTTPLPVTLTLKTTEKTPVINTTSTLSVTVVGAPVIPSVLAVVDPLKSAPSVNMTAPSAPTSGIAVSKLADGRDNYTVATGSATTFRGWYSAVKGNDDLYTLTSHTGVFKAGVAYVGAFQVTAATNYKFDGSDARGAAEGFRGAYGKSVLVKEDVTGANNPFGVTPVPGLENVLTFGILFETLGQPTFTAEPITKVYAALSAACSLSLPDVFTANMSGVTVNAKFGTETADKYPTAKTVTVTKPTTGAFAGKTLGTFTLDSLGKLSVGGSPYTITLTVKSAALGVDMSSNVAVTVVPKSLTAPNGTVALTSTPASLVYNGLDQKGNIKVVVTDNTLDAKVSAIKTLAEDLDYVLEWGATINVGTATAPNRVLVRGTGNYKDSLVATYTIAKAPAPAVAVVQPSITVEWKRSIALADLGLFRVNPTAAGLVVAGPDVFTVSAATAATVGNAIVFDSVALGDGALVVDTTTGEATFEITYGTANTDNVAASSNSVKATVTVLAASATKLSVTNPANITIAPRSPRGALEVKVTVNPSDAVYHVQWYRRDANNVLTPVGKDSTVLPLEDARVPAAVGSYSYFCVVSSRGALSKESQDAIVTVRPQDFEASPVVATMNFSNQSVPFEHGKEFKVTLPTVSVANAAVAGRANDYEWVDITYMRGGAVVATASDPIALKSSDHKGVFDVGVYDVSVTMENTKEGSVGYGLKSTKTVTFTVLPRSMNNVTVTVAPLVGNDAIYDGSQKAVEGRVTVTDGSGKTLIPGEDFTVVDPREWTDAGTREVWIEGVDGGNYSGRKSGTFVINKGTLTISTEGIPTFSKEYDGTVDVDTTTNKLDIGFISDFLNRVTLTLGTDYTVTNLKYNSKDVGTDKTVSCIVALKETDLTKNYKLGGTSFSMAKQIIRKGEPKAAHLKATYGSPAKTMVTDGENSVLYKNATYPVSVTWASGISNSGSKITVNYGLEGGALPKDVGSYTITADVTEGGSFLAATNIPLGTLTILDPLAPVITKQPESVEYYAGASAAVTVVAVNPKDGKTSGLKYQWYEVADTGNVLLKGKTSASLTVNTKTTGAYTYFVQVSYSGSEQSATSVNSDLATVTVHPEPVSLADAIVSITQAYEYNGSKIEPALNDVLVTLGGQTLTPGSDYEFASSAVKHNGDAGVDVGTVTIKGIRAYKGEARGSFTVNKIQVTEAHLAISYGTDFNGTEQPVRVGLRGNLKGLGEVTASYDPDTAARLGAGSWQVTLSIKDGQNFYGVEGLTLPSPYVIRKAEWTEEMYKVVGFNEEGVKEVRWNGQDQGIALPELIGVGEFYKGTYALVYEHEGVTVKSVVDSSDAPYTVILKIDGDANFKGDDIVLGEIIVHESNWVGVAESNREIPGSVTVEQVTVKPVVVTAGEVTVGPNPTTSGSLMNIYWNGSKSVSGKLAVYTTVGKKIAAIEVNGTKKIGTWNTTGVNVGTYLVRGVLTTKDGGKVKVSTVVGVAK

SEQ ID NO: 71757 - DNA, 723 bp, Unknown
  Obtained from environmental sample
  misc_feature (1)..(723): n is a, c, g, or t
gtgatataccgcgtccgaaggattaaccgtcaccttcacctccaaagccccgcgaggagacctcggcgctatcgttatgttcgccggattcgtcacgctcagcttcgtcgcgctcgcggcaagcaccgtcaccgtcgctttcacgctgttcgaggacgccgccacgttatccgtgttcgccgtgccgtacgtaatctcgaacgtcgcctcaccggtggtcgtgtcaaccaccaacgccccgtcgcccagcgcgaccgagtcgaatactatcgcattgccaaccgtcgcggcagtagcggcagacacagtgaacacgtcaggaccggctaccacaagacccgcggccgtcggatttacacggaacaagccgagatccgcaagagcgatgctgcgcttccactctaccgtaatagagggctgcacaaccgcaaccgccggagcgggcgctttggcaattgtgtatgtcgccacgagcgaatctttgtagttgcccgtaccgcggacaagcaccctgttcggcgcggtggcggttccgacgtttatggtcgcgccccactccaagacgtagtccaagtcctccgccagtgtcttgatcgcgctaaccttggcgtcaagagtgttgtctgtcacgactaccttaatgttccccttttggtcaagcccgttgtaaaccagcgacgcgggcgtcgaggtcagagccacagtgccgttcggcgccgttag

SEQ ID NO: 71758 - protein, 240 aa, Unknown
  Obtained from environmental sample
  misc_feature (1)..(240): Xaa is any amino acid
MIYRVRRINRHLHLQSPARRPRRYRYVRRIRHAQLRRARGKHRHRRFHAVRGRRHVIRVRRAVRNLERRLTGGRVNHQRPVAQRDRVEYYRIANRRGSSGRHSEHVRTGYHKTRGRRIYTEQAEIRKSDAALPLYRNRGLHNRNRRSGRFGNCVCRHERIFVVARTADKHPVRRGGGSDVYGRAPLQDVVQVLRQCLDRANLGVKSVVCHDYLNVPLLVKPVVNQRRGRRGQSHSAVRRR

SEQ ID NO: 71759 - DNA, 2196 bp, Unknown
  Obtained from environmental sample
  misc_feature (1)..(2196): n is a, c, g, or t
atgctcgtacacgagggcgtaagtgcccttgtagaactcgcccacgccgataagctcaggcagagcgatgccctgatcctggccgttccaccttacctctttcacgccctcctcgttgaagccgacgaccttgtacatctcttccgtccactccgccttgcggataacgtacgggctgggaagcgtgaggccttccactccgtagaagttctggccgtcctttatgctcagcgtcacctgccacgaaccggctcccagacgcgccgccgtgtcgggatcgtacgacgcggtcacctcgcccaagcccttcaggttgcccctgaggcccacgcggacaggctgctccgtgccgttgaaatccgtaccgtagctgatcgcgaggtgcgcttccgtgacctggatcttattaaccgtaaacgagccgcgggcttcgcccttgtaggcgcggatgccctttatcgtaaccgtgcctacgtccacgccggcgtcgccgttgtgcttaaccgcgctcgaggcgaactcgtagtcgctccccggcgtcagcgtctggccgcccagcgtcacaagcacgtcgttcagcgcgggctctatcttgctcccgttgtactcgtacgcctgcgttatcgatacgatggcgtcggccagagacacaggctccggatgcaccgtcaccgtcgcgaggtcgctgttcacggacgtcgccgactgctcgctgccggagtacgacacctgcacgaagtaggtgtacgctccggtcgtcttcgtgttcaccgtaagcgacgcggacgtcttgcccttcaagagcacgttgccggtatcggccacttcgtaccactggtacttgaggccgctcgtcttgccgtccttcgggttgacggccacaaccgtaaccgcggcggaggcgccggcgtagtactcgacgctctcaggctgcttcgtgataacaggcgccagaggatcaaggatcgtcagcgtgcccagcgggatgttcgtcgccgccaagaagcttccgccctccgtcacgtcagccgtgatcgtgtacgacccgacatctttgggcagcgcgccgccctcgagaccgtagttgacggtgatcttgctgccgctgttggagatgccgctcgcccatgttacggacacagggtacgtcgcgttcttgtacagaaccgaattctccccgtccgtgaccatcgtcttcgccggcgaaccataggtggccttcaggtgcgccgccttcggctcgcctttccttatgatctgcttcgccatagagaacgacgtgccgcccagcttgtaattcttcgtcaagtcggtctccttaagcgccactatgcaagacacggtcttatccgtgccgacgtccttcgagttgtacttcaggttcgtcaccgtgtagtccgtcccgagagtcagagtcacgcggttcaggaagtcgctgataaacccgatatcaagcttgttcgtcgtcgtgtccacgtccacggttccgtcgtactccttcgagaacgtcgggatgccttccgtgctgatcgtgagcgtgcccttattgatcacgaacgtaccgctcttgcggccgctgtagttgccgccgtcgacgccctcgatccaaacctcgcgggtgccggcgtccgtccattcacgaggatcgacgaccgtgaagtcctcgcccggaataagagtcttgccgctcccgtccgtcaccgtcacgcgcccctcgacggctttctgactgccgtcgtagattgcgtcgttgcccacaagcggagccacggtaaccgtcacgttgttcatgctgcggggcagaaccgtgaacgtgaccgtcttcgtcgatttcagaccgtacccgacagacccctccttcgtgttctccatcgtcacgctcacgtcgtaaacgccgacgtcaaacacgcccttgtgatccgaagacttgagcgcgatcgggtcggaggccgtcgcgacaaccgcgccgcccctcatatatgttatgtccacccactcgtaatcgttcgccctgcccgccaccgccgcgttcgcgacgctgaccgtcggaagggtcactttgaactctttcccgtgctcgaacggcacgctctgattcgagaagttcatagtcgcaaccaccggagaggcctcgaagtcctgcggcctgaccgttacgatcgcgtcctgagactccttgctcagcgcgccgcgtga

SEQ ID NO: 71760 - protein, 731 aa, Unknown
  Obtained from environmental sample
  misc_feature (1)..(731): Xaa is any amino acid
MLVHEGVSALVELAHADKLRQSDALILAVPPYLFHALLVEADDLVHLFRPLRLADNVRAGKREAFHSVEVLAVLYAQRHLPRTGSQTRRRVGIVRRGHLAQALQVAPEAHADRLLRAVEIRTVADREVRFRDLDLINRKRAAGFALVGADALYRNRAYVHAGVAVVLNRARGELVVAPRRQRLAAQRHKHVVQRGLYLAPVVLVRLRYRYDGVGQRHRLRMHRHRREVAVHGRRRLLAAGVRHLHEVGVRSGRLRVHRKRRGRLALQEHVAGIGHFVPLVLEAARLAVLRVDGHNRNRGGGAGVVLDALRLLRDNRRQRIKDRQRAQRDVRRRQEASALRHVSRDRVRPDIFGQRAALETVVDGDLAAAVGDAARPCYGHRVRRVLVQNRILPVRDHRLRRRTIGGLQVRRLRLAFPYDLLRHRERRAAQLVILRQVGLLKRHYARHGLIRADVLRVVLQVRHRVVRPESQSHAVQEVADKPDIKLVRRRVHVHGSVVLLRERRDAFRADRERALIDHERTALAAAVVAAVDALDPNLAGAGVRPFTRIDDREVLARNKSLAAPVRHRHAPLDGFLTAVVDCVVAHKRSHGNRHVVHAAGQNRERDRLRRFQTVPDRPLLRVLHRHAHVVNADVKHALVIRRLERDRVGGRRDNRAAPHICYVHPLVIVRPARHRRVRDADRRKGHFELFPVLERHALIREVHSRNHRRGLEVLRPDRYDRVLRLLAQRAA

SEQ ID NO: 71761 - DNA, 1185 bp, Unknown
  Obtained from environmental sample
  misc_feature (1)..(1185): n is a, c, g, or t
atgccgtttctgcgcctggccgcgattatttccgcgctccttctgcccttcatgtttttcatgccaataggtttcgcgtggttcacgctctatatggcttttaagttttttaacggattatgcgccgcctgcgctttctttttgttctgttttgtgctgaacaacattgagcgtctggcaggcatggcgcttatccagttttactacggtttttactatgccgcgtggagcatattccccgcttttcatacggcaaatgaaacatggggagccgtttccgtaacggctgtttttcttgtcatcgtttttctctgcggtaaaaaacatcaggaaatcatcgccggaagcggcgatagcgacggtaaaggttcgggcgttccttttgtcatctgtctgcatgttgtgttttacatgattgtgtgcatggtaaattatattgagtggggggaaaacagcctgtccggtcttgcgtttggactaggaacttttatttctgtcggacttgtaattattgtccaactgctcatcggacgcagcgcgctgtatctctggcttatgtttctggttttttccctgctgggattgggcgctttgttatacgatacgcacataacgcttctttccggctctttcgcctacggcctgggggacggcctcggctacattgtcatctgctatatgtgcgccggggctatcaagcggagcaagtctttgcggatgttcaggctgtactgccttatgttctttgccgagtattttgttatttccgggctcttttccctttacttcaattattttgacacgccccacaagtttcttgctttcggcgttgtgctggtactggtcagcgtcagccttttactcatgccgtttatgcaaaaaaaattatttgacgcggactggacggacggtctctaccttcgtgatatggaagaatactccctgccattcgcgcagacggaagcgattaacgcgcaaaacaatcttgatctaacgccgcgtgaagaagaaatatttaccatgcttcttaccggtaaagcgcctaaagaaatcgcctatacattgaaaataagttactatacggttatttttcatcaaaaaaatctttaccgcaagttgggtattcagagcagggcggaactatttgcccgatacaatactatcccaactgaaaaaatcacataa

SEQ ID NO: 71762 - protein, 394 aa, Unknown
  Obtained from environmental sample
  SIGNAL (1)...(26)
  DOMAIN (328)...(385): Bacterial regulatory proteins, luxR family
  misc_feature (1)..(394): Xaa is any amino acid
MPFLRLAAIISALLLPFMFFMPIGFAWFTLYMAFKFFNGLCAACAFFLFCFVLNNIERLAGMALIQFYYGFYYAAWSIFPAFHTANETWGAVSVTAVFLVIVFLCGKKHQEIIAGSGDSDGKGSGVPFVICLHVVFYMIVCMVNYIEWGENSLSGLAFGLGTFISVGLVIIVQLLIGRSALYLWLMFLVFSLLGLGALLYDTHITLLSGSFAYGLGDGLGYIVICYMCAGAIKRSKSLRMFRLYCLMFFAEYFVISGLFSLYFNYFDTPHKFLAFGVVLVLVSVSLLLMPFMQKKLFDADWTDGLYLRDMEEYSLPFAQTEAINAQNNLDLTPREEEIFTMLLTGKAPKEIAYTLKISYYTVIFHQKNLYRKLGIQSRAELFARYNTIPTEKIT

SEQ ID NO: 71763 - DNA, 813 bp, Unknown
  Obtained from environmental sample
  misc_feature (1)..(813): n is a, c, g, or t
ttgagtttgtgcttatcgaccgcgatacaaaacctgcttgtttgcaggacgaattgcgccgtaacgaagccttttggtctcgtcagcttgttatgtgaaaatggattgattatggatatatacaaatcattacgggaagaatcatacgaggcgaaccttgaaataaagcggcaaaatcttgccatttacacatggggtaacgcttctgcttttgatcccgacaaaggagtatttgccataaaaccgtccggcgtagaatacaatgaattaacgccgaaaaagatggtgttagtcgatattgagggaaaggttgtcgaaggcaaactcaaaccgtcatccgacacaaaaactcaccttgttctgtaccgtgaatttaagggaatcctcggcgttacgcacacgcactcgccttacgcggtcgcttgggcgcaaacggggaaatcaatacctgtctttggcactactcacgccgatcattgcgcttatgaaattccgtgtactgtctttatgaatccgcaggatgttaaaaacaattatgaactggaaacaggcaatttaattgttaatacttttaaaaacggtaatcttgatttttcgcagattacaatgacattggttgcaggacacggaccttttacatggggaaacagcgccgctcaatcggtgtaccacagcgttattctggaagaaatcagcaaaatggcgctgtttaccgtaacgattgacccaaacgcaaaaccgctgcccgaacatatcatacgcaaacactgggaacgcaaacatggggcaaatgcatattacgggcagaaataa

SEQ ID NO: 71764 - protein, 270 aa, Unknown
  Obtained from environmental sample
  DOMAIN (46)...(256): Class II Aldolase and Adducin N-terminal domain
  misc_feature (1)..(270): Xaa is any amino acid
MSLCLSTAIQNLLVCRTNCAVTKPFGLVSLLCENGLIMDIYKSLREESYEANLEIKRQNLAIYTWGNASAFDPDKGVFAIKPSGVEYNELTPKKMVLVDIEGKVVEGKLKPSSDTKTHLVLYREFKGILGVTHTHSPYAVAWAQTGKSIPVFGTTHADHCAYEIPCTVFMNPQDVKNNYELETGNLIVNTFKNGNLDFSQITMTLVAGHGPFTWGNSAAQSVYHSVILEEISKMALFTVTIDPNAKPLPEHIIRKHWERKHGANAYYGQK

SEQ ID NO: 71765 - DNA, 1509 bp, Unknown
  Obtained from environmental sample
  misc_feature (1)..(1509): n is a, c, g, or t
gtgattatgaatcttaaaaaatatgaatactggtttatcgtaggaagccaagacctttacggaaatgaaacgcttaaacaagtcgccgagcatgcccgtattatgacggatgaattcaacagagataaattgctttcaggcacggttgtattgaaacctacggcaataacgccgcaggcgatacgaggtctttttgaagaagcgaacgcttcaaacaactgcgccggtatcataacatggatgcatacattctcgccttcaaaaatgtggatacagggacttgcaatcaaccgcaaaccgcttctgcatctccacacccaatttaatcgggatattccatggtcttcaatcgatatggattttatgaacttaaaccaatcggcgcacggcgaccgcgagcacggttatattcatacaaggatgaggcttccccgtaaagtagttgccggtttctggcaagataaggaactgcgccgccgaatggacgtgtggatgagagccgccgcggcgagaaaagacggaatggattctacagttatgcggttgggagacaatatgcgtgaagtggcggtaaccgaaggcgacaaagtcgaggctcaaatcaagttcggctggcaggtgaacacatggggcataggcgatcttgccgcacgttacgcgaaaatcagcggcgcgcaggcggaaaaactggcggaagaatacgccgctttatacaatcttgcgcctgaacttaaacaagcgggcaaggctagagacgcaatgcttgaacaggcaaaaatagaaatcgcccttaaagaaatgcttgaaagcgaacacgcaggggcattcactactaccttccaagaccttcacggtctgccgcaattgcccggtcttgcctgccaacggcttatggaacagggttacggtttcggcgcggaaggagactggaaacagtccatgctgacacgagccgccaaagtgatggcttcggggttatcaggcggcgtttccttcatggaagattacacctaccactttgagtcgggcaaagaagccgttctgggcgctcacatgcttgagatatgcccatcaatcacaagcggcaaaccgcgtattgaagttcatccgctgggaatcggcggcaaagcagaccccgcccgtatggtgtttgacgccgctccagggcatgcggtacttgcgacgctcatagatcttggcagccgtttcagaatgatcgtcaatgaaatagagactgtaaaaattaaaaaaacaatgccgaaactgcctgtcgcccgcgccctttggaaaccgtatccgaatttaagcgatgccgccgaggcatggataatttcaggcggtacacatcattcggtatacagttccgctcttacgctagaatatttccgcgattttgcggaaatgagcggcattgagtttgtgcttatcgaccgcgatacaaaacctgcttgtttgcaggacgaattgcgccgtaacgaagccttttggtctcgtcagcttgttatgtga

SEQ ID NO: 71766 - protein, 502 aa, Unknown
  Obtained from environmental sample
  DOMAIN (2)...(500): L-arabinose isomerase
  misc_feature (1)..(502): Xaa is any amino acid
MIMNLKKYEYWFIVGSQDLYGNETLKQVAEHARIMTDEFNRDKLLSGTVVLKPTAITPQAIRGLFEEANASNNCAGIITWMHTFSPSKMWIQGLAINRKPLLHLHTQFNRDIPWSSIDMDFMNLNQSAHGDREHGYIHTRMRLPRKVVAGFWQDKELRRRMDVWMRAAAARKDGMDSTVMRLGDNMREVAVTEGDKVEAQIKFGWQVNTWGIGDLAARYAKISGAQAEKLAEEYAALYNLAPELKQAGKARDAMLEQAKIEIALKEMLESEHAGAFTTTFQDLHGLPQLPGLACQRLMEQGYGFGAEGDWKQSMLTRAAKVMASGLSGGVSFMEDYTYHFESGKEAVLGAHMLEICPSITSGKPRIEVHPLGIGGKADPARMVFDAAPGHAVLATLIDLGSRFRMIVNEIETVKIKKTMPKLPVARALWKPYPNLSDAAEAWIISGGTHHSVYSSALTLEYFRDFAEMSGIEFVLIDRDTKPACLQDELRRNEAFWSRQLVM

SEQ ID NO: 71767 - DNA, 1599 bp, Unknown
  Obtained from environmental sample
  misc_feature (1)..(1599): n is a, c, g, or t
atggacataaaacaggctattatcgagaataaaacttctcttggcatagagtttggctccacgcggataaaagcggtattaattgatacgcaatacacgcctatcgctcaaggcagtcatgattgggaaaacaaactggaagacggagtttggacatatcatcttaacgatgtttgtgcgggattgcaggactgtttcaaaaagttggctcttgatgtaaaaaaccgctatggtttgaccctttcttcggtcagcagtatcggcatttccgcaatgatgcacggataccttgtctttgacaagaacggcgatcagcttgttcctttccgcacatggcgaaataccacaaccgaaaaagccgctgccctgcttaccgaaaaatttaaattcaatataccgcagcgttggagcatcgcccatttgtatcaggcgatactgaatggggaacctcatgtaaaggatattgattttattacaactcttgccggttatgtgcattggaaattaacggggaaaaaaacgctcggtattggcgacgcttccggtatgtttccgattgataacggcaattataataccaaaatgataaaacagtttgacgagcttatcgcttcaaacaattacagttggaaaattgcaaacattcttccatccattctaaacgcaggtgaaaacgccggaactctcacggcggaaggagcaaaactgctcgacagttccggcagtctgcgagacggtattcctctctgcccgccggaaggagacgccggtacgggcatggctgcgactaacagcgtggcggaacgtacaggcaatgtttcggcaggcacttctatcttcgcaatgatcgttatggaaaaagaactgtcaaaggtataccccgaaattgatattgtcactactccgtcgggaaaacccgtggcgatggttcactgcaacaactgcacttccgatattgacgcatggataaaattgttctgcgaactgcttgatataagcggagcaaagccggataaaaccgctctttacagtatgttgtacaacaaagcccttgaagcggataatgattgcggcggtcttctttccttcaattactactcaggtgaaacaattacgggaattgatgaagggcgtcccctgttcgcgcgtctgccggacagcaattttaatctggcgaattttatgcggacacttcttttttccagtatggcgacattaaagtacggcatagatattcttacggaaaaagaaaaagcgaagatagacagtttgttggggcacggcggcttgtttaagatcaaagacataggacaacgatttatggcggcggtctttaacgcgcctgttggcgtaatggaatccgccggagaaggcggcgcgtggggcatcgctcttcttgccgcatttatgcaagagaaaaatgaaactttggaaaaatttcttgcggaaaaagtttttgccggaaagacaggaacaaagattaaacctgatccaaaagatgtagaaagctttagaaaatttatggaacgttataccgcagggctcaaaattgaaagagccgcggttgaaaatttgaaaaggagtgattatgaatcttaa

SEQ ID NO: 71768 - protein, 532 aa, Unknown
  Obtained from environmental sample
  DOMAIN (265)...(495): FGGY family of carbohydrate kinases, C-terminal domain
  misc_feature (1)..(532): Xaa is any amino acid
MDIKQAIIENKTSLGIEFGSTRIKAVLIDTQYTPIAQGSHDWENKLEDGVWTYHLNDVCAGLQDCFKKLALDVKNRYGLTLSSVSSIGISAMMHGYLVFDKNGDQLVPFRTWRNTTTEKAAALLTEKFKFNIPQRWSIAHLYQAILNGEPHVKDIDFITTLAGYVHWKLTGKKTLGIGDASGMFPIDNGNYNTKMIKQFDELIASNNYSWKIANILPSILNAGENAGTLTAEGAKLLDSSGSLRDGIPLCPPEGDAGTGMAATNSVAERTGNVSAGTSIFAMIVMEKELSKVYPEIDIVTTPSGKPVAMVHCNNCTSDIDAWIKLFCELLDISGAKPDKTALYSMLYNKALEADNDCGGLLSFNYYSGETITGIDEGRPLFARLPDSNFNLANFMRTLLFSSMATLKYGIDILTEKEKAKIDSLLGHGGLFKIKDIGQRFMAAVFNAPVGVMESAGEGGAWGIALLAAFMQEKNETLEKFLAEKVFAGKTGTKIKPDPKDVESFRKFMERYTAGLKIERAAVENLKRSDYES

SEQ ID NO: 71769 - DNA, 1416 bp, Unknown
  Obtained from environmental sample
  misc_feature (1)..(1416): n is a, c, g, or t
gtgaagaataaagggtttaatccgtatcttccttcatgggagtacattccggacggagaaccatatttattcaacgacagagtttatatatacggttctcatgataaatttaacggtcctgtttattgccctaacgattatgtttgctggtctgcgcctgaggacgatttaagcgactggcgttatgagggagtgatataccccaaaaccaacgacccctttaataaagacggaagtatgtgcctttacgcgccggatgtaacgcgcggacctgacggtcggtattatttgttttatgtgcttgataaagtaaatgttgtgtccgtggcggtttgtaaatctccagccggaaaatttaaattctacggctatgtacattatcccgacggaacaaggcttggcgagcgcaaaggagatcagcctcagtttgatccgggcgttttaacggaaggcgataaaacatatctctttacaggtttttgcggacgcgacgacaaaaccagaataggcgctacggcggtaactctgggaaaagatatgctgactatacttgacgatccttttcttgtcgctcccggggtacacaacagcaagggcacaagttttgaaggctgtgaattttttgaagctccgtccgtaagaaaacacggcgacacatactattttatctactcatcaatagcgtctaacgaactttgttacgcgaccagcaaaaatcccataaatgattatgtttacggaggcgttatcatcagcaacgccgacgtgcatatcagcacatataaacccgccgataaaccaatgggctgcggcggcaataatcacggaagcatcatcgaaataaaaaacaaatggtatattttttatcacaggcataccaacggaaacgaattcagccgtcaagggtgtcttgagccgatagaaataaaggcggacggttctattccgcaggtggagacaacttcatgcggaccaaacggcaaaccgcttatcggcaaaggggaatttccggcatatattgcatgtaacatattttccgtggaaaataatcgacaattagaaagacaatggcctcttcacaaccagtctttgcctaaaatttcacaggacggacgggatggcgatgaagaaacgggttatgtaacaaatatttccgataatcacggtattggttttaagtattttgattgtaaaggtattaaaaaaataaaaattaaaacacgcggttacaataacggtgtttttcatgttaaaacaaaatgggacggcgagtctttagcgtgcataaagattgaatacagcaatatttgggtggaatattcttcagatataaaccttcctgacggaatacacgcgctttactttatttataaaggtaatggatacgcttccattgcttcctttactttcgaataa

SEQ ID NO: 71770 - protein, 471 aa, Unknown
  Obtained from environmental sample
  DOMAIN (15)...(315): Glycosyl hydrolases family 43
  misc_feature (1)..(471): Xaa is any amino acid
MKNKGFNPYLPSWEYIPDGEPYLFNDRVYIYGSHDKFNGPVYCPNDYVCWSAPEDDLSDWRYEGVIYPKTNDPFNKDGSMCLYAPDVTRGPDGRYYLFYVLDKVNVVSVAVCKSPAGKFKFYGYVHYPDGTRLGERKGDQPQFDPGVLTEGDKTYLFTGFCGRDDKTRIGATAVTLGKDMLTILDDPFLVAPGVHNSKGTSFEGCEFFEAPSVRKHGDTYYFIYSSIASNELCYATSKNPINDYVYGGVIISNADVHISTYKPADKPMGCGGNNHGSIIEIKNKWYIFYHRHTNGNEFSRQGCLEPIEIKADGSIPQVETTSCGPNGKPLIGKGEFPAYIACNIFSVENNRQLERQWPLHNQSLPKISQDGRDGDEETGYVTNISDNHGIGFKYFDCKGIKKIKIKTRGYNNGVFHVKTKWDGESLACIKIEYSNIWVEYSSDINLPDGIHALYFIYKGNGYASIASFTFE

SEQ ID NO: 71771 - DNA, 732 bp, Unknown
  Obtained from environmental sample
  misc_feature (1)..(732): n is a, c, g, or t
ttggaagatatgaagaaatatatttctgatgtagtaggtcattttaaaggaaaaatatattcatgggatgtgcttaatgaagcctttcccgacggcaattattcatcaagctggaaaacatccatgcgcgacaataatccgtggtttaaagctataggttctgattttgtatacgaaggtttccttgccgcccgtttagctgaccccggcgcaatcttgtattacaacgactacaataccgataaccaaagtaaagccgcaattatccgcgatatggtaaaagaagtaaatgaacgatataaaaaagcatatccaaatgaaacacggttattaatagaaggtataggaatgcaggaacatcacaacacaggcgtatcggcaagctcggtaaaaaatacattaaatatgtttaagccgctgggagtaaaaatatccgtcagcgagcttgatgttttgatagtaacttatcaggaatttgcgccttacggtcacggacctaacaaacaaaattcaattacaggatatacaaggactagcgggttaaaagaacaagcgaaactatacggtcaactcttcaaagtatatctggaattcagcgacataattgagcgcgtatcattttggggcgtaactgacgataaaagctggcgatccgccgcattaccgcttttatttgaagcggacggaaaagctaaagacgcctactacagcgtaattggatcgcttaagtaa

SEQ ID NO: 71772 - protein, 243 aa, Unknown
  Obtained from environmental sample
  DOMAIN (1)...(242): Glycosyl hydrolase family 10
  misc_feature (1)..(243): Xaa is any amino acid
MEDMKKYISDVVGHFKGKIYSWDVLNEAFPDGNYSSSWKTSMRDNNPWFKAIGSDFVYEGFLAARLADPGAILYYNDYNTDNQSKAAIIRDMVKEVNERYKKAYPNETRLLIEGIGMQEHHNTGVSASSVKNTLNMFKPLGVKISVSELDVLIVTYQEFAPYGHGPNKQNSITGYTRTSGLKEQAKLYGQLFKVYLEFSDIIERVSFWGVTDDKSWRSAALPLLFEADGKAKDAYYSVIGSLK

SEQ ID NO: 71773 - DNA, 1200 bp, Unknown
  Obtained from environmental sample
  misc_feature (1)..(1200): n is a, c, g, or t
atgagccaaagacaaaaatacttaatattggtaggcgacggcatggccgactttcccattccgtcactcaacggcaaaactccggtcgagtcagcctccacgccgaacatggacaagatagccgccgccggacgggtaggcctgctgtccacgattcccgaaggcttccttcccggcagcgacatcggcaacatgtcgctcttgggctacgacccccgccgctacttctgcggccgcgcccccatagaggcggcaagcatgggtgtcgccataggccccgacgacgttgtcttccggtgtaatttggtggcgattgaaaacgaggtgatgagggactactccgccggccacatatcgacagaagccgcccatattgtaattaacgcgttgcaaaagtctctcgggattgacggagagttaaaattccacccgggagtgagttaccgccacctattgacggtgaggaatatcggcgcgaaactgaagtgcacccctccccacgacatcaccggtcagaaaatcgatccatacttgcctcatggtgacggcgccggagatagggattatgtcttgtcgttaatggatcgagcaaaacctattatcgccgaaacgaaagctagaggttgcaatcacgccgcgacggacatctggctctggggccaaggcccagccgtaacattgcctacgttgaaagagcgttacggcataaccggttcggtaatctccgccgttgatctggtgcgcggtctgggaaaattggcgggattaaccgtacgcgttgtcaacggcgcgacaggatacttaggaacgaactacgccggaaaagtagccgcggcgatagaggccttcgatagcggcgaagactttgtcttcctgcacgtagaagccccggacgagaccagccacgagggggtattggagaaaaaaatccaggccatagaggagttcgacagacacgtggtaggcgaaatgctgaagtatcaatccaaaaccccgaacctgagaatagccgtctcccccgaccacataacagccctaagcacaaaaacccacgacgcctcccccgtcccgttctgcatctgcggggaggggataaatgcggacggcgcgaaaagatattgcgaagcggaggcgcaatcaatcgtccagacccccatagagggcccggaattctttgagatgctggttaaagggaactaa

SEQ ID NO: 71774 - protein, 399 aa, Unknown
  Obtained from environmental sample
  DOMAIN (267)...(377): Metalloenzyme superfamily
  misc_feature (1)..(399): Xaa is any amino acid
MSQRQKYLILVGDGMADFPIPSLNGKTPVESASTPNMDKIAAAGRVGLLSTIPEGFLPGSDIGNMSLLGYDPRRYFCGRAPIEAASMGVAIGPDDVVFRCNLVAIENEVMRDYSAGHISTEAAHIVINALQKSLGIDGELKFHPGVSYRHLLTVRNIGAKLKCTPPHDITGQKIDPYLPHGDGAGDRDYVLSLMDRAKPIIAETKARGCNHAATDIWLWGQGPAVTLPTLKERYGITGSVISAVDLVRGLGKLAGLTVRVVNGATGYLGTNYAGKVAAAIEAFDSGEDFVFLHVEAPDETSHEGVLEKKIQAIEEFDRHVVGEMLKYQSKTPNLRIAVSPDHITALSTKTHDASPVPFCICGEGINADGAKRYCEAEAQSIVQTPIEGPEFFEMLVKGN

SEQ ID NO: 71775 - DNA, 915 bp, Unknown
  Obtained from environmental sample
  misc_feature (1)..(915): n is a, c, g, or t
ttgagatgctggttaaagggaactaacaagatgattatatgcccaaataatgaatgtaagcagccgaacgttgccgtcttttgcggcgatgccgccgatgtcctcaaaaatatggaggacaacggcattgatctcataataacgtcgccgccgtatgccgatcaaagaaaggatacttacgggggcatatccaccgataagtatgtggaatggtttttgcccatatctaaagaacttttacgggtattgaagcctacgggtacctttatcttaaatattaaggaaaaggtcgtaaacggcgaaagaagcacttatgttatggaactcataatggaaatgcgtaaacagggttggctatggacggaagaatttatttggcacaaaaaaaattgctatccgggtaagtggccgaaccgttttagggatgcgtgggaaaggcttttgcaattcaataagacgaaacggttcagtatgtatcaagaagccgtaatggttcctatgggggattgggcaaaaacgcggctcagaaaccttagtgagacggataaaatcagagataactctaaagtaggaagcggtttcggcaaaaacatatcgaattggctaactcgcgatatggcgtacccgacaaatgtgatacatttgtctactgaatgtagcaataaaagtcatagcgctacatttccgatggaattgcctagttggtttattaaacttttcaccaaagaaaatgacactgtaatggacccgttcatgggttcgggtacaacgttgttcgccgccgaaagattaaggagaaacgctgttggaatagatgttttggaagaatattgccaaatggtgaaaaccgagatggagggaaaggaattgtatttatttgaagaggagaaagaatatgtcgttgcaaatcgttga

SEQ ID NO: 71776 - protein, 304 aa, Unknown
  Obtained from environmental sample
  DOMAIN (43)...(283): DNA methylase
  misc_feature (1)..(304): Xaa is any amino acid
MRCWLKGTNKMIICPNNECKQPNVAVFCGDAADVLKNMEDNGIDLIITSPPYADQRKDTYGGISTDKYVEWFLPISKELLRVLKPTGTFILNIKEKVVNGERSTYVMELIMEMRKQGWLWTEEFIWHKKNCYPGKWPNRFRDAWERLLQFNKTKRFSMYQEAVMVPMGDWAKTRLRNLSETDKIRDNSKVGSGFGKNISNWLTRDMAYPTNVIHLSTECSNKSHSATFPMELPSWFIKLFTKENDTVMDPFMGSGTTLFAAERLRRNAVGIDVLEEYCQMVKTEMEGKELYLFEEEKEYVVANR

SEQ ID NO: 71777 - DNA, 402 bp, Unknown
  Obtained from environmental sample
  misc_feature (1)..(402): n is a, c, g, or t
ttgaagaggagaaagaatatgtcgttgcaaatcgttgatgttattgaatatgttgaaaataacattgttcagtttcatatgcagagaatagcgaaaattaaaacgttgttactgaagcaagtattaaaaaagaaaaacccgtatctatttaaggcaaaaaaccttagagcgtccagcgaaatagtaaaacaacttatcgaggcgtatatttcctcaagcgaggaaacgatgttcggcgattggcttgaaggtttagcgatatttataaacggaaaagtctatgggggacgaaagtctacaacgaaagggattgatttggaatttgataaggaaaatgtccgctatatcgtttcaataaagtcaggcccgaattgggaaactcggctcaaattgaaaagatga

SEQ ID NO: 71778 - protein, 133 aa, Unknown
  Obtained from environmental sample
  misc_feature (1)..(133): Xaa is any amino acid
MKRRKNMSLQIVDVIEYVENNIVQFHMQRIAKIKTLLLKQVLKKKNPYLFKAKNLRASSEIVKQLIEAYISSSEETMFGDWLEGLAIFINGKVYGGRKSTTKGIDLEFDKENVRYIVSIKSGPNWETRLKLKR

SEQ ID NO: 71779 - DNA, 1446 bp, Unknown
  Obtained from environmental sample
  misc_feature (1)..(1446): n is a, c, g, or t
atgcacgcacgtttcatagaaaaactaataaccctgctcttcgacgcgatagccctaaacatagcgttcttctccgcctattggctccgcttccactccggcctcttcgcggccgcgacatccgaagtcccggcgactttcacctacatcgaaccctctctcatcctctgcggcggctggatcgtcctcttctacttcaccggcctctaccgcgattggataaaggagtcgcgcgtcgacgagttcttcgtagtcgcccgcaccgtcctcttcggcttattcatgatatttctcgtaaccggcgccccgcaaataatggagttcgcgcaaaccggcgacgtgcgaaaattccttacgcccaccaagttcgcgacgctcctcacctacggcgtctgcatgctctttttcgccagcgccgaccgcttcgtgacgcatacggtgctggtggccctgttctccaagggaatagcggtgaagaacgtgcttatcgtgggggccgaccgcgacggggagcggcttcttaaggacataaactctttcccgcagctcggctacaaggtcgttggattcatagacgacaacggcaaccgccgcgggagtctctgcgccggattgccggtgatgggcacatactccgatattccgtccgtggtggttaaagagagggtcggcgggttgattatcgggcatgtcagcacctcgccaaacgagatcacgaagatactggaatactgcggcgagttgcggatagacatcttcatggtgccgtcgctgatggacgtcatctccggccacttcaagacgaaccagatattcggcgttccgctgatggtgctgctgcaggatcacatgccgccgtgggaggcgcaggtgaagcgtatcatggacgtcgtcgtgtcgctctgcgtcatcgtcttcggctcgccggtgctgataggcgtggcgcttttagtcaagcttacgtcgccggggccggcgatatattcgcaggagcgtgtggggcgcaatgggaaaaattatgtgatatacaagtttcgatctatgtacattgacgcggagagcaggggcggtccgcagtgggcgtctaagaacgatccgagaataacgcctgtggggcggtttattcgaaagacgagattggacgagctgccgcagtttttcaatgtgctgaagggagagatgagcttggtcgggccgcgccccgagcggccgtttttcgtggagaaacttaagcaggagataccgtggtacgtaaggagaataaagatgaagccggggatcacggggtgggcgcaggttaagcatgagtatgattcttcnattgaggatgtcaaacagaaagtgctttacgatttgtattattttgaaaatatgtctatcgctttggatataaagattttgattaggacggtgctggtggtgcttacggggaagggggcgcattga

SEQ ID NO: 71780 - protein, 481 aa, Unknown
  Obtained from environmental sample
  DOMAIN (292)...(481): Bacterial sugar transferase
  misc_feature (1)..(481): Xaa is any amino acid
MHARFIEKLITLLFDAIALNIAFFSAYWLRFHSGLFAAATSEVPATFTYIEPSLILCGGWIVLFYFTGLYRDWIKESRVDEFFVVARTVLFGLFMIFLVTGAPQIMEFAQTGDVRKFLTPTKFATLLTYGVCMLFFASADRFVTHTVLVALFSKGIAVKNVLIVGADRDGERLLKDINSFPQLGYKVVGFIDDNGNRRGSLCAGLPVMGTYSDIPSVVVKERVGGLIIGHVSTSPNEITKILEYCGELRIDIFMVPSLMDVISGHFKTNQIFGVPLMVLLQDHMPPWEAQVKRIMDVVVSLCVIVFGSPVLIGVALLVKLTSPGPAIYSQERVGRNGKNYVIYKFRSMYIDAESRGGPQWASKNDPRITPVGRFIRKTRLDELPQFFNVLKGEMSLVGPRPERPFFVEKLKQEIPWYVRRIKMKPGITGWAQVKHEYDSSIEDVKQKVLYDLYYFENMSIALDIKILIRTVLVVLTGKGAH

SEQ ID NO: 71781 - DNA, 792 bp, Unknown
  Obtained from environmental sample
  misc_feature (1)..(792): n is a, c, g, or t
atgcgaactgagaatgttaagattgattacgttgttatgttaataatcgctgttgttatcattacggcgataagcgttcccgtccttgctcaagcgactgccgtcgtatcaattcccggcggggtgttcaaccgcggatctaacgaggccggcgccgaaaccgatgagtctcccgtccgtcttgtccgtatgtcggggttcggcgtgacggctacggaaattacggaggcgcagtacgggcgttgcgtagacggcgggcggtgtacgccggcgcattatgacgacgggacttgtttgatttggtcgggcggcggttttaggaaagtggtcgttccgcctaacttgcgcggcggcgggtttcccgtggtctgcgtgacgtggcagcaggcgaaggcgtactgcgcgagtgcggggatgcggctgcctaccgaggcgcagtgggagtacgcggctctgggcgggggcggcgggcgttacgcttggggcgacgcggcgccggacggcagccgctgcgcgcgcggcgcgccgacggccgtcggtagtttcgcggccaacggttacgggctttacgatatgacgggcaacgtatgggagtggacggcggacttctacgccgccgacgcctacgaaaattcggccgatgccgaccctaaggggccggacgccggatactacagggtgataaggggcggcggctggtacagcggccctaaagaacttagagtgcgcaaccgccactggttcgcggcgggcagcgcggaggcgagcgtggggttcagatgcgtaaaatga

SEQ ID NO: 71782 - protein, 263 aa, Unknown
  Obtained from environmental sample
  DOMAIN (31)...(263): Domain of unknown function (DUF323)
  misc_feature (1)..(263): Xaa is any amino acid
MRTENVKIDYVVMLIIAVVIITAISVPVLAQATAVVSIPGGVFNRGSNEAGAETDESPVRLVRMSGFGVTATEITEAQYGRCVDGGRCTPAHYDDGTCLIWSGGGFRKVVVPPNLRGGGFPVVCVTWQQAKAYCASAGMRLPTEAQWEYAALGGGGGRYAWGDAAPDGSRCARGAPTAVGSFAANGYGLYDMTGNVWEWTADFYAADAYENSADADPKGPDAGYYRVIRGGGWYSGPKELRVRNRHWFAAGSAEASVGFRCVK

SEQ ID NO: 71783 - DNA, 318 bp, Unknown
  Obtained from environmental sample
  misc_feature (1)..(318): n is a, c, g, or t
ttgacttttaaagtaccggctaattattttagtcaggtacaaataaacgcaaggagggcagtgcaaatggcaaaaaaagatgagagagagaaagatattgaagccgctatttccgagattcgtccgcggttgcaagacgacggcggcgacattgagtttgtcggcgttacggacgccgacgtcgtgcaggtgcgtttacgcggcgcttgcgccgggtgcccgggggcggttatgacgcttaggatgggtgtcgagcgcattataaaggaaagggtgccgagtatcaagtcggtggagaacgtggggagcctgggatga

SEQ ID NO: 71784 - protein, 105 aa, Unknown
  Obtained from environmental sample
  DOMAIN (33)...(101): NifU-like domain
  misc_feature (1)..(105): Xaa is any amino acid
MTFKVPANYFSQVQINARRAVQMAKKDEREKDIEAAISEIRPRLQDDGGDIEFVGVTDADVVQVRLRGACAGCPGAVMTLRMGVERIIKERVPSIKSVENVGSLG

SEQ ID NO: 71785 - DNA, 774 bp, Unknown
  Obtained from environmental sample
  misc_feature (1)..(774): n is a, c, g, or t
atgacggcgggcgccgcggtgcgcgccggatggagcaggtttccctttctggcattctgttgggtgagtttgattctgttgatcggggcgggggcgctctcggcctatctcgtctatccgcggctctacgggctggggccggttgttttttacctctttttggcggctgtcgcggctttcttcttcgtcctcggcggcggactgacgctaatcaccgtcacctcgcttacgggtatcgacctgctatatccgcatggaagaagctccgtcacggtgcgtctgctctttccggtggccgtgtttctggccaaactcgtacgcttcgaccgctccgggctcatggcctctttcgtcaaagtcaacaactcgctcaccatagcccagtccaagaggataaagggcgacaggatactggtgctcctgccgcactgtttgcagatagacgtatgcaacaggaagatcacgaacgacatctcgaactgcatgcgctgcggccggtgccccgtaggggagtttgtcgaggcgggggagaggcgcggcctgaagatcgaggtggtgaacggcggcacgctggcccgaaagcgggtggcgatgtggaggccgcagggtatcatagccgtggcctgcgagcgtgatttgacgctggggatacaggacgtgcacccggtgccggtctacggggtgataaacgacaggccgcacgggccttgtgtgaatacttgcgtggatatggataatgtggatgcggcgattaagttttttaaaaatgtttga

SEQ ID NO: 71786 - protein, 257 aa, Unknown
  Obtained from environmental sample
  DOMAIN (91)...(253): Protein of unknown function DUF116
  misc_feature (1)..(257): Xaa is any amino acid
MTAGAAVRAGWSRFPFLAFCWVSLILLIGAGALSAYLVYPRLYGLGPVVFYLFLAAVAAFFFVLGGGLTLITVTSLTGIDLLYPHGRSSVTVRLLFPVAVFLAKLVRFDRSGLMASFVKVNNSLTIAQSKRIKGDRILVLLPHCLQIDVCNRKITNDISNCMRCGRCPVGEFVEAGERRGLKIEVVNGGTLARKRVAMWRPQGIIAVACERDLTLGIQDVHPVPVYGVINDRPHGPCVNTCVDMDNVDAAIKFFKNV

SEQ ID NO: 71787 - DNA, 1374 bp, Unknown
  Obtained from environmental sample
  misc_feature (1)..(1374): n is a, c, g, or t
atggccaaagaaaaaatgccggaaaatccgaaagattttcttattgttaatcttaataacgggaaaaatcccggctttataggggataatattaccgacggcatgataaaagcgccgcttttgcataagaacgccgaagtcctgcggaaattattcccttttaccgctccttcgcgcgttctgggcaaagataggagttttgggctgggagacaggctgggaatcgcaacgcccggccatatcaaactatttgaaaaatatgacgcgtatcccgtattcgcgcagcagtccatccgcgagcttactctgaccaaccgaagctatgaagacgtgctggacaccgccacttttgcggtattcagggaagggtttaaaaaagaatggggcgcggacggagatcacctgaaaaccatagatgacgtaaagtacgccctttctctgggatttaccatgatcaccctggactgctccgatcatatcagaaacgatataaacgcggctaacgctcctgtgccgcccaggaagattgtccaaaaatatacagggaaacaatttgatataggcgaaggaatagtattaacttttaccgaagaagaactaaaaattatttacggcgtttacggcaaagccattgcctttgccgttgatatgtacaagcgtttttttaagcatggcaaatacaatgccgattttgaaatttcaatagatgaaacttccacccctactaccccgcttcagcattattttgtcgcaagagaattaattgactgcggggtttcttttgcaacaatagcgccgaggttttgcggagagtttcaaaagggagttgattatcaaggcagccttgatcagtttaacaatgaaattaaggttcacgctataattgcccggcatttcaagtataagttaagcatacactcaggttcggataaattcagcgtcttcccaagcataggaacagaaacacgccatgtattccatgtaaaaacagccggcaccaactggctcgaagcgatgcgcgttgtcgccggaacagatcacaatctgtacaaggaagtccacaagtacgctttaaccgtatttgaacaggcgagtaagttttatcacgtaacaaccaatcttgataatatacccaatgttgattcattggcaaatgaggatctcccgaaactctttgagaataacgacgcccgccagctgatacacattacatacggctttatccttaacaaaaaaaacagcaccaacgaaaccgattttacattcaaggacagactgtacaatttatggcagaaacatgaagatttgtacgcccgggcgcttttcatccacatcggcaaacatctggatctgttaggtgtaaagcaaatttag

SEQ ID NO: 71788 - protein, 457 aa, Unknown
  Obtained from environmental sample
  misc_feature (1)..(457): Xaa is any amino acid
MAKEKMPENPKDFLIVNLNNGKNPGFIGDNITDGMIKAPLLHKNAEVLRKLFPFTAPSRVLGKDRSFGLGDRLGIATPGHIKLFEKYDAYPVFAQQSIRELTLTNRSYEDVLDTATFAVFREGFKKEWGADGDHLKTIDDVKYALSLGFTMITLDCSDHIRNDINAANAPVPPRKIVQKYTGKQFDIGEGIVLTFTEEELKIIYGVYGKAIAFAVDMYKRFFKHGKYNADFEISIDETSTPTTPLQHYFVARELIDCGVSFATIAPRFCGEFQKGVDYQGSLDQFNNEIKVHAIIARHFKYKLSIHSGSDKFSVFPSIGTETRHVFHVKTAGTNWLEAMRVVAGTDHNLYKEVHKYALTVFEQASKFYHVTTNLDNIPNVDSLANEDLPKLFENNDARQLIHITYGFILNKKNSTNETDFTFKDRLYNLWQKHEDLYARALFIHIGKHLDLLGVKQI

SEQ ID NO: 71789 - DNA, 1185 bp, Unknown
  Obtained from environmental sample
  misc_feature (1)..(1185): n is a, c, g, or t
atgggaaaaaggcggtatagccgcggccgaggccggcgggtatatcagataaagatgccgttagctgaaattaatccgtcattatcattctcgcggcgtatggccgaatcggtaataagccgctatggaccggagcaggttaaatggcattatgaacacggacttgtgctgcaaagtatttttcttttggggcaggcggccaaacaggataattactgccgttatgtgaaagaaatgtacgattccatgatagacataagcggtgaaatccgcagctatcgcgaaggcgagtacaatctggatcagataaaccccggcaaaactttgtttttgctgtatgccgcgtacggggaagaaaaataccgcaaagccattgaaaaactgcgggaacagttacgctgccagccgcgcacaaaatcaggaggcttctggcacaaacaaatctatccccggcagatgtggcttgacgggctgtatatgcaggggccgttttacgcccaatacgcgaaagaattcggaaataccgctgattttgaagatattatgcgtcaattttcccttattgaggcaaagacccgagacgcgaagaccggccttttgtaccacgcctgggatgaatctctcaaacagaaatgggcaaaccctgataccggctgttccgggcatttttggggccgtgcgcttggctggtactgtatggcgctggcggacactctggattttattcctcccgcgtaccgggaacacgccgaaactctaaaggccatctcccggcgtttgttcacgccgcttttaaagtatcaggacgcggattcgggcctctggtttcaggtgcttgaccgcgggagcgagccgggaaattacactgaaagctcggcatcgtccatgtttgtctattttctgcttaaaatggcgcgcttaaaaaccgcgtctgacagtgatgccgcttctttagtaaataccgccaaaaaagcgtatcaaggactcttaaaaaacaagatacaggaagacccgtccggagaactccacctgacaggcatttgcaaagtcgccggccttggcggagagccgtacagggacggttcttatgaatattatatcaatgaaccgcaggctgttgatgattttaagggcgtaggcccctttattctggcctcaatggaatacgaatgtttatcgcgctaa

SEQ ID NO: 71790 - protein, 394 aa, Unknown
  Obtained from environmental sample
  DOMAIN (30)...(393): Glycosyl Hydrolase Family 88
  misc_feature (1)..(394): Xaa is any amino acid
MGKRRYSRGRGRRVYQIKMPLAEINPSLSFSRRMAESVISRYGPEQVKWHYEHGLVLQSIFLLGQAAKQDNYCRYVKEMYDSMIDISGEIRSYREGEYNLDQINPGKTLFLLYAAYGEEKYRKAIEKLREQLRCQPRTKSGGFWHKQIYPRQMWLDGLYMQGPFYAQYAKEFGNTADFEDIMRQFSLIEAKTRDAKTGLLYHAWDESLKQKWANPDTGCSGHFWGRALGWYCMALADTLDFIPPAYREHAETLKAISRRLFTPLLKYQDADSGLWFQVLDRGSEPGNYTESSASSMFVYFLLKMARLKTASDSDAASLVNTAKKAYQGLLKNKIQEDPSGELHLTGICKVAGLGGEPYRDGSYEYYINEPQAVDDFKGVGPFILASMEYECLSR

SEQ ID NO: 71791 - DNA, 1278 bp, Unknown
  Obtained from environmental sample
  misc_feature (1)..(1278): n is a, c, g, or t
atggtcaggcgggagccttttatgaatattgtacgcgtcggctccgtcgcgcctgtggacgacctgtacgctcttatgccgaaccgctccgcgttacactacgatgaagacagccggaattttaccaggataaaaggaaaatcttacggtcttgcgtctcccggcactatcatcaaaaacgaaggcatactcatccgtaaagactggctggataaacttgggttaaagattccggttacccttgatgattacatggaagtgatggacgcttttacgcttcgtgatcccaacggttcagggcgcgccgacacctacggttacggggcatttatcgaaattaacaactttgaagaaggaatagggcggcgttttgatcccttcttcggcgcgttcggcgttgccggaacctggagtctggacaaaaatgatccgggactaaatgtgcgcaagccggcttattttgacgcgcttattttcattaaaaaaatgattgatagaaaagtaatcgatcctaactggcccagttacggcaaagatgatttccgggcggcgtggaaacaggggcgtttcgggatcatgcgggagcagaacgccgcttttgccgccgaaaataattacgctccctttgacaaaaacttccccaaaggcgaatggattgttatagacccgccgcaagggcccggcggtaaaaaatccgtcggggtttacacccaggcgtaccgtatttatgcaatttccgccaaggcaatgaaggcgggaaaagggccggccattgccaaattgcttgaatggatgtcaagtgaaaagggctactaccttttgggttggggcgaggaaggggtaaattttgtattcgacaaagacggagttcctaccgtgagcggcattcctgatccgtcaaaaggttttactatgcccgagatgcagccctacacccagttacgcaacatggttttctataacagcgaagcagagcttatagcccgttatcctacatatatcgcccccgtgtccggtaagaagatgagcgcgcttgcaacactaagggacatgcagagccgcccctggactgcgaatgtcggaggagacgccctgcccgcgcccaacgccgatcttaagcgcttttatgagcagggagtcgttgaattccttacgggaaagcggcagttaacccgtgaaaattgggacgcgtgggtcgccgagtttgacaggttaggcggcgcggaatgggaaaaaggcggtatagccgcggccgaggccggcgggtatatcagataa

SEQ ID NO: 71792 - protein, 425 aa, Unknown
  Obtained from environmental sample
  misc_feature (1)..(425): Xaa is any amino acid
MVRREPFMNIVRVGSVAPVDDLYALMPNRSALHYDEDSRNFTRIKGKSYGLASPGTIIKNEGILIRKDWLDKLGLKIPVTLDDYMEVMDAFTLRDPNGSGRADTYGYGAFIEINNFEEGIGRRFDPFFGAFGVAGTWSLDKNDPGLNVRKPAYFDALIFIKKMIDRKVIDPNWPSYGKDDFRAAWKQGRFGIMREQNAAFAAENNYAPFDKNFPKGEWIVIDPPQGPGGKKSVGVYTQAYRIYAISAKAMKAGKGPAIAKLLEWMSSEKGYYLLGWGEEGVNFVFDKDGVPTVSGIPDPSKGFTMPEMQPYTQLRNMVFYNSEAELIARYPTYIAPVSGKKMSALATLRDMQSRPWTANVGGDALPAPNADLKRFYEQGVVEFLTGKRQLTRENWDAWVAEFDRLGGAEWEKGGIAAAEAGGYIR

SEQ ID NO: 71793 - DNA, 903 bp, Unknown
  Obtained from environmental sample
  misc_feature (1)..(903): n is a, c, g, or t
atgcaaataacaaaaggaaaaaaagcaaaagtacggtacagcatgggagacatggcgttttacgccggtatcgacgtatttctggtttttatccttattatcgtagctatccctatgtggagtaccataaccctgtccttccgtcccaacacttttatcgggagtaatcttgagggaatgttcctgccgcctcataaatggtcgcttgccgcttaccgcgccctgttgggcaataacggatttgtgaacgcgtttataaacagccttaaagtttttgtgtttggcgtcgcttcggcgttgtttctcactattcctctcgcctatgtgctctccgtaaaaaccctgccgggcagaaaattcttaaccgtgttagttctgattccctatctgttcaacgtaggcttgatccccgcctatctggttgtaaaccgtctggggctttccaatcatcttgccgcgatatttttacccgccgcgatcaatacctacaactgccttattatgcgcggtttttttgaagggattcccgaagagttaaaagagtccgccagaatagacggcgcgcctgaaataacggttctgttacggatcattctgccgctttcaaagccgattattatgacgattggcctgtactacggggtgcatttctggaatgacttttttcacgccatgctctacattaacaacaacgcgcttcagcccctgcccatacttctgcgtaatattctgatggcaagcgggatgaatgaatttgtcgaagtcagcgcgtttggagaggctccggttcaggcgataaaagccgccagtgtttttttggccgcgatcccgatgatcatcgcttatccgtttattcaaaaatattttacaagaggaactctgctgggaagcgtgaagggatag

SEQ ID NO: 71794 - protein, 300 aa, Unknown
  Obtained from environmental sample
  DOMAIN (81)...(295): Binding-protein-dependent transport system inner membrane component
  misc_feature (1)..(300): Xaa is any amino acid
MQITKGKKAKVRYSMGDMAFYAGIDVFLVFILIIVAIPMWSTITLSFRPNTFIGSNLEGMFLPPHKWSLAAYRALLGNNGFVNAFINSLKVFVFGVASALFLTIPLAYVLSVKTLPGRKFLTVLVLIPYLFNVGLIPAYLVVNRLGLSNHLAAIFLPAAINTYNCLIMRGFFEGIPEELKESARIDGAPEITVLLRIILPLSKPIIMTIGLYYGVHFWNDFFHAMLYINNNALQPLPILLRNILMASGMNEFVEVSAFGEAPVQAIKAASVFLAAIPMIIAYPFIQKYFTRGTLLGSVKG

SEQ ID NO: 71795 - DNA, 927 bp, Unknown
  Obtained from environmental sample
  misc_feature (1)..(927): n is a, c, g, or t
atgaataatgccgtcaataaaggaatagacaagattagggagataaaacggtaccgttcggtatacattcttcttgtcattccattggctttttatataatttttaaatacatccccatttggaacgggcagattgcctttaaggattttatgcctatggacggggtaacgggcagcaaatggatagggcttacgcattttaaaacctttataaaatctttttatttcggcgaattgctcaggaacacccttttttacagttttggaaaactccttgtgagcgttcccgccgcgataatccttgccgtaacgctgtatgagagccttaaccggaaactggcaaaggttgtgcagacattggcatatcttccccactttctttcatgggttatcatgtatgggattctccttgtccttcttgctcccggcgacggcattattaacgacataattaaattattcggaggcaatcctgtcgctttccttaccgatacgcgcacttttccctggattgtgattttttcagacgcgtggaaggaaatgggctggagcgccattatctttatagccgctcttcttggcattgatcctacgttattcgaagccgcgatggtagaaggagtcaacgctccgcagcgcgtttggtatataacgcttccgtccataaggcctgtaattgttatggtaatgctgctgcgtctgggaacgattcttgacgcggggtttaatcagatgtttatgctctattccataccggtatacagcgtggcggatattattgatacatgggtctaccgtcaggggcttttagaatttcaattcggccttgcgacggcagttggtatttttaaaggcgtcataggactgatgcttgttattctatccaactggatggtaagaaaagtcagcgattcggggctgttttaa

SEQ ID NO: 71796 - protein, 308 aa, Unknown
  Obtained from environmental sample
  DOMAIN (80)...(304): Binding-protein-dependent transport system inner membrane component
  misc_feature (1)..(308): Xaa is any amino acid
MNNAVNKGIDKIREIKRYRSVYILLVIPLAFYIIFKYIPIWNGQIAFKDFMPMDGVTGSKWIGLTHFKTFIKSFYFGELLRNTLFYSFGKLLVSVPAAIILAVTLYESLNRKLAKVVQTLAYLPHFLSWVIMYGILLVLLAPGDGIINDIIKLFGGNPVAFLTDTRTFPWIVIFSDAWKEMGWSAIIFIAALLGIDPTLFEAAMVEGVNAPQRVWYITLPSIRPVIVMVMLLRLGTILDAGFNQMFMLYSIPVYSVADIIDTWVYRQGLLEFQFGLATAVGIFKGVIGLMLVILSNWMVRKVSDSGLF

SEQ ID NO: 71797 - DNA, 2334 bp, Unknown
  Obtained from environmental sample
  misc_feature (1)..(2334): n is a, c, g, or t
atgagcggtttggtgcgtccgcttattaaagccctgtttcatgaaagacaggaacaattcttctccctttttgaaaaaagccttttgcatttttttaatgcgggccgtgagcctgagcattttttaatgttaatcgacgaggtgaaagccctggaattgcctctgcgtatacaggatatgcttccctttatatacaggagcatcatcaggatttatgagcgtttcactgttcatgcccgctatgaaaaagaaggctggaatacagtattgaattcccttaaatgcgatctgcttggcacccgcgaccgttcttccctgatgcagaatcttgcgcgttacctgccgaagatcggcattcaaagagccgcgattgttctgtacggagatgaaaaaacctcgattttcatcggcggtttttccgatgaaggcatatgcgccgtaaaagaacagcgttttccgtcccggctccttgttccttcttcaatcaagtcccagtacgccgacggaattttcatggttcagccgctgtttatagaaaaccagtcccttggatattttgtgcataatgttcccatcaatgacggcgtgatttttgaagaattaaggtctacggtaagctacgctttaaagggaatattccttttggaagagacggttaaggcaaaacaggttgccgaacgcgctgaacaggcaaaaaccgaattcctgcaaaccctggaaaacggcttgtatgatccacttcagggagtaatggaaaagcttgaaacattggaaaaacaggcggtttcaactgcgcgtccggagccttcatcggacggccttttaaacggcttacaggaattaaaatcatttataacgcagcgggaaacggaagcgggcagttttttggattttacgctggctaagatagacgaactttccctgcgaaaaacaatttttgacccaaaagacttattgccgaaaatcgggaactttccgctgttgttaggcgatactgcgaggcttgcgcagtgtttttcccttatcagggaacagtacggcggcgcggatttggctgaatcagccaaaacagaatattctgccaaattaacatatacgggtttttctgttacttttcacgcccggacaaaggataaaaaatcaattaaagacggaaaagcgcggcaattcggacttttgctggcggaacggatcattttaatgcacgggggagaatttttacaggagagggatcgctgcaccgtaacgcttccatggcctactttaaccgggcaggagccttccagaaatccggtcagatcccgcgattatgtgctggttctttcagatccggcatttctgcccacaaactttttttctttgcctcaggcgcgtgataccgataagaagcagtcgggcgcggcggcgtttatcgcgtggaacgcggcgggagccggttcaagcgatctggtaaaagttatcagactcaggcggagaagcgaattgttaaacgttccctttctctgttatggaatgccttcagtgtccggcgccccgcttgattccgccgcttctttaatcgacgcggttgaatacgccttaaaatcacccaggaagggaatgattctttttatcggttatcaaaaccatgacggcgattttgaattgttgctgtctcatggcagggggggcccctccgttaaaaaatataatgcggccggcggcggcgctgtttttgaaaaagtttatatagactccatggattcatttaatgaaacggtgggggaagttaaaccgctgttgattgtttttaactcgcttgatgtcgagggagcggcgacggtacgaaagcacccgctgacaatgatggttcccataataatgatcagcggcagaatggacatcgccgttgacgcgcgttcgctctgccaattttccaggcttattgtctgccaccgcgcgattgtctcttctccggaattcaaatcccgcgtaatggctatcttgggcggcgctgaaatactgccgcctcatacaggcgaattggtaaaaaaaacaattctcaatttcgacaaacacgccaaaagccacatatcgcgctggaaattggccgactcggcaaatgtcagcgaggattatcttacccgtatctttcacaaggaaatgggactttccctttgggactatcttaaccgttaccggatttttcacgcggtggaattgcttcagcaaacggatgtcacaatacatgaggtcgccaataaatgcggctttcaggatcaggcgtatttttgccgtgtttttaaaaaaattcacggcgtaactccgggacaaatacggaaaaaaattatataa

SEQ ID NO: 71798 - protein, 777 aa, Unknown
  Obtained from environmental sample
  DOMAIN (730)...(774): Bacterial regulatory helix-turn-helix proteins, AraC family
  misc_feature (1)..(777): Xaa is any amino acid
MSGLVRPLIKALFHERQEQFFSLFEKSLLHFFNAGREPEHFLMLIDEVKALELPLRIQDMLPFIYRSIIRIYERFTVHARYEKEGWNTVLNSLKCDLLGTRDRSSLMQNLARYLPKIGIQRAAIVLYGDEKTSIFIGGFSDEGICAVKEQRFPSRLLVPSSIKSQYADGIFMVQPLFIENQSLGYFVHNVPINDGVIFEELRSTVSYALKGIFLLEETVKAKQVAERAEQAKTEFLQTLENGLYDPLQGVMEKLETLEKQAVSTARPEPSSDGLLNGLQELKSFITQRETEAGSFLDFTLAKIDELSLRKTIFDPKDLLPKIGNFPLLLGDTARLAQCFSLIREQYGGADLAESAKTEYSAKLTYTGFSVTFHARTKDKKSIKDGKARQFGLLLAERIILMHGGEFLQERDRCTVTLPWPTLTGQEPSRNPVRSRDYVLVLSDPAFLPTNFFSLPQARDTDKKQSGAAAFIAWNAAGAGSSDLVKVIRLRRRSELLNVPFLCYGMPSVSGAPLDSAASLIDAVEYALKSPRKGMILFIGYQNHDGDFELLLSHGRGGPSVKKYNAAGGGAVFEKVYIDSMDSFNETVGEVKPLLIVFNSLDVEGAATVRKHPLTMMVPIIMISGRMDIAVDARSLCQFSRLIVCHRAIVSSPEFKSRVMAILGGAEILPPHTGELVKKTILNFDKHAKSHISRWKLADSANVSEDYLTRIFHKEMGLSLWDYLNRYRIFHAVELLQQTDVTIHEVANKCGFQDQAYFCRVFKKIHGVTPGQIRKKII

SEQ ID NO: 71799 - DNA, 372 bp, Unknown
  Obtained from environmental sample
  misc_feature (1)..(372): n is a, c, g, or t
gtgatagccacctccgagtactcgaccggcaaaatccctttgtcgttctcaataaccagcgtaacctccgccatattgagcggcgcgcgcttctgcgtccccgagaagatgacctcctgcatattggcgctacgcagcatggaggccttctgctccccaaacacccatcgaatggcgtccaccacattgctcttaccgcacccattgggcccgataacggcggtcatcccttcgccgaagtccaattcggtcttgtctgcgaaagatttgaagccgaaaatggagagttttcgtaaaatcatcggtttttttgtcctttttttgacgtttttaacgtttttgacactgtttttatgttttttgaccatttag

SEQ ID NO: 71800 - protein, 123 aa, Unknown
  Obtained from environmental sample
  misc_feature (1)..(123): Xaa is any amino acid
MIATSEYSTGKIPLSFSITSVTSAILSGARFCVPEKMTSCILALRSMEAFCSPNTHRMASTTLLLPHPLGPITAVIPSPKSNSVLSAKDLKPKMESFRKIIGFFVLFLTFLTFLTLFLCFLTI

SEQ ID NO: 71801 - DNA, 3642 bp, Unknown
  Obtained from environmental sample
  misc_feature (1)..(3642): n is a, c, g, or t
atggtcaaaaaacataaaaacagtgtcaaaaacgttaaaaacgtcaaaaaaaggacaaaaaaaccgatgattttacgaaaactctccattttcggcttcaaatctttcgcagacaagaccgaattggacttcggcgaagggatgaccgccgttatcgggcccaatgggtgcggtaagagcaatgtggtggacgccattcgatgggtgtttggggagcagaaggcctccatgctgcgtagcgccaatatgcaggaggtcatcttctcggggacgcagaagcgcgcgccgctcaatatggcggaggttacgctggttattgagaacgacaaagggattttgccggtcgagtactcggaggtggctatcacgcggcggatttaccgcagcggggagagcgagtaccggctgaacaaggtcccttgccgtttgcgggacatccagaacatattccttgatacgggggtggggagcagcgcctatactactatagagaataagatgatcgagcggatactctccgacaaggccgaggagcggcggcttctctttgaggaggcggcggggatcggcaagtacaagcacgcgcgccgcgagagccgcgccaagctcgacaagacgcgtcaggaccttttgcggataaacgaccttgtgacggaggccgaccggcaggtgcgcattctggcgcgccacgtggagaaggccaagcgctacaaggactaccatgaggcgctcaaggccattgagatcgcttttgagagcaggcggtacgcggcgctgacgggggctatattggagcgcggcgcgtcgattgcggaggcgcagtcgcgtcgtgaggtgcttagggcctcggtcgcttcggcggagtcgcgtgtggagaagatgtcgcttgacgcgcttgagaaggagaacgagcttggcgtcgcttcgcgtagcgtggcggaggcgggggaggggatcgccgccatagaccgcgacctctcggtggcggcggagcgggcgagcaacctgagggccgccgttgcgcggctcgacggcgaggcggagcagctcgacagggaggcggaggaggcttcgcggctcaagacgcagattgagaagagcgtggtggagcgtgaggcgttgctacgtgagagtaccgagcgggcgtctggcgcgggtgaggagctttcagcgtttgactcccgccttagcgctaagcggcgtgaggcggacgagatcgggcgtagccagatagatctgataaacagcctcggcgaggcgaggaacaggcagagcgtggcaagcggggcgctaagcgccgctctcgacggcaagagccgcaacgagcgtgagatagccagtctcgaggcccgctacgaggagtacgaggacgcctcggaggcttgccggcggcagctcgaggaggtcaactccgcgaacagcggtcttatggacgcccgtgcggtgctgctctcacgcatagaggccgaggaggagcgttacggcgtgttggtcgagaaggagaagcgccttgaggcgcagatatcttccaacaagtcgcagcgcaagttccttgaggggctggacgcggcgtttgaggggtatgaggcgggggtgcgggcacttttgacggcgcgtctgccgggattgcgcgggattgtcgccgacctcgtgagcgtctccgacgacaggcttttgccgctagtggagaagttggttgggagcgctgttcagactgtcgtctttgacaccgacgcccagatggaagcggcggtggattttctgcgacgtgagagggcgggggcggcgcgagtggcgtctcttgagcgtttgcgcggccaagcggcaaaccatccgtctggccgggcgtttccggccggattgcacgatgtccgttcgctgataaaggtcgatgccgattgcgccgcacttgccgatagattctttgatagatttgccattgctccggactacgcgtccgccgccgcggcggcgcgggaaatgggcgcgtatggcacggcggcgatagtatcgctggccgatggggcgatctgctacggcgacggcagcgtggtcgcaggggagtccaagaaggagtcggcgggaatcctgcagcgcaaacagcagatagagaggcttgcgtcggagataggcggcgcggagggcgagcttaccgctatactaaccgaaaaggatgtctgcgtgatagcgcgcgacggagccaaggcggagcttatagagataaacgaaaagataaacggcggtcagcggctgcagcaggagcagcagacgacgatccgccactacgagaacgagatgcagggtatagttgtgcgtgtgcagtccatcgcgccggagatcgaaacgctcgcggctaagattgagcagctcatggggtcgattgccggaatcgaggctgaggtctccgtgatggaggctcgtcgcggcgagcttgcggggcaattggagaccgctcgtgacggcgttcgcgtcatggaggaggagcgtgcggcgcttgccgatcacctcaagaacgtggagcttgaggtgcacggtttgacaaacaggataggcaacgacaagcgcgatattgagagactggcgggtgatatagagcagttcggtcagcggaagctctctaagattgaggatcgcggcaggtgtctgtccgagatatccggccttgaggagagcgtggcgcgtatgaccgccgatcttgaggcggcgcgtgagaggcgctccgggcttgaggcggcgcgggatgtcgtccgcgaggattacaacgggcgtttggccgaaatcaacgatttgcgtaatgagataaagggcgtaaacggcgagctcgcggcggcgggggagtcgatccacgacggcgagttgaaacaagccaacgacgagcaggagcgccgccgcatccgcgagaggatgtgggagtcctacgaactcgacatagaggggttggatcgtgacggtcttaccgtcattgaagaggacgacgaggcggttatgcgtgacatcgccatgtacaaggagcggatcaagcaagtggggcaggtgaacatggccgcgttggacgacttcgacacggagagcgagcgtctcaaagttctcaccgcgcagagagacgacctgcagggcgccgtggacgaactcgagagagcgatatcgaagctcgacaaggaggcgcgggcgcagtttatcgccaccttcgggcaggtccagaagaacttcacggagatgttcacgacgctcttcgagggcggcgaggcgagcatctcgcttgaggaaggggtagacccgttagaggccgacatacacataaacgcgcgccctgccggcaagaaaatgcgcggcgtgcagttgctctcaggcggcgagcgggcgctcacggcgatatcgttgctcttcgctctttatctggtcaaaccgtcggcgtactgcattctagacgagttggacgcgccgttagacgaagccaatgtggcgcgttttgtcaaggtgctcgggaagttcgccgagaagacgcagttcatagtgattacccacaacaagaagacgatggaggcggccgacctgctgtatggcgtcacgcagcaggagtcgggggtgtccaccatcgtgtcggtgaagtttgaggagaccggggcgcttagggctgcgtga

SEQ ID NO: 71802 - protein, 1213 aa, Unknown
  Obtained from environmental sample
  DOMAIN (1024)...(1192): ABC transporter
  misc_feature (1)..(1213): Xaa is any amino acid
MVKKHKNSVKNVKNVKKRTKKPMILRKLSIFGFKSFADKTELDFGEGMTAVIGPNGCGKSNVVDAIRWVFGEQKASMLRSANMQEVIFSGTQKRAPLNMAEVTLVIENDKGILPVEYSEVAITRRIYRSGESEYRLNKVPCRLRDIQNIFLDTGVGSSAYTTIENKMIERILSDKAEERRLLFEEAAGIGKYKHARRESRAKLDKTRQDLLRINDLVTEADRQVRILARHVEKAKRYKDYHEALKAIEIAFESRRYAALTGAILERGASIAEAQSRREVLRASVASAESRVEKMSLDALEKENELGVASRSVAEAGEGIAAIDRDLSVAAERASNLRAAVARLDGEAEQLDREAEEASRLKTQIEKSVVEREALLRESTERASGAGEELSAFDSRLSAKRREADEIGRSQIDLINSLGEARNRQSVASGALSAALDGKSRNEREIASLEARYEEYEDASEACRRQLEEVNSANSGLMDARAVLLSRIEAEEERYGVLVEKEKRLEAQISSNKSQRKFLEGLDAAFEGYEAGVRALLTARLPGLRGIVADLVSVSDDRLLPLVEKLVGSAVQTVVFDTDAQMEAAVDFLRRERAGAARVASLERLRGQAANHPSGRAFPAGLHDVRSLIKVDADCAALADRFFDRFAIAPDYASAAAAAREMGAYGTAAIVSLADGAICYGDGSVVAGESKKESAGILQRKQQIERLASEIGGAEGELTAILTEKDVCVIARDGAKAELIEINEKINGGQRLQQEQQTTIRHYENEMQGIVVRVQSIAPEIETLAAKIEQLMGSIAGIEAEVSVMEARRGELAGQLETARDGVRVMEEERAALADHLKNVELEVHGLTNRIGNDKRDIERLAGDIEQFGQRKLSKIEDRGRCLSEISGLEESVARMTADLEAARERRSGLEAARDVVREDYNGRLAEINDLRNEIKGVNGELAAAGESIHDGELKQANDEQERRRIRERMWESYELDIEGLDRDGLTVIEEDDEAVMRDIAMYKERIKQVGQVNMAALDDFDTESERLKVLTAQRDDLQGAVDELERAISKLDKEARAQFIATFGQVQKNFTEMFTTLFEGGEASISLEEGVDPLEADIHINARPAGKKMRGVQLLSGGERALTAISLLFALYLVKPSAYCILDELDAPLDEANVARFVKVLGKFAEKTQFIVITHNKKTMEAADLLYGVTQQESGVSTIVSVKFEETGALRAA

SEQ ID NO: 71803 - DNA, 651 bp, Unknown
  Obtained from environmental sample
  misc_feature (1)..(651): n is a, c, g, or t
atggtagtccttgtagcgcttggccttctccacgtggcgcgccagaatgcgcacctgccggtcggcctccgtcacaaggtcgtttatccgcaaaaggtcctgacgcgtcttgtcgagcttggcgcggctctcgcggcgcgcgtgcttgtacttgccgatccccgccgcctcctcaaagagaagccgccgctcctcggccttgtcggagagtatccgctcgatcatcttattctctatagtagtataggcgctgctccccacccccgtatcaaggaatatgttctggatgtcccgcaaacggcaagggaccttgttcagccggtactcgctctccccgctgcggtaaatccgccgcgtgatagccacctccgagtactcgaccggcaaaatccctttgtcgttctcaataaccagcgtaacctccgccatattgagcggcgcgcgcttctgcgtccccgagaagatgacctcctgcatattggcgctacgcagcatggaggccttctgctccccaaacacccatcgaatggcgtccaccacattgctcttaccgcacccattgggcccgataacggcggtcatcccttcgccgaagtccaattcggtcttgtctgcgaaagatttgaagccgaaaatggagagttttcgtaa

SEQ ID NO: 71804 - protein, 216 aa, Unknown
  Obtained from environmental sample
  misc_feature (1)..(216): Xaa is any amino acid
MVVLVALGLLHVARQNAHLPVGLRHKVVYPQKVLTRLVELGAALAARVLVLADPRRLLKEKPPLLGLVGEYPLDHLILYSSIGAAPHPRIKEYVLDVPQTARDLVQPVLALPAAVNPPRDSHLRVLDRQNPFVVLNNQRNLRHIERRALLRPREDDLLHIGATQHGGLLLPKHPSNGVHHIALTAPIGPDNGGHPFAEVQFGLVCERFEAENGEFS

SEQ ID NO: 71805 - DNA, 606 bp, Unknown
  Obtained from environmental sample
  misc_feature (1)..(606): n is a, c, g, or t
ttgcggctcttgccgtcgagagcggcgcttagcgccccgcttgccacgctctgcctgttcctcgcctcgccgaggctgtttatcagatctatctggctacgcccgatctcgtccgcctcacgccgcttagcgctaaggcgggagtcaaacgctgaaagctcctcacccgcgccagacgcccgctcggtactctcacgtagcaacgcctcacgctccaccacgctcttctcaatctgcgtcttgagccgcgaagcctcctccgcctccctgtcgagctgctccgcctcgccgtcgagccgcgcaacggcggccctcaggttgctcgcccgctccgccgccaccgagaggtcgcggtctatggcggcgatcccctcccccgcctccgccacgctacgcgaagcgacgccaagctcgttctccttctcaagcgcgtcaagcgacatcttctccacacgcgactccgccgaagcgaccgaggccctaagcacctcacgacgcgactgcgcctccgcaatcgacgcgccgcgctccaatatagcccccgtcagcgccgcgtaccgcctgctctcaaaagcgatctcaatggccttgagcgcctcatggtag

SEQ ID NO: 71806 - protein, 201 aa, Unknown
  Obtained from environmental sample
  SIGNAL (1)...(22)
  misc_feature (1)..(201): Xaa is any amino acid
MRLLPSRAALSAPLATLCLFLASPRLFIRSIWLRPISSASRRLALRRESNAESSSPAPDARSVLSRSNASRSTTLFSICVLSREASSASLSSCSASPSSRATAALRLLARSAATERSRSMAAIPSPASATLREATPSSFSFSSASSDIFSTRDSAEATEALSTSRRDCASAIDAPRSNIAPVSAAYRLLSKAISMALSASW

SEQ ID NO: 71807 - DNA, 483 bp, Unknown
  Obtained from environmental sample
  misc_feature (1)..(483): n is a, c, g, or t
gtgcggcgcaatcggcatcgacctttatcagcgaacggacatcgtgcaatccggccggaaacgcccggccagacggatggtttgccgcttggccgcgcaaacgctcaagagacgccactcgcgccgcccccgccctctcacgtcgcagaaaatccaccgccgcttccatctgggcgtcggtgtcaaagacgacagtctgaacagcgctcccaaccaacttctccactagcggcaaaagcctgtcgtcggagacgctcacgaggtcggcgacaatcccgcgcaatcccggcagacgcgccgtcaaaagtgcccgcacccccgcctcatacccctcaaacgccgcgtccagcccctcaaggaacttgcgctgcgacttgttggaagatatctgcgcctcaaggcgcttctccttctcgaccaacacgccgtaacgctcctcctcggcctctatgcgtgagagcagcaccgcacgggcgtccataa

SEQ ID NO: 71808 - protein, 160 aa, Unknown
  Obtained from environmental sample
  misc_feature (1)..(160): Xaa is any amino acid
MRRNRHRPLSANGHRAIRPETPGQTDGLPLGRANAQETPLAPPPPSHVAENPPPLPSGRRCQRRQSEQRSQPTSPLAAKACRRRRSRGRRQSRAIPADAPSKVPAPPPHTPQTPRPAPQGTCAATCWKISAPQGASPSRPTRRNAPPRPLCVRAAPHGRP

SEQ ID NO: 71809 - DNA, 1287 bp, Unknown
  Obtained from environmental sample
  misc_feature (1)..(1287): n is a, c, g, or t
ttgcccgtcatagccgcggcgcttttgagcaacgccgcagtccgtctcaagaaccttccgaacatcggcgacgtgcgcaatatgctggaaatcgcgtcattgcttggggctaaagttgttaataccgacaacaacaagaacgagtatgagataacggccgcatccatcgttacctccgagttaccggttgatctatcaaacaagattcgcgcgtcggcgctattcgcctccgcattgcttgtcagaacgggaaaagcaatcatcacgcaacccggcggcgaccacattgggcgccgccggctcgacacgcacttcttggcctttaaggcgctgggggccacgcttgaggttgagcaccatgtaagcggatccgacgttactatggaaacagctttcatcctcaccgcgccggcaggcgggcttgcgggggcggacatatacttggacgaggcctccgtcaccgccacggagaacgcgttaatcgccgcggccggggcacgcggcaagacggtaatcgccaacgcggcgtcggaaccgcacgttcaaggactttgccgcttcctacaggctatgggcgtagagatagagggtgtagggtcaaacctgcttaccgtgtacgggcgcaacgatttcggcggaggagccgtccacgagatcggcggcgactacatcgaggccggatcgttcatcggtatggcggcgttgacgaattccgatctgacaatcagcggcgtggacgcaggagttatgcgaatgatactcttccaattcgagcggatcggaatcgtggtggagaccgacgccgcgacgcgaacgctgagagtgtctagaaaccaacctctgaaagtacgcaaagacataggcggggcaatcccgcggatagaagacagcccgtggcccggttttcccacagacctgctgtctatactgttagtctgcgccacgcaatctgaaggcacgtgtttgatacatgagaaaatgttcgagtcccgcctattctttgtggacaaacttgtaggcatgggcgcctcgatagtgctatgcgacccgcaccgagcggtggttgtgggaaaatcgcaactctacggagcgtcaatgtccagcccggacattcgggccggaatggcgatactgatagccgcgatggcggcccaaggccacagcgtcattaaccatatagaacagatagacagaggctaccaacaaatagacgaacggctcaacgcgctgggcgcgagcattatcagaaacgattcgcgacgggcggccgacattaagagaatttga

SEQ ID NO: 71810 - protein, 428 aa, Unknown
  Obtained from environmental sample
  DOMAIN (2)...(407): EPSP synthase (3-phosphoshikimate 1-carboxyvinyltransferase)
  misc_feature (1)..(428): Xaa is any amino acid
MPVIAAALLSNAAVRLKNLPNIGDVRNMLEIASLLGAKVVNTDNNKNEYEITAASIVTSELPVDLSNKIRASALFASALLVRTGKAIITQPGGDHIGRRRLDTHFLAFKALGATLEVEHHVSGSDVTMETAFILTAPAGGLAGADIYLDEASVTATENALIAAAGARGKTVIANAASEPHVQGLCRFLQAMGVEIEGVGSNLLTVYGRNDFGGGAVHEIGGDYIEAGSFIGMAALTNSDLTISGVDAGVMRMILFQFERIGIVVETDAATRTLRVSRNQPLKVRKDIGGAIPRIEDSPWPGFPTDLLSILLVCATQSEGTCLIHEKMFESRLFFVDKLVGMGASIVLCDPHRAVVVGKSQLYGASMSSPDIRAGMAILIAAMAAQGHSVINHIEQIDRGYQQIDERLNALGASIIRNDSRRAADIKRI

SEQ ID NO: 71811 - DNA, 1449 bp, Unknown
  Obtained from environmental sample
  misc_feature (1)..(1449): n is a, c, g, or t
atggcagtttcagggtatgaagtaaccgcttccaaatacagaccaaaaacttttgacgaattggcgggacaggattttgtcgtctctacccttaaaaattcgctgaagaacggacacatcgcccacgcttatcttttttccggtcccagaggctgcggcaaaaccagtgcggcgcgtattttggcgcggtcgcttaactgcacaaacccaaacgaagacggaccctgcggagtctgcgataattgccaagcgataagccgaggcgccagcatggacgtaatcgaaattgacggcgcgtcaaacaacaaagttgatgaagcgcgtcaaattatcgacgaagttctttttccgccgcaagcgggtaaatacaaagtttacattattgacgaagttcacatgcttacgaatcaggcttttaacgctctcctaaaaaccatagaagagccgccgccgtatattgtttttatttttgcgacgacggaattgcacaaagttcccgcaacgataaaaagccgatgccagcagtttaatttcaggttgataccgattgagaccattcaggaaacactgaaaaaaatctgcgccgaaaagggaattacagccgaagacgacgcgttgttttggatagcgagagaatcgacaggcagtatgcgcgacgccttcaccctgtttgatcaaattgcgtcattttccgctggcagtatccgtagcgatgtaatccgcgaaaaattaggcataacaggtcttgaaaaactaaacgcccttgcggaagcctgcgccgtaaatgactcgcccgccgctttcgcgctgacggatgaaatcctaggaagcggagtcgccatcgagcaatttgtaatcgaccttgcgggcttttaccgcagtttgcttttgttaaaaaacggcataacaagggaatctcttttaggttaccgcccttccctcttttccgcaaaagcgctggaaacctacgactcaatccgtcttgaacaggcgctggatattctgcttgattgttaccgtaacattcgctattcggtctcgccccgcttcgagcttgagaccgccatttcaaaattaacatggttaagcaaatgggtatctcccacagaactcaaagaagcggttgacgacgcgcgtaatgttttgggtatcgctggaattcatgatccgattggttccgcaaaacagactgccgcaactccgcgaaatgaaatgccatcggcggctcaaagcagtcatggcggtggtattgccgcacagcctcaatcgtcaggcggacgctcgctgacagacgagttcaaccgaatgattgcaaaaaaagacaaccccgccgcgagcgccgatgaagacgacgctccaatgtgggaatcggttcgtaaacccgaaggcaagaatccgtccgaagttgataatgttctttcgatgataccgggaacggttgttaattaa

SEQ ID NO: 71812 - protein, 482 aa, Unknown
  Obtained from environmental sample
  DOMAIN (43)...(233): ATPase family associated with various cellular activities (AAA)
  misc_feature (1)..(482): Xaa is any amino acid
MAVSGYEVTASKYRPKTFDELAGQDFVVSTLKNSLKNGHIAHAYLFSGPRGCGKTSAARILARSLNCTNPNEDGPCGVCDNCQAISRGASMDVIEIDGASNNKVDEARQIIDEVLFPPQAGKYKVYIIDEVHMLTNQAFNALLKTIEEPPPYIVFIFATTELHKVPATIKSRCQQFNFRLIPIETIQETLKKICAEKGITAEDDALFWIARESTGSMRDAFTLFDQIASFSAGSIRSDVIREKLGITGLEKLNALAEACAVNDSPAAFALTDEILGSGVAIEQFVIDLAGFYRSLLLLKNGITRESLLGYRPSLFSAKALETYDSIRLEQALDILLDCYRNIRYSVSPRFELETAISKLTWLSKWVSPTELKEAVDDARNVLGIAGIHDPIGSAKQTAATPRNEMPSAAQSSHGGGIAAQPQSSGGRSLTDEFNRMIAKKDNPAASADEDDAPMWESVRKPEGKNPSEVDNVLSMIPGTVVN

SEQ ID NO: 71813 - DNA, 327 bp, Unknown
  Obtained from environmental sample
  misc_feature (1)..(327): n is a, c, g, or t
atgaatgtgaatccatttgacatattaaaaaacgcgcaaaaaatacaggagcagatgagcggttttcaggaaaaactggaaggcatttccgcgacgggagccgcaggcggcggtcttgtggagattgaccttaacgggaaactggaagttattgatgtacgcatttcccctctaacgatggaaggcggcggagatttaggaatgctgcaagatttagtaatggctgcttttacggacggaatgacaaaggtaaaggaagcggtaagcagtgaagccgccgccatgaccggaggcttgaacatacccggttttccggggggcatgtga

SEQ ID NO: 71814 - protein, 108 aa, Unknown
  Obtained from environmental sample
  DOMAIN (9)...(102): Uncharacterised BCR, YbaB family COG0718
  misc_feature (1)..(108): Xaa is any amino acid
MNVNPFDILKNAQKIQEQMSGFQEKLEGISATGAAGGGLVEIDLNGKLEVIDVRISPLTMEGGGDLGMLQDLVMAAFTDGMTKVKEAVSSEAAAMTGGLNIPGFPGGM

SEQ ID NO: 71815 - DNA, 609 bp, Unknown
  Obtained from environmental sample
  misc_feature (1)..(609): n is a, c, g, or t
gtgacacctaacgccctcgacagattaatcactttattttcaaaactgccgggcataggtaaaaaaagcgccggcagaatcacctaccacctgcttgactcaagccccgcccttgcgcaaacccttgcaaaagaactctctgaacttcatcaggcgataaggcgttgtagtgtctgcggcggctttaccgaagacgacccctgcgctgtctgttccaacacagagcgcgaccattcaatcatctgcgtagttgaaagcgcgcaagatatgcgaatcatcgaagactcgcgtgagttccccggagtctaccatgttctcggcggattaatcgcgccgctggaagggataagccccgcaaatctttccatagataaactaattaaccgtcttagcgccgacgcccccaacggtgcgcgcgtaaaggaattaatcctcgcgctgaaccccacagtcgaaggagacacaactgcgctgtatctgcaaaagacgctaaaagatttccccgtggagatttcccgtctcgcctcgggaatgcctgttggcggaaacattgaatacattgacaagcttacgctctcacggagttttaggggacgggtgaaggtgtga

SEQ ID NO: 71816 - protein, 202 aa, Unknown
  Obtained from environmental sample
  DOMAIN (79)...(177): Toprim domain
  misc_feature (1)..(202): Xaa is any amino acid
MTPNALDRLITLFSKLPGIGKKSAGRITYHLLDSSPALAQTLAKELSELHQAIRRCSVCGGFTEDDPCAVCSNTERDHSIICVVESAQDMRIIEDSREFPGVYHVLGGLIAPLEGISPANLSIDKLINRLSADAPNGARVKELILALNPTVEGDTTALYLQKTLKDFPVEISRLASGMPVGGNIEYIDKLTLSRSFRGRVKV

SEQ ID NO: 71817 - DNA, 441 bp, Unknown
  Obtained from environmental sample
  misc_feature (1)..(441): n is a, c, g, or t
atggtgggatcgggttgctcatcgttagccgactgtgctttcaaatcgtccggcgtgccgctggcgattaatttcccgcggtacaccaggccgatgcggtcgcaatattccgcttcatccataaagtgggtggtgaccatcaccgtgacgcctttctctaccatgctgttgatgtgcagccaaaattcacggcgggtgagggggtcaacgccggaagtcggttcgtcgagaaacagaatgtccggttcatgcatcagcgaacaggccagcgccagccgctgtttaaaacctaatggcagttcatcggtggcgtgggaggcgatacttttcaggccgaacgcctcgctcatgcgggagattttttcgttctgcgcccgaccgcgtaagccatacacaccagagaaaaagcgtaaattctgttcgaccgtcaggttaccgtag

SEQ ID NO: 71818 - protein, 146 aa, Unknown
  Obtained from environmental sample
  DOMAIN (74)...(112): Protein of unknown function (DUF1602)
  misc_feature (1)..(146): Xaa is any amino acid
MVGSGCSSLADCAFKSSGVPLAINFPRYTRPMRSQYSASSIKWVVTITVTPFSTMLLMCSQNSRRVRGSTPEVGSSRNRMSGSCISEQASASRCLKPNGSSSVAWEAILFRPNASLMREIFSFCARPRKPYTPEKKRKFCSTVRLP

SEQ ID NO: 71819 - DNA, 453 bp, Unknown
  Obtained from environmental sample
  misc_feature (1)..(453): n is a, c, g, or t
gtgtatggcttacgcggtcgggcgcagaacgaaaaaatctcccgcatgagcgaggcgttcggcctgaaaagtatcgcctcccacgccaccgatgaactgccattaggttttaaacagcggctggcgctggcctgttcgctgatgcatgaaccggacattctgtttctcgacgaaccgacttccggcgttgaccccctcacccgccgtgaattttggctgcacatcaacagcatggtagagaaaggcgtcacggtgatggtcaccacccactttatggatgaagcggaatattgcgaccgcatcggcctggtgtaccgcgggaaattaatcgccagcggcacgccggacgatttgaaagcacagtcggctaacgatgagcaacccgatcccaccatggagcaagcctttattcagttgatccacgactgggataaggagcatagcaatgagtaa

SEQ ID NO: 71820 - protein, 150 aa, Unknown
  Obtained from environmental sample
  DOMAIN (1)...(107): ABC transporter
  misc_feature (1)..(150): Xaa is any amino acid
MYGLRGRAQNEKISRMSEAFGLKSIASHATDELPLGFKQRLALACSLMHEPDILFLDEPTSGVDPLTRREFWLHINSMVEKGVTVMVTTHFMDEAEYCDRIGLVYRGKLIASGTPDDLKAQSANDEQPDPTMEQAFIQLIHDWDKEHSNE

SEQ ID NO: 71821 - DNA, 1134 bp, Unknown
  Obtained from environmental sample
  misc_feature (1)..(1134): n is a, c, g, or t
atgagtaacccgatcctgtcctggcgtcgcgtacgggcgctgtgcgttaaagagacgcggcagatcgttcgcgatccgagtagctggctgattgcggtagtgatcccgctgctactgctgtttatttttggttacggcattaacctcgactccagcaagctgcgggtcgggattttactggaacagcgtagcgaagcggcgctggatttcacccacaccatgaccggttcgccctacatcgacgccaccatcagcgataaccgtcaggaactgatcgccaaaatgcaggcggggaaaattcgcggtctggtggttattccggtggattttgcggaacagatggagcgcgccaacgccaccgcaccgattcaggtgatcaccgacggcagtgagccgaataccgctaactttgtacaggggtatgtcgaagggatctggcagatctggcaaatgcagcgagcggaggacaacgggcagacttttgaaccgcttattgatgtacaaacccgctactggtttaacccggcggcgattagccagcacttcattatccccggtgcggtgaccattatcatgacggtcatcggcgcgattctcacctcgctggtggtggcgcgagaatgggaacgcggcaccatggaggctctgctctctacggagattacccgcacggaactgctgctgtgtaagctgatcccttattactttctcgggatgctggcgatgttgctgtgtatgctggtgtcagtgtttattctcggcgtgccgtatcgcgggtcgctgctgattctgttttttatctccagcctgtttttactcagtaccctggggatggggctgctgatttccacgattacccgcaaccagttcaatgccgctcaggtcgccctgaacgccgcttttctgccgtcgattatgctttccggctttatttttcagatcgacagtatgcccgcggtgatccgcgcggtgacgtacattattcccgctcgttatttcgtcagcaccctgcaaagcctgttcctcgccgggaatattccagtggtgctggtggtaaacgtgctgtttttgatcgcttcggcggtgatgtttatcggcctgacgtggctgaaaaccaaacgtcggctggattag

SEQ ID NO: 71822 - protein, 377 aa, Unknown
  Obtained from environmental sample
  DOMAIN (138)...(342): ABC-2 type transporter
  misc_feature (1)..(377): Xaa is any amino acid
MSNPILSWRRVRALCVKETRQIVRDPSSWLIAVVIPLLLLFIFGYGINLDSSKLRVGILLEQRSEAALDFTHTMTGSPYIDATISDNRQELIAKMQAGKIRGLVVIPVDFAEQMERANATAPIQVITDGSEPNTANFVQGYVEGIWQIWQMQRAEDNGQTFEPLIDVQTRYWFNPAAISQHFIIPGAVTIIMTVIGAILTSLVVAREWERGTMEALLSTEITRTELLLCKLIPYYFLGMLAMLLCMLVSVFILGVPYRGSLLILFFISSLFLLSTLGMGLLISTITRNQFNAAQVALNAAFLPSIMLSGFIFQIDSMPAVIRAVTYIIPARYFVSTLQSLFLAGNIPVVLVVNVLFLIASAVMFIGLTWLKTKRRLD

SEQ ID NO: 71823 - DNA, 1107 bp, Unknown
  Obtained from environmental sample
  misc_feature (1)..(1107): n is a, c, g, or t
atgtttcatcgcttatggacgttaatccgcaaagagttgcagtcgttgctgcgcgaaccgcaaacccgcgcgattctgattttacccgtgctaattcaggtgatcctgttcccgttcgccgccacgctggaagtgactaacgccaccatcgccatctacgatgaagataacggcgagcattcggtggagctgacccaacgttttgcccgcgccagcgcctttactcatgtgctgctgctgaaaagcccacaggagatccgcccaaccatcgacacacaaaaggcgttactactggtgcgtttcccggctgacttctcgcgcaaactggataccttccagaccgcgcctttgcagttgatcctcgacgggcgtaactccaacagtgcgcaaattgccgccaactacctgcaacagatcgtcaaaaattatcagcaggagctgctggaaggaaaaccgaaacctaacaacagcgagctggtggtacgcaactggtataacccgaatctcgactacaaatggtttgtggtgccgtcactgatcgccatgatcaccactatcggcgtaatgatcgtcacttcactttccgtcgcccgcgaacgtgaacaaggtacgctcgatcagctactggtttcgccgctcaccacctggcagatcttcatcggcaaagccgtaccggcgttaattgtcgccaccttccaggccaccattgtgctggcgattggtatctgggcgtatcaaatccccttcgccggatcgctggcgctgttctactttacgatggtgatttatggtttatcgctggtgggattcggtctgttgatttcatcactctgttcaacacaacagcaggcgtttatcggcgtgtttgtctttatgatgcccgccattctcctttccggttacgtttctccggtggaaaacatgccggtatggctgcaaaacctgacgtggattaaccctattcgccactttacggacattaccaagcagatttatttgaaggatgcgagtctggatattgtgtggaatagtttgtggccgctactggtgataacggccacgacagggtcagcggcgtacgcgatgtttagacgtaaggtgatgtaa

SEQ ID NO: 71824 - protein, 368 aa, Unknown
  Obtained from environmental sample
  DOMAIN (115)...(333): ABC-2 type transporter
  misc_feature (1)..(368): Xaa is any amino acid
MFHRLWTLIRKELQSLLREPQTRAILILPVLIQVILFPFAATLEVTNATIAIYDEDNGEHSVELTQRFARASAFTHVLLLKSPQEIRPTIDTQKALLLVRFPADFSRKLDTFQTAPLQLILDGRNSNSAQIAANYLQQIVKNYQQELLEGKPKPNNSELVVRNWYNPNLDYKWFVVPSLIAMITTIGVMIVTSLSVAREREQGTLDQLLVSPLTTWQIFIGKAVPALIVATFQATIVLAIGIWAYQIPFAGSLALFYFTMVIYGLSLVGFGLLISSLCSTQQQAFIGVFVFMMPAILLSGYVSPVENMPVWLQNLTWINPIRHFTDITKQIYLKDASLDIVWNSLWPLLVITATTGSAAYAMFRRKVM

SEQ ID NO: 71825 - DNA, 411 bp, Unknown
  Obtained from environmental sample
  misc_feature (1)..(411): n is a, c, g, or t
atgaagtggcaacaacgtgttcgtgtcgcaacgggtctaagttgctggcagattatgttgcatttactggtagtggcgctgctggtggtgggctggatgagtaagactctggttcacgtcggcgtgggattatgcgcactgtattgtgtcacggtagtgatgatgctggtgtttcagcgccaccccgagcaacgctggcgtgaggtggcagacgtgctggaagagctgaccacgacctggtattttggcgcagcgctgattgtgctgtggctgttgtcccgcgttctggaaaacaactttttgctggcaattgcagggctggcaatccttgccggcccggcggtagtgtctttgctggcgaaagataagaagttacatcaccttacgtctaaacatcgcgtacgccgctga

SEQ ID NO: 71826 - protein, 136 aa, Unknown
  Obtained from environmental sample
  misc_feature (1)..(136): Xaa is any amino acid
MKWQQRVRVATGLSCWQIMLHLLVVALLVVGWMSKTLVHVGVGLCALYCVTVVMMLVFQRHPEQRWREVADVLEELTTTWYFGAALIVLWLLSRVLENNFLLAIAGLAILAGPAVVSLLAKDKKLHHLTSKHRVRR

SEQ ID NO: 71827 - DNA, 1053 bp, Unknown
  Obtained from environmental sample
  misc_feature (1)..(1053): n is a, c, g, or t
atgggaaggggaatatttaacagcttactcagtaatctccaggcagctgcagatcatttaacagataaaaggcgggaaggtttcgaccttaaatacactcttaccgatgcccttaaatgcgccttgtctgtcttctttttccagcatccgtccatgctggatttccagctcagaatgaagcagaaatggaaacgctgcaatctggaaaccatgatgagggtacaagaaataccgagcaatgtgcagattacgaccttgcttgacggaataacccctgattctttaagcggcgttttcaatgagaacttgcataccgtggatgaatggggcaacctcaaggacttccgttgcctggacggcggcgttcttttggcactggacggtgtctggtatttctcatcggaacagatacattgcgaccattgcctgcatacaaccaaagagggtgttacgacatactaccacagcgcacttgcaggggcactcgtaaagccagggaacacggcagttttgccggtagtaccggagatgataaccaatacagacggggcaggcaatgaaggaaacagtaaaaagcaggattgtgaacggaatgcggccaanagatggcttataaagcatgctgacgagtataaatggctttccccgaccattctcggcgatgatttatactcaaattacccgttttgcacagaagtattgaagtgcggctatagttttatctttacgtgcaaagaggattcccatccctggctcactgagacggttaaaaactcgtatctccaggaaacttcacggcgggaatgggacaggcgccatcaccttatctttacctaccaatggctgaacggcgttgaaatacgggataataaacagaccctcagtgtaaattatttttctctttccatatggaacgaggaagaaaagaagcaaacattttataacgaggctgtcgaatttatcatttttaagacgatttacctctcccaaattttttttaatcattttttgttaaattattttcaatattttatttgtttttatctttactga

SEQ ID NO: 71828 - protein, 350 aa, Unknown
  Obtained from environmental sample
  misc_feature (1)..(350): Xaa is any amino acid
MGRGIFNSLLSNLQAAADHLTDKRREGFDLKYTLTDALKCALSVFFFQHPSMLDFQLRMKQKWKRCNLETMMRVQEIPSNVQITTLLDGITPDSLSGVFNENLHTVDEWGNLKDFRCLDGGVLLALDGVWYFSSEQIHCDHCLHTTKEGVTTYYHSALAGALVKPGNTAVLPVVPEMITNTDGAGNEGNSKKQDCERNAAXRWLIKHADEYKWLSPTILGDDLYSNYPFCTEVLKCGYSFIFTCKEDSHPWLTETVKNSYLQETSRREWDRRHHLIFTYQWLNGVEIRDNKQTLSVNYFSLSIWNEEEKKQTFYNEAVEFIIFKTIYLSQIFFNHFLLNYFQYFICFYLY

SEQ ID NO: 71829 - DNA, 393 bp, Unknown
  Obtained from environmental sample
  misc_feature (1)..(393): n is a, c, g, or t
gtgaagctggggaataacgaagggaaaaaataccaggcgtcggcaagggattgcagccaatgcccgtttgcagataaatgcataaaatcaaagaataagaaagaggaaggggggaagagccgtccgaggacattgtatatagtaacaaggaagcatgaagaaaacttatcagaaaagatgagggataagatagacaatcctgcgtaccgggaaatatattcacggcggcagcagataatagagccagtattttcagacatcacgtattgcaagggaatgaacaggtttacgctgagagggacagaaaaagtagatgcgcaatggaaaatgtactgcatagtgcataatatagggaaatgtataagagcattaggcaagaaattaggggcatag

SEQ ID NO: 71830 - protein, 130 aa, Unknown
  Obtained from environmental sample
  misc_feature (1)..(130): Xaa is any amino acid
MKLGNNEGKKYQASARDCSQCPFADKCIKSKNKKEEGGKSRPRTLYIVTRKHEENLSEKMRDKIDNPAYREIYSRRQQIIEPVFSDITYCKGMNRFTLRGTEKVDAQWKMYCIVHNIGKCIRALGKKLGA

SEQ ID NO: 71831 - DNA, 552 bp, Unknown
  Obtained from environmental sample
  misc_feature (1)..(552): n is a, c, g, or t
atgggcgacgataaggagcggagggaacggagcatagagcggctggaaaagaggttgaaaaaactggacgagtttttaaagacggcgcagccgaagaaaggagcgtccgggaacgaagtacaatcaaacataacggacaacgagagcgcgaggataaaagggccgcacgggtatatacagggatataacggcatagcggtagcggattcccgcaatcagataatagtttgtgcggaagcgaccggttcatcggagagcggaaattttcccaagatgctggaaagccttgaagaaaacatgaaagcaattaccgggaaagaggaaccgctaaagaaatcggtgtgtttggcagacactggatttttttccgaagagaacctgcaggaagcggcagaaaggggaatagaagtaataattcccgacccgcaattcaggcagcgggatcctgattttgaacggagaaggagaaggaaaagaaatattttgacaaagaagatttcaagtatgatgaaaagaaagacgagttcaaatgcccgaacgggaaatcattaa

SEQ ID NO: 71832 - protein, 183 aa, Unknown
  Obtained from environmental sample
  misc_feature (1)..(183): Xaa is any amino acid
MGDDKERRERSIERLEKRLKKLDEFLKTAQPKKGASGNEVQSNITDNESARIKGPHGYIQGYNGIAVADSRNQIIVCAEATGSSESGNFPKMLESLEENMKAITGKEEPLKKSVCLADTGFFSEENLQEAAERGIEVIIPDPQFRQRDPDFERRRRRKRNILTKKISSMMKRKTSSNARTGNH

SEQ ID NO: 71833 - DNA, 330 bp, Unknown
  Obtained from environmental sample
  misc_feature (1)..(330): n is a, c, g, or t
atgcaaggagaggaaaagatgagaaagaaaagtttagaaaggcgtgtttacacgaaggaattcaaagccgaagcagtagcattggccgagaagcgggaaaagccaataagccagattgcaaaggatctgggggtcagggagaaactgctgtaccgctggatgcaggtgtcacgggagacggcaggaagcggtatacaaacgtttccaggccacgggcggccgcgggacgcggaactcgcccgcctgcggaaagagaacaaggctctgcgggaagcgaatgaaatcctaaaaaaagcggcggtcatcttcgcgcaaggggaaccccagtaa

SEQ ID NO: 71834 - protein, 109 aa, Unknown
  Obtained from environmental sample
  DOMAIN (14)...(96): Transposase
  misc_feature (1)..(109): Xaa is any amino acid
MQGEEKMRKKSLERRVYTKEFKAEAVALAEKREKPISQIAKDLGVREKLLYRWMQVSRETAGSGIQTFPGHGRPRDAELARLRKENKALREANEILKKAAVIFAQGEPQ

SEQ ID NO: 71835 - DNA, 720 bp, Unknown
  Obtained from environmental sample
  misc_feature (1)..(720): n is a, c, g, or t
atggcatatcaattcatacaagcaaacaaggatatatataccgttaaggagatggccgggcttttaggggttagccgcagcgcctattaccaatgggcgcgcaacggggtgtcgcagcagcgcgagacagccgatgacgaactgctgcgccttatccgggaaatagtggcgaagcaccgccgccggtacggcagcccgcggatacgccgggaactgcgcgacgtctacgggaaacgggtcagcgtgaagaaagtggcccgtttgatgcgggaaaacggcctgaacgcccgttggcgcaggacgttcatcagaacgacggactcaaaacatacccttgctgtctgtgaaaacatactcaaccgtgagtttcatgctgaaaaaggcgggcagaagtgggtttcagacattacgtatctgcgtactgtaaacggctgggtgtacctgaccgtggtgattgacctgtacgaccggaaggtcattggctgggcgctcagcaccggtatggaagccgctgataccaccatcgccgctttgagaatggcggtaaaaaaccggaagcctggggacgggttgatatttcattcggaccggggcgtccagtattgcgcccaatcctttcgtgccgtgttacgcgaaatctgtccttcggtccgccagagcatgagtcgcaagggtaattgctgggacaacgcgtgtgccgaatcctttttcaaacgctga

SEQ ID NO: 71836 - protein, 239 aa, Unknown
  Obtained from environmental sample
  DOMAIN (124)...(239): Integrase core domain
  misc_feature (1)..(239): Xaa is any amino acid
MAYQFIQANKDIYTVKEMAGLLGVSRSAYYQWARNGVSQQRETADDELLRLIREIVAKHRRRYGSPRIRRELRDVYGKRVSVKKVARLMRENGLNARWRRTFIRTTDSKHTLAVCENILNREFHAEKGGQKWVSDITYLRTVNGWVYLTVVIDLYDRKVIGWALSTGMEAADTTIAALRMAVKNRKPGDGLIFHSDRGVQYCAQSFRAVLREICPSVRQSMSRKGNCWDNACAESFFKR

SEQ ID NO: 71837 - DNA, 606 bp, Unknown
  Obtained from environmental sample
  misc_feature (1)..(606): n is a, c, g, or t
atgaaaataagaagagtcaaattcaggaaaaccccgctaaaaagaataaacgtaaaaagaacgcccgtaagagtttttacaagggaagatttaaagaaggggatctatattcttccttctttatttacctgcggaaacatgagtttcggcgtgctttcggttatcgcgtctataggcggccattttatcccggcggcgtggtttttaatcggcgcgctggtttgcgacattttcgacggcagaatcgcgaggatgaccaagacaaccagcacgttcggcatggaactggattccttaagcgatcttgtttcgttcggaatagcgcccgcgataatgatgtatatgctggtgttaaacaccatgggaaaaataggaatcgccatagccgtgctttatgtcctgtgctgcgccctgcgtctggcgcgttttaacgttcttgcgcactcgggcgaggttcacaagcacttcgtggggcttcccactcccgcttccgctggcgtgttgatttcgtttgtgttgagctaccagcttttagcgcctgaaggtttccatcttaactcaaaaacaatcccgaaaattaatggaatttatgccgacattttttaa

SEQ ID NO: 71838 - protein, 201 aa, Unknown
  Obtained from environmental sample
  DOMAIN (66)...(196): CDP-alcohol phosphatidyltransferase
  misc_feature (1)..(201): Xaa is any amino acid
MKIRRVKFRKTPLKRINVKRTPVRVFTREDLKKGIYILPSLFTCGNMSFGVLSVIASIGGHFIPAAWFLIGALVCDIFDGRIARMTKTTSTFGMELDSLSDLVSFGIAPAIMMYMLVLNTMGKIGIAIAVLYVLCCALRLARFNVLAHSGEVHKHFVGLPTPASAGVLISFVLSYQLLAPEGFHLNSKTIPKINGIYADIF

SEQ ID NO: 71839 - DNA, 636 bp, Unknown
  Obtained from environmental sample
  misc_feature (1)..(636): n is a, c, g, or t
atgtctattttaaaagaagggtatccttttattatacctgcttttatcgcgggggctgccgccgccgcggtttcctgttttattccttttccgcccggtaagatcgcctgtattgccgccggctctttattgataattttttctttcttttgtatgttctttttccgggatccaaagataaaaattacgcagagcgaagggattattctgtctccttgcaacggaaccgtactggaagtgacggaagaaaacggcgaaaaggttatccgggtgtttctttcgattttcagcgtccacttgcagagatccccggttgccggaaccgttaccgacgttaagcaccaaaagggaaaatttctggcggcgtgggatccaaaagcgcatatcgaaaacgagcagaatatttttacgatacagagcgaagacggcgtttatacagtgaggcagattgcagggcttgtcgcgcgcaggtgcgtatcatgggtaaaaaaaggcgatgttcttaagatgggagataaaataggaatgatcaaattcagctctcaggttgatcttcacctgcccaaaaaatcagtgataacggtcaagcccggcgagaaaatcagggcgggcattacggtggtagcggcaaaatga

SEQ ID NO: 71840 - protein, 211 aa, Unknown
  Obtained from environmental sample
  SIGNAL (1)...(22)
  DOMAIN (47)...(209): Phosphatidylserine decarboxylase
  misc_feature (1)..(211): Xaa is any amino acid
MSILKEGYPFIIPAFIAGAAAAAVSCFIPFPPGKIACIAAGSLLIIFSFFCMFFFRDPKIKITQSEGIILSPCNGTVLEVTEENGEKVIRVFLSIFSVHLQRSPVAGTVTDVKHQKGKFLAAWDPKAHIENEQNIFTIQSEDGVYTVRQIAGLVARRCVSWVKKGDVLKMGDKIGMIKFSSQVDLHLPKKSVITVKPGEKIRAGITVVAAK

SEQ ID NO: 71841 - DNA, 765 bp, Unknown
  Obtained from environmental sample
  misc_feature (1)..(765): n is a, c, g, or t
atgaaaaggatttttacgtttgttatttttaccttaattgccgtttttcccctgtcagctgactgggaaacttatgagataatcggccgtttattgtctcttccggggccctgcgcgcccgtaattcaggataatgcgcttacttcgcaagctgcggtgatttttacggctccgtcctctttgcggaaggtcggaatagcgtttgcccatgaagaattcgccaaagtgtactggtttaggcatcttttggtccctcaggactggactgcccctgttttactgcccggccagcttgttcccgacgataccaaggactccggaatccttttttatgtgtatgaagtgcccgaagacgtctttcagcttgaatacaggcttgttataaacggtctttggtctatagatccgcttaatccggcgtccaaaaaagacccgatatccggccttcttttttcaactgtaaccctcccgcccaggcctcttaagccaaatcccctaagaggaatgcccgatggcctgacttttatgttcagcgcgccccccggcgaaaacatcactgttgcgggcgattttaacggatgggacccttttatgtatgaactgaaggaatacccctccggcgtttacagccttactctcgctcttccgccgggcactcatcaatatgtatttttctacagaggccgccgttatgttgaccctcacaacccaaaccgaatctacgcaaaggacggcagcgccgcctctataattaccgtcccataa

SEQ ID NO: 71842 - protein, 254 aa, Unknown
  Obtained from environmental sample
  SIGNAL (1)...(20)
  misc_feature (1)..(254): Xaa is any amino acid
MKRIFTFVIFTLIAVFPLSADWETYEIIGRLLSLPGPCAPVIQDNALTSQAAVIFTAPSSLRKVGIAFAHEEFAKVYWFRHLLVPQDWTAPVLLPGQLVPDDTKDSGILFYVYEVPEDVFQLEYRLVINGLWSIDPLNPASKKDPISGLLFSTVTLPPRPLKPNPLRGMPDGLTFMFSAPPGENITVAGDFNGWDPFMYELKEYPSGVYSLTLALPPGTHQYVFFYRGRRYVDPHNPNRIYAKDGSAASIITVP

SEQ ID NO: 71843 - DNA, 3690 bp, Unknown
  Obtained from environmental sample
  misc_feature (1)..(3690): n is a, c, g, or t
atgccttcattaagcgcgctcgccgagtttagaaactctttcagcaacatcgctaacgagaaggaagatctcgcatcaaaggatttgccctatgacgctatcgaccttcccgacatggaagcccctccctttgaacagccctcgcgcaacgccgctcctcccgatgcgcccgatttatccgatgacgccgccgcagcagacggcgaaggcgcgggcgattttgattttaacgcttttatcaattctgtcccggcggacactcctcccccgcccgatgaggccgccggcgaaataaattttgacgacattttaggcaataccggcgatcaaacgcaagagactccgtccaccgatgatttcttaaattccttgggaggcgaaactccgacggatggaaccggagacgatacttccgccacagatgatttcttaaattcgttaggaggcgaggctccgacggacggaacgtccgttgatggaaccggagacgatacttccgccacagatgatttcttaaattctttgggaggcgatgctgcagaggaaacaccttcggaagaaactttcggagacgactctttccccgccgatgattttttaaactcacagggagtcgataccacatcggacacaacatccgaggacgaatctttccctgccggagatcttcctgactttcccgaaacagaaacaccgacatcagaagatgatttttctatacccggggatttattgtccggacttggcgatgaaattgaatcggctccttcggattatccgcccgaagaaactccgtctgaggacgaagtttccgcggactttatgtccgacgaacccttcgatgaaactccatccgaagtttttacgaccgatgaatttccaaccgatggtttcccgtcagaagatgtcgaagctgaggaaagcattgatcttggcggcgaaaggcaagacggcactctaagtacggaaagcgattcaaaaggctttatgccgtcaacggatgacgatgagacgccggggtcagttgacattgacgacgcgtttaccgctaacgcttctgaaccggaatcttcttttgatgatggacttgatctgagcggggctgctcctgcggccggggacgaaccgcccgaagagcatatcgatttgggcggcgaatctccggatcttgatctgcctgatatggactttagcaccgaaccgtccgcttctgatgattttggttttgaaggagaagagcaatcagaagattccggtcttcccgacgaatccgaatttacgcaaacggaacctgacggcctggatttgccggagtttgacattggagaaccgccggcgggagattcgccggaaagctcaggcgccgatgattctggcggcttgccggacatggatcttggcggagacttttcttcagatcaaattgatcttgaaaacgaacctcaatccgaagctgaatccggagggggaactcccgccgccgatttcggcgacgattcatttgaccttcccggccttgatgatctttttgataagaaaacagaagcggcgcctaaacccgcgcccaaaaaaagctttttcaaaagaaaaaaagaacaagttgttgaggaagaagaacatgagcccggagattcggacgaaataaatctttcccaatccgatcttgataaattactcgctactattgcaagttatccgttgaatctgcgcgttgcctgccaggaattaatcgcggaacaggtaattttaccgcagcagctgtcaaaacttatccggatgctgattcggggcgcccctgtaaaagaaatggcggagtttgccgggcagattctgggcaaagaaattgtaatcccaagaagttatgaaaagagcacgggcgcggaatgggaagcggaaaaatccagttttgcgtatattttcgtacataatttcctgcctgtattaagaataatcgccattaccctggcgatgctgggatcaataggttatctcagttatagatttatttatctgccgttaaaagcggaatcgctttacaagcgcggttacgagcgtataggcgcgggcgaattccagcgggcgaacgaactgttccatgaagcgtttgtataccaccgcaagaaaaaatggttctactcctacgcggaaggcttcagggatcagcggcgttatctgttagctgaaaataaatacgacgagcttttaaggtattatccccgtgataaaaaaggcgttttggattacgccaatctggaaacgtattatatcttaaattacgagaaagcgaacaagctgcttcagaacgagcttcttgattacgcgcccaatgattttgacgggcttcttgcggcgggggacaatttcctggcgtgggcggattccgatccggtaaaatacaatgacaagtatgaagacgcgcgtttctcttacgcgagaatcctgcaggactacggctggacagggccggttttggaaaggatgctgatatacttcatgcatacagacaacctgaaagaaactctcaatttaagggcatggttcgaaaacaacagaaaaaaatacaagctgaccacccctacccttgcggagcttggcggctatcttttggacaagcagcttgaaaaagttaagggagtgcccaacgcctatgtcgaaagcatagaaagcgtccgcgacatgcttctgcaggcagtcagggaagatccgtatctgccggagccgcattatcatcttgcccgttattataacaatcttggaaacctccacgaagagcggctgactcttgaaaacgcgatacgcgcctacgaccttgtaaaaatggaatcggtgcgccgccgccttaaccgcgtggatacccactaccgttacgcgaacttacttatcaacaacaaagaatttttcagcgccgaggaacagcttgtaaggggcatagagctttatgaagaattcattaacagaaacttaatcgcgccgagtcctcagcttggaaaactttacgcggggatgggcgatttggaatattttgtaaaatcgggcaacatacaggcagcgcttaacaactatcttaacgccgaaaaatacggctacgctccgcctgaaattcaataccgcataggcgcctcgtattatcagcaggaaaggtgggggaacgcgcttgactatcttttcaaagcctcgtcgaaccttcccatgaacaggcgcattcttttcgctcttggaaacaccacttacaaacggggcgactattttgccgcgcagggctactacaaccgcctactggacatacttgaaaaccagcgcataaggctgcccgttcttctgcccaatgacaccgcccaattccttgagctcggcgaacgcctgatgatggcgcgtaacaacgccggcgtcgtgaacgaaatgctcgcgaagcagacgggaaagcgcgattaccgctcgaaagcgcttgctctttacgccgattccgcccgctcatgggacgcaataacccgtaatcctacatccatgacaaggatgaccataggcgacactcccggcgcgcccggaatcaatcttggctatcttaacgccaacaacgctctgcatcccgcgtcgaattatactcctgagatttttatccgcatagataaagacgtgtccgaaccgtcgaaatgggaagaacttgccccattcggcggacttattgactaa

SEQ ID NO: 71844 - protein, 1229 aa, Unknown
  Obtained from environmental sample
  misc_feature (1)..(1229): Xaa is any amino acid
MPSLSALAEFRNSFSNIANEKEDLASKDLPYDAIDLPDMEAPPFEQPSRNAAPPDAPDLSDDAAAADGEGAGDFDFNAFINSVPADTPPPPDEAAGEINFDDILGNTGDQTQETPSTDDFLNSLGGETPTDGTGDDTSATDDFLNSLGGEAPTDGTSVDGTGDDTSATDDFLNSLGGDAAEETPSEETFGDDSFPADDFLNSQGVDTTSDTTSEDESFPAGDLPDFPETETPTSEDDFSIPGDLLSGLGDEIESAPSDYPPEETPSEDEVSADFMSDEPFDETPSEVFTTDEFPTDGFPSEDVEAEESIDLGGERQDGTLSTESDSKGFMPSTDDDETPGSVDIDDAFTANASEPESSFDDGLDLSGAAPAAGDEPPEEHIDLGGESPDLDLPDMDFSTEPSASDDFGFEGEEQSEDSGLPDESEFTQTEPDGLDLPEFDIGEPPAGDSPESSGADDSGGLPDMDLGGDFSSDQIDLENEPQSEAESGGGTPAADFGDDSFDLPGLDDLFDKKTEAAPKPAPKKSFFKRKKEQVVEEEEHEPGDSDEINLSQSDLDKLLATIASYPLNLRVACQELIAEQVILPQQLSKLIRMLIRGAPVKEMAEFAGQILGKEIVIPRSYEKSTGAEWEAEKSSFAYIFVHNFLPVLRIIAITLAMLGSIGYLSYRFIYLPLKAESLYKRGYERIGAGEFQRANELFHEAFVYHRKKKWFYSYAEGFRDQRRYLLAENKYDELLRYYPRDKKGVLDYANLETYYILNYEKANKLLQNELLDYAPNDFDGLLAAGDNFLAWADSDPVKYNDKYEDARFSYARILQDYGWTGPVLERMLIYFMHTDNLKETLNLRAWFENNRKKYKLTTPTLAELGGYLLDKQLEKVKGVPNAYVESIESVRDMLLQAVREDPYLPEPHYHLARYYNNLGNLHEERLTLENAIRAYDLVKMESVRRRLNRVDTHYRYANLLINNKEFFSAEEQLVRGIELYEEFINRNLIAPSPQLGKLYAGMGDLEYFVKSGNIQAALNNYLNAEKYGYAPPEIQYRIGASYYQQERWGNALDYLFKASSNLPMNRRILFALGNTTYKRGDYFAAQGYYNRLLDILENQRIRLPVLLPNDTAQFLELGERLMMARNNAGVVNEMLAKQTGKRDYRSKALALYADSARSWDAITRNPTSMTRMTIGDTPGAPGINLGYLNANNALHPASNYTPEIFIRIDKDVSEPSKWEELAPFGGLID

SEQ ID NO: 71845 - DNA, 618 bp, Unknown
  Obtained from environmental sample
  misc_feature (1)..(618): n is a, c, g, or t
atgtccggcaagccgccagaatcatcggcgcctgagctttccggcgaatctcccgccggcggttctccaatgtcaaactccggcaaatccaggccgtcaggttccgtttgcgtaaattcggattcgtcgggaagaccggaatcttctgattgctcttctccttcaaaaccaaaatcatcagaagcggacggttcggtgctaaagtccatatcaggcagatcaagatccggagattcgccgcccaaatcgatatgctcttcgggcggttcgtccccggccgcaggagcagccccgctcagatcaagtccatcatcaaaagaagattccggttcagaagcgttagcggtaaacgcgtcgtcaatgtcaactgaccccggcgtctcatcgtcatccgttgacggcataaagccttttgaatcgctttccgtacttagagtgccgtcttgcctttcgccgccaagatcaatgctttcctcagcttcgacatcttctgacgggaaaccatcggttggaaattcatcggtcgtaaaaacttcggatggagtttcatcgaagggttcgtcggacataaagtccgcggaaacttcgtcctcagacggagtttcttcgggcggataa

SEQ ID NO: 71846 - protein, 205 aa, Unknown
  Obtained from environmental sample
  misc_feature (1)..(205): Xaa is any amino acid
MSGKPPESSAPELSGESPAGGSPMSNSGKSRPSGSVCVNSDSSGRPESSDCSSPSKPKSSEADGSVLKSISGRSRSGDSPPKSICSSGGSSPAAGAAPLRSSPSSKEDSGSEALAVNASSMSTDPGVSSSSVDGIKPFESLSVLRVPSCLSPPRSMLSSASTSSDGKPSVGNSSVVKTSDGVSSKGSSDIKSAETSSSDGVSSGG

SEQ ID NO: 71847 - DNA, 936 bp, Unknown
  Obtained from environmental sample
  misc_feature (1)..(936): n is a, c, g, or t
atgaaaagaataatatttttattaacactaaccgcggcggttctgtttacacttggctgcagcaaaagatcccgggaagcgggagagtgggaaaataacagttttaccgttacgcatggactcgcttatgatgaagcgccgtctccaagggcggcaaaggctacgatggctgccgctgaggcggaatatccaagggaagaggcggatggcggcggctctccttcggcaaatttccccgaagcggaacgcaagctgatcaagcgcgcaaacgtaagtatcagagtggaaaatcttgccgccgccgatgacgctgttacggcaatgatgaaaaagtacgacgcttacgcggcgtccacgaatgttgaggaaaacacacactattattcactgcgcgtccccgcgaattattacgacatttttctcgccgaaacaggcggcatgggaaggcttataaaccgctacgaaaacacggaagacgtaactctgcgttactacgatcttgaagggcggctcgctacaaaaaaagaactgttaaaaacttttcaggcctatcttggaaaggcaaaaaccattgaggaaattctttcggtggaagcccgcatatcggatcttcaatacgatattgagggaaccggaatacaattccgcaaccttgccaacaagatagattacgctacaattgacctaaacttgttcggccccgtaagctccgttccgtaccgcggcttaaccttaggcgaacgcgttaaacagcttttcggcggcttcggcggatttttatccgcggtcgcgatgttgttaatcggcgttgtcgtttacggaattccggttcttctccttttggggttgtttatcctggtcttcttcggcagaatcgggcttgcgaagaaactttgggggctggttaaatcaaagcaatctgagactaaagactga

SEQ ID NO: 71848 - protein, 311 aa, Unknown
  Obtained from environmental sample
  SIGNAL (1)...(19)
  misc_feature (1)..(311): Xaa is any amino acid
MKRIIFLLTLTAAVLFTLGCSKRSREAGEWENNSFTVTHGLAYDEAPSPRAAKATMAAAEAEYPREEADGGGSPSANFPEAERKLIKRANVSIRVENLAAADDAVTAMMKKYDAYAASTNVEENTHYYSLRVPANYYDIFLAETGGMGRLINRYENTEDVTLRYYDLEGRLATKKELLKTFQAYLGKAKTIEEILSVEARISDLQYDIEGTGIQFRNLANKIDYATIDLNLFGPVSSVPYRGLTLGERVKQLFGGFGGFLSAVAMLLIGVVVYGIPVLLLLGLFILVFFGRIGLAKKLWGLVKSKQSETKD

SEQ ID NO: 71849 - DNA, 1119 bp, Unknown
  Obtained from environmental sample
  misc_feature (1)..(1119): n is a, c, g, or t
atgttgtttggcaaaaccgttaaggtgccgacggtggtaaaccccgtttatgtcggggacaggccggcggaagacatggatttatcgattatcacttacgacgccgcgtcggctgaatatatcaaattatcaagtattgatgaaatagcaaaatatcagaacggctcaaaaaaaatatgggtaaatatcagcggcttaaaaaacatcggttccataaaagcgctgggaaagttatacgacattcaccccttaaccatagaagatattttgaatacagagcagcagccgaaagttgaaatatttgaaaattaccgatttttatcgataaagacaatacagcatgaaaaagaatttcatcatgagcttgccaagagaagaaaacgatttttctttttccaaaaagaagaagaagaaatgctgcaggaatttgtaatcgatcaagtcagcgtaatcatcatgaaaaatactttgattacttttcaggaaatagaaggcgattcatttgacgcgataagggagaaaattttaacaggcgcgggagaaatccgcacaatggaaatggatttcctgtcttatgaaattatcgacgcggttgtcgatgaatattttctcgcgttaaaccatcttgaggacgatgttgaggattttgaagaccgtgcgacaaaaacaagcgatgatatgtttcttcaggaactgcaggacaccaagagatatcttttgaaaataaaaagggcgatttcccccctaaaagacaatgttaccgtaattttaaaacagaacaaatttttcttaacagacgagttaaaaccgtttacgcagaacttgctggaaaatttacataacgccgaaaattccgttgagcattaccgcgaatggctttcgaacataatggatgtaaacctgtcggttttatcgcatcagaccaataaagtaatgaaagtgctggcggttatctcgactatttttatccccttaacttttgtcgccggaatatacggcatgaattttgattttatgccggaattaagacaaccctggggctacccgcttgtgttaagctgcatgtgttttatcgccgtgtctatgattgttatctttaaaacacggcgatggttttag

SEQ ID NO: 71850 - protein, 372 aa, Unknown
  Obtained from environmental sample
  DOMAIN (55)...(372): CorA-like Mg2+ transporter protein
  misc_feature (1)..(372): Xaa is any amino acid
MLFGKTVKVPTVVNPVYVGDRPAEDMDLSIITYDAASAEYIKLSSIDEIAKYQNGSKKIWVNISGLKNIGSIKALGKLYDIHPLTIEDILNTEQQPKVEIFENYRFLSIKTIQHEKEFHHELAKRRKRFFFFQKEEEEMLQEFVIDQVSVIIMKNTLITFQEIEGDSFDAIREKILTGAGEIRTMEMDFLSYEIIDAVVDEYFLALNHLEDDVEDFEDRATKTSDDMFLQELQDTKRYLLKIKRAISPLKDNVTVILKQNKFFLTDELKPFTQNLLENLHNAENSVEHYREWLSNIMDVNLSVLSHQTNKVMKVLAVISTIFIPLTFVAGIYGMNFDFMPELRQPWGYPLVLSCMCFIAVSMIVIFKTRRWF

SEQ ID NO: 71851 - DNA, 3063 bp, Unknown
  Obtained from environmental sample
  misc_feature (1)..(3063): n is a, c, g, or t
ttggaaagaattaaaagaaaaaatacgataatatattatagaatacaaatgataatagcaaaatctgtccatataacagtttttattaagattttctctattttgctgttgttttcggcaataactccgctttttggaggcggcagacaggatgccgatcttacaaaagcggacgcgcttataaaaaataaaaaatatgatgaagccataccggtattaactaactacgcaaaacgaaacccggataaatttgatcttgcgcagcaacgtctgcgaaaaatttaccaattacgggaagagtttaaccgtaccgccgacgaattaattaatacccttttaaacgagcctgaaaacgcggaaaaaatccttaatctttcaaaacagcttaactctcttgaaaacgataacagtccccttcttgtaaactttgtatccagaactcaggaaatcgcgcaatttaacgccaacagaaacaggttagctgacatttttaacagaggcagagaattattaaacaagggcgattgcacgagcgctatccgagtttatgccgaaggcatggactttatgcgcgatgatttcttttccgcagactacggggaaaatattgagagcgaagtcaaacgggaaaccgaaagaatctatacgataatcgccgcttttcagcagacaagttctcagatgggaacaatttccgcggaactggttcgcgtaattaatacgggaaatttagccggaacaggcgaaatcataaacagattgacgccggcaatggacagatttatcgcgctaaaacaggatctttattcggctgacatgattctttccagatctcttaacagaatcaggaaaagagacccgaatataggcgatcaaaaccatgtttcatttataagaacaagcattaacggacgaggcgaaaataacatacaagaaggaatgttaggcgctttcgacgtatactggaataatacgatagggtctgttatcaacgccgttacgcaaaatcttcaaagaatgaattcggcgtcgcttgccgcgtttaacggcaaagattatacaaccgccgtctcttccgttaacagaacagccgattttgtaaatctttctccacagttctttgaaaagcatagacaatttttcgcaggcggaagaccgcaaaccttaaatctttacgggagtaatattctacgcgaggatattccgctgtatctggaaataagggcgttaagcgaagccaataacattcttgcgcaggcggcaaataccggtatacgcctgaatattgacagaacatcactgacccgctggcgcgagggcgcgcttaacgcatctcaggcgttaaacggcgaacagcagacaaggaatacaattaccggaacacagacatctttaaacaacatcagaacaaacgccaatcgaataaatactgaaataaattcctaccacaatactacatacataacaaacgcgttagccgcggtagatactctttattcccaattagttacggaagaacggcagtcggctcaaagatattataacatagcgtatggcggtcttcagaataacattaccgccagaaaagaatcattggaaaaaagcagaaaattccttgaaggcgatacccgtacaagcaacggcgttgtaactgtttttcgttatcccgccgaagcgcttgcggaaattacttctatgctctccgcgttagctgtagatttacagaacgggaataactttatagggcaatttaaaaatgaaccgcagactatttccgccgatccggagatttcaagtacaagcgcaaaatgtcaggaagccgtaaatgagttaaccgctatccgcgcgcaagctcttccggtagcggactctgcccgcaacagatcaacacaggctgaagcgtttaggcaggagggagagcggttgttcagggaagcgcagaccgctttccaaaggcaaaactacgataccgcgcgcgaacgaattcaaagagcttccgacagactcagcgattcgcttgaaatacaggaatcggcgtctctgcggcaaatgcgggatactcaactggtcaatcttggtcatcaaattgcggctgccgagaatgaggcgataatcgcggaagtgcgtaatatgctaaacaacgcgcgtactttgtactttaacggcaatttccagcaggcggaagacacgctgacaagagcaagaaaccgctggcgcaccaataaccccgacgataacgaagaaataatttattggctgggcttaattcgcaccgcgatgtcggcaagctccgcgcgcgtaattccgccgaccgctcctctttacgcggaaatgagccagcttttaagtcaggcgcaaaagaaatttgacgaaggcgcgcgttatatcaatcaaggtcagcgcgcggcgggaatcgcgaaatttgacgaagcgcgccagctaacaagacaagtaagattgatatttccggttaatcaggaagcgggtattcttgatcttaggatagaacaatttttagaccctgcggcatttaacgcttcgtttgaacaacgtttaagaacagccatagccggaacaaaacagcgttccatcgaggcgtttgccgatcttcagaacttggctgaaataaatcccagataccaaaatataaaggctattctaactcaggcggagatagacatgggataccgtcctcagccgcctaatccggcgaatatcgcgcgctcaagagacctgacagcttcagccagacgcattttagaaaataacacgacggcgcaatacgaagtcgcccttgcgcagttaaacgaagccattacattgaatcccaacaatacggaagcgccgcaggttagagacagactgctcagcagaatgagcgttccggggagcatcgttctttcaagcgaggacgaagccgattatcaacgcgcgttacgcgaattaaacgcgggcaacaatcttgcggcgctttcgcttgtcgagcgtcttatgcaaaatcccagaaaccgtaatataacaaaactggtggaattacagcgaaggatacaatcggtattatga

SEQ ID NO: 71852 - protein, 1020 aa, Unknown
  Obtained from environmental sample
  misc_feature (1)..(1020): Xaa is any amino acid
MERIKRKNTIIYYRIQMIIAKSVHITVFIKIFSILLLFSAITPLFGGGRQDADLTKADALIKNKKYDEAIPVLTNYAKRNPDKFDLAQQRLRKIYQLREEFNRTADELINTLLNEPENAEKILNLSKQLNSLENDNSPLLVNFVSRTQEIAQFNANRNRLADIFNRGRELLNKGDCTSAIRVYAEGMDFMRDDFFSADYGENIESEVKRETERIYTIIAAFQQTSSQMGTISAELVRVINTGNLAGTGEIINRLTPAMDRFIALKQDLYSADMILSRSLNRIRKRDPNIGDQNHVSFIRTSINGRGENNIQEGMLGAFDVYWNNTIGSVINAVTQNLQRMNSASLAAFNGKDYTTAVSSVNRTADFVNLSPQFFEKHRQFFAGGRPQTLNLYGSNILREDIPLYLEIRALSEANNILAQAANTGIRLNIDRTSLTRWREGALNASQALNGEQQTRNTITGTQTSLNNIRTNANRINTEINSYHNTTYITNALAAVDTLYSQLVTEERQSAQRYYNIAYGGLQNNITARKESLEKSRKFLEGDTRTSNGVVTVFRYPAEALAEITSMLSALAVDLQNGNNFIGQFKNEPQTISADPEISSTSAKCQEAVNELTAIRAQALPVADSARNRSTQAEAFRQEGERLFREAQTAFQRQNYDTARERIQRASDRLSDSLEIQESASLRQMRDTQLVNLGHQIAAAENEAIIAEVRNMLNNARTLYFNGNFQQAEDTLTRARNRWRTNNPDDNEEIIYWLGLIRTAMSASSARVIPPTAPLYAEMSQLLSQAQKKFDEGARYINQGQRAAGIAKFDEARQLTRQVRLIFPVNQEAGILDLRIEQFLDPAAFNASFEQRLRTAIAGTKQRSIEAFADLQNLAEINPRYQNIKAILTQAEIDMGYRPQPPNPANIARSRDLTASARRILENNTTAQYEVALAQLNEAITLNPNNTEAPQVRDRLLSRMSVPGSIVLSSEDEADYQRALRELNAGNNLAALSLVERLMQNPRNRNITKLVELQRRIQSVL

SEQ ID NO: 71853 - DNA, 951 bp, Unknown
  Obtained from environmental sample
  misc_feature (1)..(951): n is a, c, g, or t
atgcttcaggatgaaagctattttgaaagccacgacgggactaaactttacctttatcgctggtcgcctgaacaaggatgtaaggcagttctgcatatagttcacggaatgggggagcatgcgcttcgttaccgccgccttgcggaaaaattaactcaatcgggaatagaagtgtgggcggcggatcagcgcggacacggtaaaacagctaatcccgatgttaacgatataggaaagggagggctgttaggacactgcggcgacaataacagcatagcctgtgtaaccgccgatgttcgcgcccttaatattgaaatacataaaaaaataccgaatgtcccgctgtttcttttggggcattcatggggatcgttcatagtacaaaattatatggaatattcatataatttaataattgacggatgtattttatcaggcacaaagggaccgggtaattttatgataacagcaggggttccgttaatgatgcttatagctgcgttgaaaggaccgcgcagaggttcccgctttgccatgacattggctgacggagcgtataacaaaccgtttaagccaaaccgcaccgcgtttgactggcttagccgcgatgaagaggaagtagataaatatgtaaatgacccattatgcggatttctgtgttcctccgggttctacagagatcttgtaaaattattgtataacattcaccgttcggacgcgttggcaaggataaaccgttctttaccggtgtatgtattttcgggaagcgccgatccggtgggcgatatgagtaaaagtcctaccactctggttgaagcgtaccggaaattagggataaatgactgcgagttcgtgctgtatccgggagccaggcatgagacattaaacgaaactaaccgtgaagaagtaatggataatcttctttcatggataaacaagcattgtgaatga

SEQ ID NO: 71854 - protein, 316 aa, Unknown
  Obtained from environmental sample
  DOMAIN (56)...(306): alpha/beta hydrolase fold
  misc_feature (1)..(316): Xaa is any amino acid
MLQDESYFESHDGTKLYLYRWSPEQGCKAVLHIVHGMGEHALRYRRLAEKLTQSGIEVWAADQRGHGKTANPDVNDIGKGGLLGHCGDNNSIACVTADVRALNIEIHKKIPNVPLFLLGHSWGSFIVQNYMEYSYNLIIDGCILSGTKGPGNFMITAGVPLMMLIAALKGPRRGSRFAMTLADGAYNKPFKPNRTAFDWLSRDEEEVDKYVNDPLCGFLCSSGFYRDLVKLLYNIHRSDALARINRSLPVYVFSGSADPVGDMSKSPTTLVEAYRKLGINDCEFVLYPGARHETLNETNREEVMDNLLSWINKHCE

SEQ ID NO: 71855 - DNA, 1278 bp, Unknown
  Obtained from environmental sample
  misc_feature (1)..(1278): n is a, c, g, or t
atgttttcctgcgtaaaagcggagactgtaactaaaaaaaataaagcgcaatatttcgggaaaaatctcattattttaagtatactacatttaatggcagttggagatgtatacaaattacaccttgaaagtatcgcgccggggggagacgcgttaggtcgtcttgatgggaagcctgtttttgtagaaagcggtgcgcctaatgagactgtctgctgtcgtattgtacaggagcataatacttgggcaaaagctgaattgcttgaaattattgaaccctctccttcgcgtataccgcccgtttgtgctttttacggtctttgcggcggttgtaatcttcaacatattgattatgaaacccagcttgcggcaaaaaccgatattttaaaagattcgctcgcaaggattggcggattacaaccgccggagactgaagttttttcctcaccgcaatgggagtaccggaacagaatgcagtttcattgtttaaggcaaaaagcaaaagacagcgacatacatcagtacgctcttatggggcgcaaaagcggagaattaatcgagattaacgattgccctgtggcggttgcgggaataagagaacttttaatgatccaaaaagataaaaaaggcgaagaaaataaattgccaatacctgttgaaaaagacaggtttacggttttttccaaagacggcgttttgttaagcgagggcggcaggcagaagggaaaaattacattgcttgaaaaagaaatttctcttgacgcaggtttgtttttccagagcaactgcttcatgctggaaaaattaattacgcagcttcgcgcaattgccgcagacgcggataacagtaagcctatggcggatttatactgcggcgttggtacattctctttttatttaaaagaaagttttccaaaaataattcttgcggaggaaaacaaaaccgccgtaagtcttgcgagggaaaatttaagggggactgagactgagttttttgcagttcgcgacacaaattggcagaacgatctattgcgccgaaaagatacgtttggttttgccgttgttgatccgccgcgggcggggcttgcgccgaaaacggcggcggctctggcgcgtgagggaccgcctgttttagcttatgtttcctgcgacgccgcttctcttgcccgcgacagtaaaatattgacaaatggcggatataaaataaaaaaacttatcttttttgacttctatccgcagacagcccacatagaaagcatggcggtttttaaaagataa

SEQ ID NO: 71856 - protein, 425 aa, Unknown
  Obtained from environmental sample
  DOMAIN (31)...(89): TRAM domain
  misc_feature (1)..(425): Xaa is any amino acid
MFSCVKAETVTKKNKAQYFGKNLIILSILHLMAVGDVYKLHLESIAPGGDALGRLDGKPVFVESGAPNETVCCRIVQEHNTWAKAELLEIIEPSPSRIPPVCAFYGLCGGCNLQHIDYETQLAAKTDILKDSLARIGGLQPPETEVFSSPQWEYRNRMQFHCLRQKAKDSDIHQYALMGRKSGELIEINDCPVAVAGIRELLMIQKDKKGEENKLPIPVEKDRFTVFSKDGVLLSEGGRQKGKITLLEKEISLDAGLFFQSNCFMLEKLITQLRAIAADADNSKPMADLYCGVGTFSFYLKESFPKIILAEENKTAVSLARENLRGTETEFFAVRDTNWQNDLLRRKDTFGFAVVDPPRAGLAPKTAAALAREGPPVLAYVSCDAASLARDSKILTNGGYKIKKLIFFDFYPQTAHIESMAVFKR

SEQ ID NO: 71857 - DNA, 1740 bp, Unknown
  Obtained from environmental sample
  misc_feature (1)..(1740): n is a, c, g, or t
ttgtatacatctccaactgccattaaatgtagtatacttaaaataatgagatttttcccgaaatattgcgctttattttttttagttacagtctccgcttttacgcaggaaaacatccgcgaacaggggcttataacaagcgacccgttctggcggcaggctttaggtgggacggtgctgtctttgccttccgttcaggcgcagtccgcggtcgtcgcccttgacggcggaaacatcagagcgtactctacggcgggaaaaccattatggaactattcggcaaggggaaaaataagcccctatgttacgcgctcaagagaagggtcgacttatttttcaagaactaacggcatattaatagcggttaaccgcgcgggacgcgaattgtggcggcgcgatatgggttccgctctttgcgccggagtggttacaggctgggatggcagattgtttgtccccgttgaaaaaaagattctttgtttcacagcgtcgggaactcttttatggtcaataaaatttgaagctccttttttcatcgcgccgaaaattgatcacggcggcggaatttatttcgcgttaaacaataacgaagtttaccatatagatcattttgggagagccgataaatgggtgctttccagcgcaccggctgttcttgtttcgacgccgcagatgctaatacttgctctttataaagacggaacaatagaagcggtaaacgcgcctaaaagcgaaaatcagtcccctttggataaaaataattctcttgcgtttccaaaacttccttccgctccgattaccgcaatagaaagaggcggcaatattgccgtcgccatgaatgacggcagagtagcgtttatatcagcggacaaaaaggaaatagtctggttaggcgacagccacataagagagatgattagggcaggcggaagaccggaaccggaagcggaaatgctttttgatgaaagaggaatttatgttctaagtaagaacggagcctctggttttaccattgacggcagaagactttggtttacaaacctgcaaaacgccgccgcaattcccgctttcggaaatgacggagtattatattccggaggaaaagactggatactttattcatataaaattgaagatcgcattatgacgggaaaaaacgcgctatacggaccgataccggaaggcaattacggaatgggacgccctctggttcccgataaatttgatattcctttaagcgaagaagaaaaaaaaattaaacttaaagaaatcgccaaaggaataaattcaggcatagtcggagtaaatgaacatgaatggacgtcttttttactgtcagtttccgccggacaggatcatattactatgagaattgacgctataaaacttttaggaaaaatcggttcgcaggaaacagttccctggctgttaaatatttttaaaaatgataacgagccgttaataagatcggaagccgtaaaagcaatcggaagcataggcgttgatccgcaaggaatagcgatgcaaacatttttgcagtcaataacttatgacggcagtgtaaaggatgatcaaattatgacatcaatagcctcggcaacaggcgctttgtgccgtttttcgggaccgccgttaagcgaaatgggcatcaaaatattgaatctgttatgcacccgagatcagccgccgccggcaagaagacaggcaaagaaagaacttgattctcttaacggaggataa

SEQ ID NO: 71858 - protein, 579 aa, Unknown
  Obtained from environmental sample
  misc_feature (1)..(579): Xaa is any amino acid
MYTSPTAIKCSILKIMRFFPKYCALFFLVTVSAFTQENIREQGLITSDPFWRQALGGTVLSLPSVQAQSAVVALDGGNIRAYSTAGKPLWNYSARGKISPYVTRSREGSTYFSRTNGILIAVNRAGRELWRRDMGSALCAGVVTGWDGRLFVPVEKKILCFTASGTLLWSIKFEAPFFIAPKIDHGGGIYFALNNNEVYHIDHFGRADKWVLSSAPAVLVSTPQMLILALYKDGTIEAVNAPKSENQSPLDKNNSLAFPKLPSAPITAIERGGNIAVAMNDGRVAFISADKKEIVWLGDSHIREMIRAGGRPEPEAEMLFDERGIYVLSKNGASGFTIDGRRLWFTNLQNAAAIPAFGNDGVLYSGGKDWILYSYKIEDRIMTGKNALYGPIPEGNYGMGRPLVPDKFDIPLSEEEKKIKLKEIAKGINSGIVGVNEHEWTSFLLSVSAGQDHITMRIDAIKLLGKIGSQETVPWLLNIFKNDNEPLIRSEAVKAIGSIGVDPQGIAMQTFLQSITYDGSVKDDQIMTSIASATGALCRFSGPPLSEMGIKILNLLCTRDQPPPARRQAKKELDSLNGG

SEQ ID NO: 71859 - DNA, 417 bp, Unknown
  Obtained from environmental sample
  misc_feature (1)..(417): n is a, c, g, or t
ttggtagattcggttcttatagacgcaggtcctcttatcgccctttttgactcaagcgataaacaccatcgcaagatacggtcttttctgaaagacaacccattcaggtatgtaagtacgctcgccgtctttacggaagtttcccatatgctggattttaacaccgcggtacagcgggatttttacgagtgggtaatgtacaagggagtaattatcagcgacataaatcaaaatgatttattgcgtcttatagaactgaccgataaatactccagtctgcccatggattttgccgacgccactcttgtcattaccgcggaaaaaaccggtatccgtcagatcatcagtatagacagggactttgatatttacaggcttcccggcaaagaacagattcaaaatatttttaaggcatga

SEQ ID NO: 71860 - protein, 138 aa, Unknown
  Obtained from environmental sample
  misc_feature (1)..(138): Xaa is any amino acid
MVDSVLIDAGPLIALFDSSDKHHRKIRSFLKDNPFRYVSTLAVFTEVSHMLDFNTAVQRDFYEWVMYKGVIISDINQNDLLRLIELTDKYSSLPMDFADATLVITAEKTGIRQIISIDRDFDIYRLPGKEQIQNIFKA

SEQ ID NO: 71861 - DNA, 318 bp, Unknown
  Obtained from environmental sample
  misc_feature (1)..(318): n is a, c, g, or t
ttgactcttcttcatatcagtattacaatttgtaatatgagagcaaattacgttattaacgaggttattaccactgccaggcttcccatagaaataaggaataagctccttgcccttgccagatttaaaaacatgacaaaatccgaggttatcattaaatctctggaaatgtactacgaccgcgaggaaggtgacatagactctttttccctgggagagaaggtttttggtaaatacggttccggagacggcgaccgctctgttacctacaaggaacggattaagaaaaaactttcagacaggatgaatgcttggtag

SEQ ID NO: 71862 - protein, 105 aa, Unknown; identical to SEQ ID NO: 22724
  Obtained from environmental sample
  misc_feature (1)..(105): Xaa is any amino acid

SEQ ID NO: 71863 - DNA, 1248 bp, Unknown
  Obtained from environmental sample
  misc_feature (1)..(1248): n is a, c, g, or t
atggcagttaaacgaaatgatgattgccgaacgcggtcttggagtaaaggcggaaaaatgagcgagaatacaacgacagttttgttaaacggaaatgaatttaaactgataggaacggcgcatgtttcgcgcgaaagcattgaagaagtgcgaaatattatctgcgaagaaaaacccgacatggtatgcgtggagcttgatcaagcgcggtataattcaatcacacagaatgataactgggaaaaacttaacttgacaaaagttttaaaagaaggcaagggatttcttttaattgcgaatcttgttttggcaagttttcagcgccgtcttggaaacgaactgggagtaaaacccggcgaagaaatgaaaacggcggtgcaagccgctcaggaaataggattatcctacagtctttgcgaccgtgaggtgcaagcaactctcagcagagcgtgggcgcgctgcggcttttggagtaaggcgaaattattagcctctcttttggcgagcgcttttacgacggagaaactgagtgaaaaagaaatagaagaattaaaaaacaagaacgagcttgacggcatgatgagcgaactttcaaattatttgccggctgttaaagaagttttaattgatgaaagagaccgctatcttgccgtgaaaatatgggcgtctgtatcgcagaaaacaaatcaaagagttatcgccgtaatgggcgcgggtcacattcatgggattaaaacgtatctggaaaaattaagcaaaggcgaagaatcaaccgatgtaagcgaattggataaaattcctccggcgggtttcttttccaaaatagcgcgttttattatccctgccgccgttgtcgcccttgtagccgccggtttttaccgcgccggagcggggatgggtctttccatgatgcttcagtgggtattgtggaacggctctcttgcggctttaggcgcaatcatcgcccttggtcatccgcttgcgattattgtctcttttctgggcgcgccgattacttcgctgaatccgtttatcggtgttggtattttatccggtattgttcaagcggcgttaaaaaaaccgcgagtttccgacgttgagcaaatgacggaagacgcgacaagtattaaaggcgtttaccgtaataggattacaagggcgttactggtgtttttcttttcaagtttgggcagttctatcggcacttttatatcaatacccgcgattatagggaaattttcaggataa

SEQ ID NO: 71864 - protein, 415 aa, Unknown
  Obtained from environmental sample
  DOMAIN (29)...(257): TraB family
  misc_feature (1)..(415): Xaa is any amino acid
MAVKRNDDCRTRSWSKGGKMSENTTTVLLNGNEFKLIGTAHVSRESIEEVRNIICEEKPDMVCVELDQARYNSITQNDNWEKLNLTKVLKEGKGFLLIANLVLASFQRRLGNELGVKPGEEMKTAVQAAQEIGLSYSLCDREVQATLSRAWARCGFWSKAKLLASLLASAFTTEKLSEKEIEELKNKNELDGMMSELSNYLPAVKEVLIDERDRYLAVKIWASVSQKTNQRVIAVMGAGHIHGIKTYLEKLSKGEESTDVSELDKIPPAGFFSKIARFIIPAAVVALVAAGFYRAGAGMGLSMMLQWVLWNGSLAALGAIIALGHPLAIIVSFLGAPITSLNPFIGVGILSGIVQAALKKPRVSDVEQMTEDATSIKGVYRNRITRALLVFFFSSLGSSIGTFISIPAIIGKFSG

SEQ ID NO: 71865 - DNA, 792 bp, Unknown
  Obtained from environmental sample
  misc_feature (1)..(792): n is a, c, g, or t
ttgtataaagattgggcaagacctcttcatgaaaggccaagactttataaaagcgcggggttttataatgacgcgcttgatgatttaaaagcgcttcttgcgcttgaacctgataattatatggtgcttgtggattgcggagagcttttaatggaaatgaatcaaaaacaggaagcgttaaaacattttaacaaagccatagaagttgaaccgaatgtttttatggcgtatatttacagcgccgcgataaaagacgaattacgcgaatataaaggcgctgaaaatgattataccattttagtaaaactaaaaccggattattattttggatatgaggcgcttggcgttcttaaaatgagaaataaacagtgggcggaggcaagagacgcttttcttaacgcctacaaacaagcaccaaaagaatattcttacgcgcttttagccgcaataaactggatgcgcgccggcaaacaaaccgatccaaaacagtttttagctcaggtgctgcgtacggttccaagagatacggcggaatacgctgtgttaaggctttatcacgatcttacaggcgatgtcaatgcggttacgattgtagaaagcgagaaaaacatttatacaaagtcgcgaatgcttttttatcttgcttctttttatgacatcaggggaaacaaaacattggcggacaaatattatttaatgggaaaaactcttaatacgacaggttcggtagaatggcagttaaacgaaatgatgattgccgaacgcggtcttggagtaaaggcggaaaaatga

SEQ ID NO: 71866 - protein, 263 aa, Unknown
  Obtained from environmental sample
  DOMAIN (40)...(73): Tetratricopeptide repeat
  misc_feature (1)..(263): Xaa is any amino acid
MYKDWARPLHERPRLYKSAGFYNDALDDLKALLALEPDNYMVLVDCGELLMEMNQKQEALKHFNKAIEVEPNVFMAYIYSAAIKDELREYKGAENDYTILVKLKPDYYFGYEALGVLKMRNKQWAEARDAFLNAYKQAPKEYSYALLAAINWMRAGKQTDPKQFLAQVLRTVPRDTAEYAVLRLYHDLTGDVNAVTIVESEKNIYTKSRMLFYLASFYDIRGNKTLADKYYLMGKTLNTTGSVEWQLNEMMIAERGLGVKAEK

SEQ ID NO: 71867 - DNA, 582 bp, Unknown
  Obtained from environmental sample
  misc_feature (1)..(582): n is a, c, g, or t
atgaaaatagattttattggaagcagtttatttacccggggattattgttgttttttcttattttccggctttctccctctatttggtgtcaacaaaacgatacagaagccattcttgcgagagttgccgatcatcttgcccgcagggaatattctttagccctggacttgtttgacaaactgccgccggaacgccgggaaaccgctgatattctcattatgcgggcgacaattttgaacgccgccggcagaaccgcagacgctaaaaaaatagcgaacgccattgcagccgccgacagtaaaaatacggaagccctgatgatattagccgacgccgccgcggttgaaggcaaagaaaaagacaggcgggcgtttcttgacaaagtaatcgcgttggagccgaacaatgtaagagcgctgaatgatttggcgaatataaacattaaaaaccaaaatttgcgtattgcggcgaattattttgacagagtcctatctgtagaaccccgagacggagaggctttggtaggcagagcgggtatttaccgttatacaagagagccaaagaacgctgaacggctttaa

SEQ ID NO: 71868 - protein, 193 aa, Unknown
  Obtained from environmental sample
  misc_feature (1)..(193): Xaa is any amino acid
MKIDFIGSSLFTRGLLLFFLIFRLSPSIWCQQNDTEAILARVADHLARREYSLALDLFDKLPPERRETADILIMRATILNAAGRTADAKKIANAIAAADSKNTEALMILADAAAVEGKEKDRRAFLDKVIALEPNNVRALNDLANINIKNQNLRIAANYFDRVLSVEPRDGEALVGRAGIYRYTREPKNAERL

SEQ ID NO: 71869 - DNA, 1461 bp, Unknown
  Obtained from environmental sample
  misc_feature (1)..(1461): n is a, c, g, or t
atgtcaatcagcggcaactcggttaattttatattctccgaaggaacaaaaatttctttcagttcaattgattcagcaggaggacaggaattgcatatcgacgcggaattttcgtcaaatatttccgaagtgacaataccgatttctccgcgccgttcttcccttatcagagattcaggacagcttggaattatgtacggcggcatgcggtatgtcttcagcagtttaggacaagaactggaaaaaggatgccttacgctttcaaaggacagctcgtttatctcatatcgatccagaggcaaacaaagagcgtttgatcctgcggattacataatcgcgcaggtgggtaattacgatagtattattagaaactggcaaaccgaaaattataacctctggaatcaaaacgcggcgagtttacaatatgaggatgatataatcgcatacagcgtgcaatcgctttcacgcggtaattatgtaaacgcgttagcgtcaatctcagacaatttcagaaacagttcaagacaaacttatagatcgtcggtatttgtcggaggaacggcaaacgcgtatcgttctttatcttcttatgaaaatgaaaaaaacattttgattaaccgtttaatcggagaaaaatcgttaaacattttaaaggaagaacacatacttgattttcttttcacaagaaataatcttgtccttgtaaatgaagtaatcaatataattaataacgccggtccagatatgttagtttcagattattgcccgggtttattggaagtttattatgatttaaaaaaatggagaaccgatccaactaatcctattgaacatctgacaagcaaaatgctttcgcttatttcagataatttaaatcgtgataccgaaaaagacgccgtatacgcgtcgagcagcgaaagtaataattccgaatacagcatgaggcttgggaaggctcttgtttactgggcggattcaactcagaataccgaatgggctgggataggacgctccttaattttatcggcagccgcgaacgggaacgcgggaagactccacaatattttaaatcccgcagagtattatccaagagcgtcattgcttacaaacgaggggatttgggcgtggactgtttctccgaacacaagagcatattattccgcagacggtaatcttaacgtctccgtttcatttccggcaaacatggcgcattttatgataatccgcggagtacgtcctttcttaagaattcagattcacggcatggactggagaacagacagtcaatttgaacgttatgattcatctggctggatatactttcctgatgagcaaactcttatgctaaaaatcaggcaccgtacaactacggaaaacgtcagaataatctacaggatagcggcggcggaacaatcggcagttgccgaagaaagtgttgaagcgggagcggttattgaataa

SEQ ID NO: 71870 - protein, 486 aa, Unknown
  Obtained from environmental sample
  misc_feature (1)..(486): Xaa is any amino acid
MSISGNSVNFIFSEGTKISFSSIDSAGGQELHIDAEFSSNISEVTIPISPRRSSLIRDSGQLGIMYGGMRYVFSSLGQELEKGCLTLSKDSSFISYRSRGKQRAFDPADYIIAQVGNYDSIIRNWQTENYNLWNQNAASLQYEDDIIAYSVQSLSRGNYVNALASISDNFRNSSRQTYRSSVFVGGTANAYRSLSSYENEKNILINRLIGEKSLNILKEEHILDFLFTRNNLVLVNEVINIINNAGPDMLVSDYCPGLLEVYYDLKKWRTDPTNPIEHLTSKMLSLISDNLNRDTEKDAVYASSSESNNSEYSMRLGKALVYWADSTQNTEWAGIGRSLILSAAANGNAGRLHNILNPAEYYPRASLLTNEGIWAWTVSPNTRAYYSADGNLNVSVSFPANMAHFMIIRGVRPFLRIQIHGMDWRTDSQFERYDSSGWIYFPDEQTLMLKIRHRTTTENVRIIYRIAAAEQSAVAEESVEAGAVIE

SEQ ID NO: 71871 - DNA, 1743 bp, Unknown
  Obtained from environmental sample
  misc_feature (1)..(1743): n is a, c, g, or t
atgaaagaaaaaatagtggaagcgctatcgatactgctgaaaggttgtctctctgaatccgaaatcgaaaaaaacattgccgttccgccgtctgacgatttaggcgactatgcttttccatgcttcgctttgtccaaggttctgaagaagaatccggttgcgatagcggctgatttgaaggagaggatagggattatcgacggcgggagagttcgggttgaatcatccggcgggtacctcaacttttttgttgacaagcgggaattggcggcgtccgttattgaaacctactcaaacgccgttccggcgagtatggcggattgcggcgttgccgttataggcgcgacggaggggcggccgtcgcgggtggtggtggagttcgcctcgccgaataccaataagcctctgcacctcggccacctgcgcaatatgtccataggcgacagcgccgcccgtatcctctcgttctgcgggtgcgaggtctctaagaccagcataaacaacgaccgcggcgtccacatctgcaaatctatgctggcctacaagcgttgcggaaacggcgccacgcctgagggcgaggggatcaagtccgaccgcttcgtaggggattactacgtgatgttcaacaataaatccgccgccgacccatcctggggcgacgatgcccagaagatgctcaaagagtgggaagagggcgagccggataccgtcgaactctggaagaggatgaataagtgggcgctcgacggcttcagggagacatacaagttgttcggaatatcattcgataaagagtattacgagagcgacatttacaagagcggcaaggagattgtggctgaggggctggacaggggcatcttttacaaacgggaagacggcgcggttgtaatcaaccttgaggaggaaaaactcggcgacaaggtgctgctccgccctgacggcacgagcgtttacatcgtccaagacctctatcttgctctgctcaaagataaagagtttaagtacgacagatcgctctacgtggtgggcaacgaacaggactaccatttcgcggtgctgatagccattttcaagaggctgggctacgacgtggccgagaagatgaagcacctgtcctacggcatggtggagttacccgaggggaagatgaagtcccgcgaggggacggtggtggacgcggacgacctgatacgtgagacgaaggagttggcgaaacgggaggtggtcgagaggtacgacgtatcggaggcggaagcggagggaaggagtctgcgtatcgcgttggcggcggtcaagtaccagttgctcaaggtcgatatagccaagaatatggtttttgaccctaagaaggcgatcagctttgagggcgacaccggcccgtatttgctttacagctacgcgagggcgtcgtcgatattgagaaaagcgggcggggtaggggagcggattgataaatcgcaactgccggaaagttttgaggctgcggagattaagttgttgaagaagatagcgttctttccggaagcggcgggctttgcttataatcgtttatcgccgtccgttatagcgaattacgcctttgacctggcgcaactgttcaacgagttctaccacgcgagtcaggtgatagggagcggcggagcggtggaaaaattcagggtgaatctcgtggcggcgttcaggtctgtgatgcgtgggtgccttggattgatgggtattgaggctattgaggagatgtaa

SEQ ID NO: 71872 - protein, 580 aa, Unknown
  Obtained from environmental sample
  DOMAIN (1)...(84): Arginyl tRNA synthetase N terminal domain
  misc_feature (1)..(580): Xaa is any amino acid
MKEKIVEALSILLKGCLSESEIEKNIAVPPSDDLGDYAFPCFALSKVLKKNPVAIAADLKERIGIIDGGRVRVESSGGYLNFFVDKRELAASVIETYSNAVPASMADCGVAVIGATEGRPSRVVVEFASPNTNKPLHLGHLRNMSIGDSAARILSFCGCEVSKTSINNDRGVHICKSMLAYKRCGNGATPEGEGIKSDRFVGDYYVMFNNKSAADPSWGDDAQKMLKEWEEGEPDTVELWKRMNKWALDGFRETYKLFGISFDKEYYESDIYKSGKEIVAEGLDRGIFYKREDGAVVINLEEEKLGDKVLLRPDGTSVYIVQDLYLALLKDKEFKYDRSLYVVGNEQDYHFAVLIAIFKRLGYDVAEKMKHLSYGMVELPEGKMKSREGTVVDADDLIRETKELAKREVVERYDVSEAEAEGRSLRIALAAVKYQLLKVDIAKNMVFDPKKAISFEGDTGPYLLYSYARASSILRKAGGVGERIDKSQLPESFEAAEIKLLKKIAFFPEAAGFAYNRLSPSVIANYAFDLAQLFNEFYHASQVIGSGGAVEKFRVNLVAAFRSVMRGCLGLMGIEAIEEM

SEQ ID NO: 71873 - DNA, 945 bp, Unknown
  Obtained from environmental sample
  misc_feature (1)..(945): n is a, c, g, or t
atgatacaaggctctgcaacgcctacctccataaagatattggtgaacaacaacgaggtcactgtaacttatgatgaaacggcgcagacacttaaggtaggcaacgaggtggtctctcccggcaagagtataacgcttgaagacggcaccgttttaacccacatgaccacccttgccgaacccaataaagcgacaggcaaaatattcatagacacaggccgcattaaattagccgaagatataaccgcagacgccggcggaaatgtcaaaaatgtagaatctttcaccttagcgaaagacagcatcctcgccgccggcacaaagttaaacacagaagtgccgcaagccggcaccaagcttatggccggcaccgtgattaccgccccaagcaagttctatcccggcagcgtgaccttagcccacgagggcaagcgccttcaattctccgccaattccaacgtctcgcttgaggcccgctactacgagtccgccgtgagcgagagtttgaccttcatcttctcacgttacgaaccggcatcaagcaatctaaaggattccgtaatggcccagataggttcaaacagcggtcaattggcattcatctccatgggcgacatgcgtgccgaggcgttgaacgtacacaacgtggacatcagcaccaagtggggcgcggcgacggccatagagaccgttaacaacgccctgcagcgcgtctcccaccagcgagcgctccttggtgctatgcagaaccgcctggaacacacaataaagaatctcgacacctccgccgagaacctgcaagccgccgagagccgcatacgcgacgtcgatatggcgaaagagatcatggagtacacaaaggacagcatcctcatgcagtcgtctcaagcgatgctggcgcaagcgaaccagatcccgcagagcgtgctacagttgttgcgttaa

SEQ ID NO: 71874 - protein, 314 aa, Unknown
  Obtained from environmental sample
  DOMAIN (221)...(292): Bacterial flagellin C-terminus
  misc_feature (1)..(314): Xaa is any amino acid
MIQGSATPTSIKILVNNNEVTVTYDETAQTLKVGNEVVSPGKSITLEDGTVLTHMTTLAEPNKATGKIFIDTGRIKLAEDITADAGGNVKNVESFTLAKDSILAAGTKLNTEVPQAGTKLMAGTVITAPSKFYPGSVTLAHEGKRLQFSANSNVSLEARYYESAVSESLTFIFSRYEPASSNLKDSVMAQIGSNSGQLAFISMGDMRAEALNVHNVDISTKWGAATAIETVNNALQRVSHQRALLGAMQNRLEHTIKNLDTSAENLQAAESRIRDVDMAKEIMEYTKDSILMQSSQAMLAQANQIPQSVLQLLR

SEQ ID NO: 71875 - DNA, 1383 bp, Unknown
  Obtained from environmental sample
  misc_feature (1)..(1383): n is a, c, g, or t
atgagcgagctggttttagtgctggatttcggcgggcagtataaagagcttatcgccagctctgtgaggagcttgtccgtatactcgcaaataatgccgggcagtacgccggctgccgagatcaagcgattaaagccgattggcataatactgacaggcgggccgaaaagcgtttacctagacgattcgcccaaatgcgatcctaaaattttctcgctgggcattcctgtcctcggtatctgctacggtttgcacctgatctgccacacgctcggtggcaaagtcgcgcccggtgaccagggcgaatacgggcgagtcaaagtaatgccttctggaagttcatcaaaattatttagtaaagaacctttcatagcccttatgagccacagggatgccgcggcacggctgcctgaaggtttccgcgctacggcaaaaaccgctgcttgcatagccgcctgcgagaacaacacgaaaaagatctacgctgtgcagttccaccctgaaacaaagcacaccgagggcgggcgcgaaatactccgtaaatttttatataatgtctgcaaaacctcaggcgattataaacttgacgattacatagaaacgcaaatagccaaaatacgaaaaaaagttggcgataaaaaagccctgctcgctttgtccggtggggtcgactcgtccgtttgcgcgagccttttgtctttggctattccggggcagctgacctgcatctttgtagatcacggctttatgcgcttgaacgagggcgacgaaatagagcgtgttttttcaaagcgggatctccgatttgtccgcgtcaatgcacaaaaacgtttcctttctaaagtgaaaagcgtgacggagcctgagaaaaagcgcaagatcatcggcgaagaatttatccgcgtgtttgaggaagaatccgcgaaattaggcgacatcccttttctggcacaggggactatatacccggatgtcgttgagtccggcggtaaatacggagcggttatcaaaagccatcacaatgtaggcgggcttcctgaagggctaaagtttacaggaatcctggaaccgttgtctgggctttttaaggacgaagtacgcgtgcttggcagaaagctaaaacttcccgcctcgcttgttaaccgccagccgtttccgggccccgggctcgctatccgcgtcatgggcgaggttacggaggaaaagctcctgactctgcgaaaggcggacgcgattctccgggaagaactggatggtcttaaaaacaggcccgatcagtatttttgcgctcttacaaatacatgctctgtgggcgttaaaggggacgacagaacttatgattacgttatcgccgtcagggccgaaaaacagacgactttatga

SEQ ID NO: 71876 - protein, 460 aa, Unknown
  Obtained from environmental sample
  DOMAIN (4)...(168): Peptidase C26
  misc_feature (1)..(460): Xaa is any amino acid
MSELVLVLDFGGQYKELIASSVRSLSVYSQIMPGSTPAAEIKRLKPIGIILTGGPKSVYLDDSPKCDPKIFSLGIPVLGICYGLHLICHTLGGKVAPGDQGEYGRVKVMPSGSSSKLFSKEPFIALMSHRDAAARLPEGFRATAKTAACIAACENNTKKIYAVQFHPETKHTEGGREILRKFLYNVCKTSGDYKLDDYIETQIAKIRKKVGDKKALLALSGGVDSSVCASLLSLAIPGQLTCIFVDHGFMRLNEGDEIERVFSKRDLRFVRVNAQKRFLSKVKSVTEPEKKRKIIGEEFIRVFEEESAKLGDIPFLAQGTIYPDVVESGGKYGAVIKSHHNVGGLPEGLKFTGILEPLSGLFKDEVRVLGRKLKLPASLVNRQPFPGPGLAIRVMGEVTEEKLLTLRKADAILREELDGLKNRPDQYFCALTNTCSVGVKGDDRTYDYVIAVRAEKQTTL

SEQ ID NO: 71877 - DNA, 3651 bp, Unknown
  Obtained from environmental sample
  misc_feature (1)..(3651): n is a, c, g, or t
atggtcataggatcgggaccgattgtaatcgggcaggcggcggaatttgactacgcggggacgcaggcgtgccgcgtactgcggcaggacagaatagaaatagttcttgtaaactccaaccccgccaccataatgacagacagcaacatagcggacaaaatatacattgagccgcttacccttaccaccgtcaagcgtattatcgaaaaagaacgccccgacagcattttatccggtctcggcgggcagacgggactcactctctgtatgcaattagcccgcgacggtttccttgaaaaaatgaacgtgcgccttttaggttcctcgcccgaaacaattgacaaggctgaggacagaaaaatgttcaaggaaaccatgcaaagcagcggtcagcctgtaattccttcggtaattgccaccgatgtgcagaccgccgttaagttcgccgatgaaatcggctatcccgtgattgtacgccccgctttcacgctgggcggctcaggcggcggcattgcgtctaacgaagcgcagcttaaggaaattgcctctaacgggatttccttgtcgccgataaatcagattttagtggaaaaatccattgctggctggaaagaaatagaatttgaagtaatgcgcgaccgcgtgggaaacgtaattaccgtttgttcaatggaaaactttgatcctgtcggcatacacacaggcgacagcatagttatcgctccctgcgttacgttagctgacaaagagtaccaaatgctccgctccgccgcgttgaatatcatctgcgcgctcggcgttgagggcggctgtaacgtccaattcgcccttcaccccgacagctttgagtacgcggttatcgaagtaaacccgcgcgtttcgcgttcttcggctctcgcaagcaaggcgacaggctaccccatcgcaaaagtcgcgacaaaaatcgccatcggctacactctggacgaaattgtaaacgccgttacgggcaacaccttcgccgcctttgagccgactcttgactacgttgcggtaaaatttcccaaatggccctttgacaaatttgtatacgcgcaaaaggagcttggcacgcagatgaaagcgacaggcgaagtgatggcgattgccgacacttttgaggaagctcttgtaaaagccgtgcgcggcgcggaaatcgggcttaacagtcttaacctgccccgcctgtccgcaaaatcagacgaagaaatccgctcccttttgaacacggtcaccgacgagcggttgtttattctgtacgaggcaatcaagcgcggaatcagcgtggacgaattatacaacatcacaaaagtagaccgatggtttttgcatggactggttaatattgcgaatgataacgcgcaattaaaaccttttgtttataaaatggtagatacctgcggcggcgaatttgaggcaaaaacgccttatttctactctattcagaatgggactgaaaacgaagccctgccgtttatccaaaaaagcaataaacaacggattgtcgtgcttggttccggaccaatccgcattggacagggaatcgaattcgattacgcctgcgttcattgcgtatggacgcttaaaagcatggggtacgaagtcatcgtaattaacaataatcccgaaaccgtatccaccgactttgacaccgccgacagactctattttgagccgctgtgcattgacgatgtaatgagcataatcgacattgaaaaaccgttaggtgtcatcgtggcgttcggcggtggcacggcaattaaacttacaaaaaaactccacgagcgcggcgtaaatataatcggcacttcggcggacagcatagacatctgcgaggacagacagcggtttgacgtactgcttgaacaactgcaaattaaacgccccaaggggttcggcattatgacggaagcggacgcgctggacgccgccgaaaagttaggcttccccgtgcttatgcgcccatcctatgtgctgggcggacaaaatatgatcatcgcgttctcgccggatgacatccgcgagtatatggaaattattctgcgctcaaaacaggaaaacccggtgctgatagacaaataccttgaaggtatggaaattgaagttgacgctctctgcgacggagaaaacgtatttattcccggcataatggaacacattgaacgcacgggcatacattccggagacagtatcgccgtgtatccgtcgcttaacatagacgacgcgttatcggaaaaaatatttgacgttacgcaaaaattatgcatggcgttaaaagttaaagggcttgtcaatattcaatatgttttttatgagaacgatatttatgttatcgaagtaaatccccgcgcttctcgcaccgttccttacctgagcaaggttacgggaattcccatgtgcgagcttgccacaaaaataagcgcgggacagacgctttcatctttagggtatacatccggctttggaagaataccgccctatattgcggtaaaagtgccggttttctcttttgaaaaacttgccggagtggatacgcatttgggacccgaaatgaaatccacaggggaagttttaggcattgggaaaaattttgaagaatcgctttttaagggacttgtcgccgcgggctacaaaatgaaaagaaagggcggcgtgcttataaccgtgcgcgacggcgacaaggcggaaattaccgacgtggcgaaaaaattcacgcagtgcggattctcgctccacgcaacgcgcggaaccgcccgctatcttgcggaaaaaggtttggacgttcaacctatcgataaaataacagataacaaggaagtcaacacggaaactcttttagcgggcggaaaaataagttatataatctccacctcggaaaaaggcagagaccccgcgttagacgacgtaaaacttcgcagaaaagcctgctccttgggcgtgccttgcttaacatcgatagatacggcaaacgcgcttgcggacggtttgctttccggttacagcgaaataagcacggaactaatcgacattaaccgcctcagagaagaacgcattaaacttgcgtttacaaaaatgcatacttgcggcaatgattttatttactttaactgctttgagacggaaatagagtcgcctgaatcgctttccgtgtttttgtccgacaggcacgccggagtaggcggcgacggcgttgtgcttatattgccgtccgataccgcggacgcgaaaatgcgtatgttcaatgttgacggcagcgagggcagtataagcggaaacgcgattcgctgcgtcgcaaaatatttgttcgataacaatattgtaaaaaaacacgatatgaaaattgagacaaaaagcggtataaaaaaactttatctttccacgcgtaacggcgtagtatcgtccgtaaaagttgatatgggacgcgcggaattgcgccccgaaaaaatccccgtcaaattaacgggtgaaaatgtaattaacagaaaagtaatcattgacaacgaaggatatgaaattacctgcgtatctatgggcaacccccacgccgtagtattctgcgataaaattgacaatcttgatttaagcaaaataggtcccctgttgaaaacgatccgctgtttcccgaccgcgtaa

SEQ ID NO: 71878 - protein, 1216 aa, Unknown
  Obtained from environmental sample
  DOMAIN (617)...(791): ATP-grasp domain
  misc_feature (1)..(1216): Xaa is any amino acid
MVIGSGPIVIGQAAEFDYAGTQACRVLRQDRIEIVLVNSNPATIMTDSNIADKIYIEPLTLTTVKRIIEKERPDSILSGLGGQTGLTLCMQLARDGFLEKMNVRLLGSSPETIDKAEDRKMFKETMQSSGQPVIPSVIATDVQTAVKFADEIGYPVIVRPAFTLGGSGGGIASNEAQLKEIASNGISLSPINQILVEKSIAGWKEIEFEVMRDRVGNVITVCSMENFDPVGIHTGDSIVIAPCVTLADKEYQMLRSAALNIICALGVEGGCNVQFALHPDSFEYAVIEVNPRVSRSSALASKATGYPIAKVATKIAIGYTLDEIVNAVTGNTFAAFEPTLDYVAVKFPKWPFDKFVYAQKELGTQMKATGEVMAIADTFEEALVKAVRGAEIGLNSLNLPRLSAKSDEEIRSLLNTVTDERLFILYEAIKRGISVDELYNITKVDRWFLHGLVNIANDNAQLKPFVYKMVDTCGGEFEAKTPYFYSIQNGTENEALPFIQKSNKQRIVVLGSGPIRIGQGIEFDYACVHCVWTLKSMGYEVIVINNNPETVSTDFDTADRLYFEPLCIDDVMSIIDIEKPLGVIVAFGGGTAIKLTKKLHERGVNIIGTSADSIDICEDRQRFDVLLEQLQIKRPKGFGIMTEADALDAAEKLGFPVLMRPSYVLGGQNMIIAFSPDDIREYMEIILRSKQENPVLIDKYLEGMEIEVDALCDGENVFIPGIMEHIERTGIHSGDSIAVYPSLNIDDALSEKIFDVTQKLCMALKVKGLVNIQYVFYENDIYVIEVNPRASRTVPYLSKVTGIPMCELATKISAGQTLSSLGYTSGFGRIPPYIAVKVPVFSFEKLAGVDTHLGPEMKSTGEVLGIGKNFEESLFKGLVAAGYKMKRKGGVLITVRDGDKAEITDVAKKFTQCGFSLHATRGTARYLAEKGLDVQPIDKITDNKEVNTETLLAGGKISYIISTSEKGRDPALDDVKLRRKACSLGVPCLTSIDTANALADGLLSGYSEISTELIDINRLREERIKLAFTKMHTCGNDFIYFNCFETEIESPESLSVFLSDRHAGVGGDGVVLILPSDTADAKMRMFNVDGSEGSISGNAIRCVAKYLFDNNIVKKHDMKIETKSGIKKLYLSTRNGVVSSVKVDMGRAELRPEKIPVKLTGENVINRKVIIDNEGYEITCVSMGNPHAVVFCDKIDNLDLSKIGPLLKTIRCFPTA

SEQ ID NO: 71879 - DNA, 327 bp, Unknown
  Obtained from environmental sample
  misc_feature (1)..(327): n is a, c, g, or t
atggtttccttgaacatttttctgtcctcagccttgtcaattgtttcgggcgaggaacctaaaaggcgcacgttcattttttcaaggaaaccgtcgcgggctaattgcatacagagagtgagtcccgtctgcccgccgagaccggataaaatgctgtcggggcgttctttttcgataatacgcttgacggtggtaagggtaagcggctcaatgtatattttgtccgctatgttgctgtctgtcattatggtggcggggttggagtttacaagaactatttctattctgtcctgccgcagtacgcggcacgcctgcgtccccgcgtag

SEQ ID NO: 71880 - protein, 108 aa, Unknown
  Obtained from environmental sample
  SIGNAL (1)...(17)
  misc_feature (1)..(108): Xaa is any amino acid
MVSLNIFLSSALSIVSGEEPKRRTFIFSRKPSRANCIQRVSPVCPPRPDKMLSGRSFSIIRLTVVRVSGSMYILSAMLLSVIMVAGLEFTRTISILSCRSTRHACVPA

SEQ ID NO: 71881 - DNA, 675 bp, Unknown
  Obtained from environmental sample
  misc_feature (1)..(675): n is a, c, g, or t
gtgctgtatgaaggcgtagagacacaccgacaactggatatttgcatttcctcaaagggaaggttctatcagggatttttaatagccgaccctcaacattctatgcgcgatacggtcattaactcatttgttttttccgtattaatcgaaactgcatatgtggcaatacaaagcaaggcgatcaattcggaaaacgtgaaaaattccctggacgcccaggttgagcgtttcttgcgtgaaaatccgtttgatcgcgaaaaaattcgcgacgatgcctatcttataaagctcctggataaattaccggaagtgaaaaggattttcctatgcagccgacaaggcgttcagctttccaataatattgaacggaattcagaagatactgaacgccgcgattatataaacaagaactggtcatggcgcggatatttccatgaaagtctgacagcttttgccatgggcaaaaaaagctgcctgtcaagtatctatcgtgattttacgacaaaagaacagatgttcacttattattacgcgataagcgatgatgtatttttgttcgttgatattgctgaaaatacggaaggggatagaggcctatgcccgctgataagatataaaaaaaatcatggtcataggatcgggaccgattgtaatcgggcaggcggcggaatttga

SEQ ID NO: 71882 - protein, 224 aa, Unknown
  Obtained from environmental sample
  misc_feature (1)..(224): Xaa is any amino acid
MLYEGVETHRQLDICISSKGRFYQGFLIADPQHSMRDTVINSFVFSVLIETAYVAIQSKAINSENVKNSLDAQVERFLRENPFDREKIRDDAYLIKLLDKLPEVKRIFLCSRQGVQLSNNIERNSEDTERRDYINKNWSWRGYFHESLTAFAMGKKSCLSSIYRDFTTKEQMFTYYYAISDDVFLFVDIAENTEGDRGLCPLIRYKKNHGHRIGTDCNRAGGGI

SEQ ID NO: 71883 - DNA, 2226 bp, Unknown
  Obtained from environmental sample
  misc_feature (1)..(2226): n is a, c, g, or t
gtggattttaccctgcctctgacagggtgtcccgaagaatctgatgataataacaacagcgtaacaacaaccgtaccagttacaaatgtaacgcttaatcaaaaaagtatcaccctgactataggaggtacagcaaatcttaccgcaacggttgcacccgataacgcaacaaacaaagcggtaacatggaaatcagatgatactgcaaaggcgactgtttcaaatggtgttgttaccgccgttgccaaaggtacggcgataataaccgttactacagcggacggaggaagaaccgatacttgcgccgttaccgtaacagacggcagcagcggaacagacgataaaacgcccataactaccgccaatattaccattcccattcctgtaaaaggcgaaactccggcaacagaagtaagcggaacatcggagcgttttaccaccggaacagtaacatgggagcctaatgataacacgttccaaccaagtacggtatacaccgccacagtaacgctgacggcaaataacggtcatacattcatcggattaacttcagagcatactaccataaacggagaacaggcaacgacaacaaacaacaccggcgaaacgataacgctgtcgtacacatttaatgaaacggcggcaattaacgctaaaaatgtttcgaacatatccgttaaaacacagccaaaactgaattacacccacggagatgcgcttgatctgtctttactaaatgtaacgctgacctacgatgacggcacaaccgaagatgtcgtatcctctgctttttccgcacattctctaacaacaacccccgcaaacaataccccattggaacgttccagttatgacaatcaacctgttaccattaattacggcagcagtaaaacggctaccaccaacaatttaaccgtcaacgcaaaatccctatccgacaccgacgccattaccgttgaaccgtcttcaattacggcggtgatttataccggcaatgaattaaaaccggcgattacttacgtaaagcacactgttccaacaggcactataagaacattagatttgaacactgattacaagctggaatacagtaacaacagaaacgcaggaacagcaacaataaccataacaggcataagagactatacaggcactagaaccgtaaacttcactattaacaaagccgccggagcgacggtcaactcgccgacactaagtaatacgtcaggtagttccgccaccataaacgtcgtaactactaacaatgggcagaacgttgaatatggaataagcacaaacaactccgcaatcgtatggcaggacgggttaaccttcagcgatctaatagtaggacttgctaattattactttgtatttgcacgctcgaaggaaaacgccaactatctcactggtacggcaagcacaggtttgcctgtaacgatcccactggacatgtatgggtcaattgtaccatttggaaatttacttgaaagcctgcccgtaaacaccactgccaccccatatactatcaaattgataatgagtcaatttgtagatcagaccacaatggctcccgaagtatcggtgcttattaacaaccccaataaatatgtttaccttgacctttcagacagtacctttaccagcatgaggtcaagtgcttttagtggagcctccacacttatcggcataacattacccaacagtcttatcagcattacgagtaccgtttttgaaaattgcaccaaccttgccagcgtaaacataggaaccggcgttaccagcattaatgcttcggcttttttgaattgcaccagtcttaccgaaataaatattgatgccggtaatagcacgtatacgtcagaaaacggcattgtttataccaaagataaaactactttagttgcatatccatcaggaaaaacaggcagtacatttaccataccgaatagcgttatcagcttggggaatggggcttttttgtattccagttttacaagcataactataccgaacaacgtttccagcattggagcagctgcgtttatgtattgcaccagtcttaccagtgtaaggtttgaaagagttggtactactattggcgttcaagcttttattgacgctgctaacacgacatctttgcagactgcgtatactgccggaggcataggaacatatacaagacctgatacgacaagcacaacatggacaaaaatatcggattaa

SEQ ID NO: 71884 - protein, 741 aa, Unknown
  Obtained from environmental sample
  DOMAIN (26)...(103): Bacterial Ig-like domain (group 2)
  misc_feature (1)..(741): Xaa is any amino acid
MDFTLPLTGCPEESDDNNNSVTTTVPVTNVTLNQKSITLTIGGTANLTATVAPDNATNKAVTWKSDDTAKATVSNGVVTAVAKGTAIITVTTADGGRTDTCAVTVTDGSSGTDDKTPITTANITIPIPVKGETPATEVSGTSERFTTGTVTWEPNDNTFQPSTVYTATVTLTANNGHTFIGLTSEHTTINGEQATTTNNTGETITLSYTFNETAAINAKNVSNISVKTQPKLNYTHGDALDLSLLNVTLTYDDGTTEDVVSSAFSAHSLTTTPANNTPLERSSYDNQPVTINYGSSKTATTNNLTVNAKSLSDTDAITVEPSSITAVIYTGNELKPAITYVKHTVPTGTIRTLDLNTDYKLEYSNNRNAGTATITITGIRDYTGTRTVNFTINKAAGATVNSPTLSNTSGSSATINVVTTNNGQNVEYGISTNNSAIVWQDGLTFSDLIVGLANYYFVFARSKENANYLTGTASTGLPVTIPLDMYGSIVPFGNLLESLPVNTTATPYTIKLIMSQFVDQTTMAPEVSVLINNPNKYVYLDLSDSTFTSMRSSAFSGASTLIGITLPNSLISITSTVFENCTNLASVNIGTGVTSINASAFLNCTSLTEINIDAGNSTYTSENGIVYTKDKTTLVAYPSGKTGSTFTIPNSVISLGNGAFLYSSFTSITIPNNVSSIGAAAFMYCTSLTSVRFERVGTTIGVQAFIDAANTTSLQTAYTAGGIGTYTRPDTTSTTWTKISD

SEQ ID NO: 71885 - DNA, 468 bp, Unknown
  Obtained from environmental sample
  misc_feature (1)..(468): n is a, c, g, or t
atgaaaagatttacatttaacatggaaaagattctcaaaataaaaaaatttgaagaaaatgaatgtaaactcgcgtttgggcaggcggtcggtattcttaacggaatagaaaacgaaataaaaattacggcaatcaggcggcacaatgccgtagaacagcgttttatcactccggcggatatggcttcttgggataattatgttttaaggctggaacaggaagcggaaagacttgcgcagaaggcggcaaaggcggagcttgtggtagaggaaaaacgcgccttgtacatggaagcgcaaaaagaagtaaaagcgattgagaagctgaaggaaaagaagcaaaaagagtatcgcaaggatatgatgaattaccagatggcggaagttgatgatatgacttcggcgagatatggacgggaagaaatttacgacgaagattacgaacaggtagcgagacaagagggataa

SEQ ID NO: 71886 - protein, 155 aa, Unknown
  Obtained from environmental sample
  misc_feature (1)..(155): Xaa is any amino acid
MKRFTFNMEKILKIKKFEENECKLAFGQAVGILNGIENEIKITAIRRHNAVEQRFITPADMASWDNYVLRLEQEAERLAQKAAKAELVVEEKRALYMEAQKEVKAIEKLKEKKQKEYRKDMMNYQMAEVDDMTSARYGREEIYDEDYEQVARQEG

SEQ ID NO: 71887 - DNA, 1539 bp, Unknown
  Obtained from environmental sample
  misc_feature (1)..(1539): n is a, c, g, or t
gtggagggggaccgcatgcagacaaatactgttgaaacaaatattttcgataaatatctttcatgcacggacaaaacggatccgattaaatgcgtcggcaaagtaattaaagtagacggattattaattgagagccacggtcctcaggcaattatcggcgagatatgcagaattatagtcccaaaagggaaggggagcataaaagccgaagttgtgggattaagatatgaaattgtccagcttatggcttatgaggaaacagacggaattgaagtaggcgacagggttatcgctcttggcactcgtcttgaagtgcccgtatcgcaaaaacttttagggcgggttatagacgcccttggaaacccgatagacaataagggtgatatttcgtctaactgttattatcccgcccttacaagcccgcccgatccgctcaaaagaagacgaataacggaacgcataacaacaggcgtgcgcgccattgacggacttcttgcggtaggcaaggggcaaaggctcggtattttctccggttccggcgttggtaaatccacactccttggaatgattgcccgcaacacatccgccgatgtaaacgtggtcgccctgataggcgaacgcgggcgggaagtaaacgattttatagaaaacgatcttggtcccgaaggacttgcgcgcagcgtactgattgttactccttccaattctccgcctctttcccgtcttcgcggagcctatgtcgcgacggctgtcgcggaatattttagagatcagggaaacgacgtaatgttgatgtttgattcagttacgcgctttgcccgcgccatgagggaaatagggcttgcgtccggggaacctcccgcgcaaagagggttcccgcccagtatgtttgattctatgcctaaacttctagaaagatcaggtacttccgacaaggggagcataacgggtttttacacagtccttgtagacggcgatgatatggacgaacctgtcgcggatacggtacgcggtattcttgacggacatatcgttctttcaagagatttagcgcaggcttatcattatccggctattgacgtgcttacaagtatttcccgtcttgcgcctaaagtatcgggacagatgagcagaaaagcggcgggcgttatccgaagaaatatggcggcttacgctgacgcggaagatatgatcaatatcggctattataaacaaggttccagccccgatattgatgaagctatcgctaaacatggtccgatagaagagtttcttatgcaggagattgacgaaccttcgtccttggaagaaacgcttacagctatgtcggaaatagcggaaatttttattccgcccgaagaaatgacggatacaaataaaaaacttgaaaaagccgtaagccaaaaaacaaataaagccgcgcccgaaaagattgaaaagcccgctgaagttgaagatacaagaatggcgcttaacagcgtggcgtctttattttcttcgcttcccggcatgaatattttggagaataacagcttatga

SEQ ID NO: 71888 - protein, 512 aa, Unknown
  Obtained from environmental sample
  DOMAIN (35)...(100): ATP synthase alpha/beta family, beta-barrel domain
  misc_feature (1)..(512): Xaa is any amino acid
MEGDRMQTNTVETNIFDKYLSCTDKTDPIKCVGKVIKVDGLLIESHGPQAIIGEICRIIVPKGKGSIKAEVVGLRYEIVQLMAYEETDGIEVGDRVIALGTRLEVPVSQKLLGRVIDALGNPIDNKGDISSNCYYPALTSPPDPLKRRRITERITTGVRAIDGLLAVGKGQRLGIFSGSGVGKSTLLGMIARNTSADVNVVALIGERGREVNDFIENDLGPEGLARSVLIVTPSNSPPLSRLRGAYVATAVAEYFRDQGNDVMLMFDSVTRFARAMREIGLASGEPPAQRGFPPSMFDSMPKLLERSGTSDKGSITGFYTVLVDGDDMDEPVADTVRGILDGHIVLSRDLAQAYHYPAIDVLTSISRLAPKVSGQMSRKAAGVIRRNMAAYADAEDMINIGYYKQGSSPDIDEAIAKHGPIEEFLMQEIDEPSSLEETLTAMSEIAEIFIPPEEMTDTNKKLEKAVSQKTNKAAPEKIEKPAEVEDTRMALNSVASLFSSLPGMNILENNSL

SEQ ID NO: 71889 - DNA, 303 bp, Unknown
  Obtained from environmental sample
  misc_feature (1)..(303): n is a, c, g, or t
ttggaaggagtaacaatcagtacgctgcgcgcaagtccttcgggaccaagatcgttttctataaaatcgtttacttcccgcccgcgttcgcctatcagggcgaccacgtttacatcggcggatgtgttgcgggcaatcattccaaggagtgtggatttaccaacgccggaaccggagaaaataccgagcctttgccccttgcctaccgcaagaagtccgtcaatggcgcgcacgcctgttgttatgcgttccgttattcgtcttcttttgagcggatcgggcgggcttgtaagggcgggataa

SEQ ID NO: 71890 - protein, 100 aa, Unknown
  Obtained from environmental sample
  misc_feature (1)..(100): Xaa is any amino acid
MEGVTISTLRASPSGPRSFSIKSFTSRPRSPIRATTFTSADVLRAIIPRSVDLPTPEPEKIPSLCPLPTARSPSMARTPVVMRSVIRLLLSGSGGLVRAG

SEQ ID NO: 71891 - DNA, 840 bp, Unknown
  Obtained from environmental sample
  misc_feature (1)..(840): n is a, c, g, or t
atggaagccgatgttaggcgatctttggacgctgaacgcaatgaggcaaaagaaaccggcagaaaggaaggcaaagaagagggctacgccgaaggaaaagcggaagttgatcgccttatcgaaagaactcaggtagtgcttgaaagagcgcagaacaaaagaggagagatattaagcgataccgaaaaggaaataatctccttagtgcttatgatttcgcgtaaagtaattaaagtgctttccgagaatcagcgcgatattatcatttccaatgttattgaggctctgcgtaaagtaaaagcaaagggaaatgttatcataagggttaatcttgccgatttaaaacttgcgacagaacacaaacaggattttatcattcttatggaaggtgcaaaatcaattcagattgtggaagacagttctgtagattcaggcggctgtataatagaaaccgatttcggcgagatagacgcgcgtatcgcaagccagcttgccgagttggaaaacagaatattggaaatatcacccatacaaccgggaagaaatgataatactccgccgcctgtaatcagaacggcgaatcttaacagcgatcttgccgcttctaccgctatgatggacgctatgagtaaagcacctaacgacggcggagcttccgatttgccttccgattccgatgatcctgagctttcagcgggcgcaagcgcggctcttacggcatccgccgcgttagccgctttagcgacaatggcgacaaaaggcaaaagagaagtggacaaaaaaataacgcaaggattggatacatttacaagaagaaaatcagataatttgactccgtaa

SEQ ID NO: 71892 - protein, 279 aa, Unknown
  Obtained from environmental sample
  misc_feature (1)..(279): Xaa is any amino acid
MEADVRRSLDAERNEAKETGRKEGKEEGYAEGKAEVDRLIERTQVVLERAQNKRGEILSDTEKEIISLVLMISRKVIKVLSENQRDIIISNVIEALRKVKAKGNVIIRVNLADLKLATEHKQDFIILMEGAKSIQIVEDSSVDSGGCIIETDFGEIDARIASQLAELENRILEISPIQPGRNDNTPPPVIRTANLNSDLAASTAMMDAMSKAPNDGGASDLPSDSDDPELSAGASAALTASAALAALATMATKGKREVDKKITQGLDTFTRRKSDNLTP

SEQ ID NO: 71893 - DNA, 453 bp, Unknown
  Obtained from environmental sample
  misc_feature (1)..(453): n is a, c, g, or t
atgaacgagcatgaattattacagataattaacggcggcgaatcaagtacagcacagttcaaagaacgcttaccacatcctgacagccttgcccatgagattattgccttgtcaaattcccatgggggaaaaattatttttggagtaaacgataaaacgggagagctgaatgggctttcttttagtgaaatccagcagacaaatcagcaagttgtgaatattgcgtcccaaaaggtgtacccaccggtttatctagaaacggaaactgtttctgtaaaggataatcaaatagttgtcgtaagcattgaggaaggaatatccaaaccgtacaaagattcaaatggcacaatctatgtaaaaaacggagcagacaagagaaaagtaacatcaaatgatgaaattgcgcggttactgggaagcaggaatttacttgccgatgagatgaaattttaa

SEQ ID NO: 71894 - protein, 150 aa, Unknown
  Obtained from environmental sample
  DOMAIN (37)...(131): Divergent AAA domain
  misc_feature (1)..(150): Xaa is any amino acid
MNEHELLQIINGGESSTAQFKERLPHPDSLAHEIIALSNSHGGKIIFGVNDKTGELNGLSFSEIQQTNQQVVNIASQKVYPPVYLETETVSVKDNQIVVVSIEEGISKPYKDSNGTIYVKNGADKRKVTSNDEIARLLGSRNLLADEMKF

SEQ ID NO: 71895 - DNA, 4035 bp, Unknown
  Obtained from environmental sample
  misc_feature (1)..(4035): n is a, c, g, or t
atgcgagatatacaagattttgattcgataatgatacggctggcttcacctgatatgatcaggtcgtggtcttacggcgaagtaaaaaaacccgagacgattaattatcgtactctgcgcccggaaaaggaaggtcttttctgcgagcgtatctttggaactaccaaagaatgggaatgttactgcggaaaattcaaatcgattcgttataagggcgttatctgcgaccgctgcggcgtcgaagttacgcactttaaggtgcgccgtgaaagaatggggcacattgaattagccgctcccgtttcgcatatctggtactaccgttcagtccccagcagaatgggtcttctcctcgaccttcccacaggtcagcttcgttccgttctttactatgaaaaatatatcgtcatagattcaggcgacaccaatctgaaaaaaggtcagcttctttccgaagaggaatactacgaagcgcaggaacgtttcggcggcggctttacagccggaatgggagccgaggcgatcagcgtcttgctggaaaaccttgaccttgatcaaatggcggcagaccttcgggcgaaaatgatcgagaagggcgcaaagacagataaacgtcttcttaaaagaatcgacattgtagaaaatttccgcaactcaaacaacaaaccgcagtggatgatcctcacggtaattcccgtaattccgccggaacttcgccccatggttcagcttgacggcggacgtttcgccacaagcgatcttaacgatttgtaccgtagggttatcaaccgcaataaccgcttaaaaagactgcaatcgcttaacgctcccgatatcattatccgcaacgaaaagcgaatgttacaggaagcggttgacgcgttattcgacaattcaaagaagaagaaagttgttaaaggttcttctaaccgtccgcttaaatcaatcagcgatatgctcaaaggaaagcagggacgcttccgccagaacttgcttggaaagcgcgtagactattcgggtcgttccgtaattacagtcggtcccgatcttaaaatgtggcagtgcggtattcccacaaaaatggcgctcgaattatttaagccgtttataatgaagaaacttgtcgataaagacgttgtttttaatattaaaaaagcgaagatgttagtcgagcaggaaacgcccgaagtctttgccattttggacgaggttgtaaaagaacatcccgttcttcttaaccgagccccgacattacacagacttggtattcaggcgtttgagcccgtactggttgaaggcaaatcgatcaaacttcatccgcttgtttgtcacgcttttaacgccgactttgacggcgaccagatggcagtccacgttccgctgacgcaggcggcgcagatggaatgctggacattgatgctttcggctcgtaacttgctgaaccctgccaacggaaagacaattgtattcccgtctcaggatatggttttgggcattaacttccttacaagaattaaacccaacgctaaacgcccgggttccgataaacctgaaacaaaagacaagataccctattattcgtctcccgaagaagttcttatggcggttgaaagaaaggcgctggacagagaagcggcaattcgtttaagaccgccgaaacttccgatttgggacaaggcgggcaatgtatccgagcctgccgccgacggcacgattgtaacttccgccggaagacttatgtttaacgaagaaatgcccaaagttttaccgttcatgaactatgaacttaaagacaaagaattgcgcacgcttgttgaatatattttcaaggaaaaaggatcatggattaccgttcagatgctggacgccattaaatcgacgggctaccgttatgcgacagtattcggggcgaccatcggcgttgacgatattgttatccccaaagaaaaaaccgaaatgattgacaaggcgaataaagaagttgagtcaattcagaaacagtggaagcagggtcatattaccaacgaagaacgctacaatcaggtcgttcaggtttggacaaaaacaaacgaggaccttacagccatgacgatgaaaaccctcgaatcggacagggacggctttaactcgatttacatgatggcgaactcgggagcgcgcggaagccgcaaccagatacgccagcttgcgggtatgcgcggtcttatggcgaaaccgtcgggcgacatcatcgaacttcctatccgttcaaactttaaggaaggactttcggttatcgaattctttatttcaactaacggcgcgcgcaaaggtcttgccgataccgcccttaaaaccgctgaagccggttatcttacacgccgtcttgtagacatagcgcaggacatggttgtaaatgaggacgactgcggaacaattaacggaactacatactcggctgtcaaacaaggcgaagaaattatcgaaccgttgaaagatcgtattgtaggacgctttacccttgaacgtgttaagcacccgataacaggcgaacttattgtcgatgtaaacgaggaaattaccgaagatatagcggcggcggttgacgcggcgggcgttgagtctgtgcggataaggacggttcttacctgcgaggcgaaatacggcgtttgcagaaaatgttacggacgcaaccttgcgacaaacagagcggtggatatcggcgaagctgtcggaacaattgcggcgcagtcaatcggtcagccgggtactcagcttacgatgcgtacgttccatatcggcggcgtcgctacaaaggtcagcgaagaaagccgtatcactttgaaatatcccgtgtttataaaagacgttatcggaactcacataaaccttgataacggacatcttctgtttacaagaagaggtcacgctattgtcaacaaagttatgagagagtacaaactcgatcacggcgacaaactgcttgcggtggacggaaagagagtcaaccgaggcgatgtgattattaaacacggcggagaagatattgtttctcccgaaatcgcttacgcaaaagttttgaaaaccaacgacggagaaatgctgtgcttgattggtcaggatcaaaaaattgaaataagaaacggctcggattttgaggcgcaaaagggtacggttgtggaagccgataaaaccatcgcaacattcgacccgttctccgacccgattatcgccgaggcgagcggaattgttaaatatgaagatattattctgggttcaactcttaaagaagaaattgacgaggacacaggcaacaccgaaaagcgcataacggaattccagcatgagagcaaacagcctcgtatctttattgtcgatgacaatgatcatcaggttgcctcatacttcctgccgtcaggcgcttacattcaggttgatgaaggcgagcggattaaagcggggcgcacaatagcgaaaacgttgaaagaatcagcgaaagctatggacattacatccggtcttccgcgcgtcagcgaactttttgaagcccgcaaaccgaaaagccccgcagttcttgcgcaggtttcgggaaccgtgtactttaaagagcctgtaaaaggcaagcgtaaaatttccattgtcgataatttcggcagggagtttacccatcttataccgatgaacaaacggcttttggtgcgcgacggcgacactgttgaagcgggagaactgctttgtcagggagcgatcaatccgcatgacgttctgtatattctcggcgaaggaaaattacagcgttatctgatggacgaaatccaaaacgtctaccgcctgcaaggtgtgtcgataaacgacaaacatatcggcgtaatcatcaggcagatgatgcgtaaagttgaaataagatttgtaggcgacacgaaatttatttacggctcttccgtggacaagtaccgtttccacgaagaaaacgcccgtgtaatggcggaaggcggacagcccgcaatcgcacagcccatgtttcaagggaataacaaaggcgtcgctcaacattga

SEQ ID NO: 71896 - protein, 1344 aa, Unknown
  Obtained from environmental sample
  DOMAIN (478)...(644): RNA polymerase Rpb1, domain 3
  misc_feature (1)..(1344): Xaa is any amino acid
MRDIQDFDSIMIRLASPDMIRSWSYGEVKKPETINYRTLRPEKEGLFCERIFGTTKEWECYCGKFKSIRYKGVICDRCGVEVTHFKVRRERMGHIELAAPVSHIWYYRSVPSRMGLLLDLPTGQLRSVLYYEKYIVIDSGDTNLKKGQLLSEEEYYEAQERFGGGFTAGMGAEAISVLLENLDLDQMAADLRAKMIEKGAKTDKRLLKRIDIVENFRNSNNKPQWMILTVIPVIPPELRPMVQLDGGRFATSDLNDLYRRVINRNNRLKRLQSLNAPDIIIRNEKRMLQEAVDALFDNSKKKKVVKGSSNRPLKSISDMLKGKQGRFRQNLLGKRVDYSGRSVITVGPDLKMWQCGIPTKMALELFKPFIMKKLVDKDVVFNIKKAKMLVEQETPEVFAILDEVVKEHPVLLNRAPTLHRLGIQAFEPVLVEGKSIKLHPLVCHAFNADFDGDQMAVHVPLTQAAQMECWTLMLSARNLLNPANGKTIVFPSQDMVLGINFLTRIKPNAKRPGSDKPETKDKIPYYSSPEEVLMAVERKALDREAAIRLRPPKLPIWDKAGNVSEPAADGTIVTSAGRLMFNEEMPKVLPFMNYELKDKELRTLVEYIFKEKGSWITVQMLDAIKSTGYRYATVFGATIGVDDIVIPKEKTEMIDKANKEVESIQKQWKQGHITNEERYNQVVQVWTKTNEDLTAMTMKTLESDRDGFNSIYMMANSGARGSRNQIRQLAGMRGLMAKPSGDIIELPIRSNFKEGLSVIEFFISTNGARKGLADTALKTAEAGYLTRRLVDIAQDMVVNEDDCGTINGTTYSAVKQGEEIIEPLKDRIVGRFTLERVKHPITGELIVDVNEEITEDIAAAVDAAGVESVRIRTVLTCEAKYGVCRKCYGRNLATNRAVDIGEAVGTIAAQSIGQPGTQLTMRTFHIGGVATKVSEESRITLKYPVFIKDVIGTHINLDNGHLLFTRRGHAIVNKVMREYKLDHGDKLLAVDGKRVNRGDVIIKHGGEDIVSPEIAYAKVLKTNDGEMLCLIGQDQKIEIRNGSDFEAQKGTVVEADKTIATFDPFSDPIIAEASGIVKYEDIILGSTLKEEIDEDTGNTEKRITEFQHESKQPRIFIVDDNDHQVASYFLPSGAYIQVDEGERIKAGRTIAKTLKESAKAMDITSGLPRVSELFEARKPKSPAVLAQVSGTVYFKEPVKGKRKISIVDNFGREFTHLIPMNKRLLVRDGDTVEAGELLCQGAINPHDVLYILGEGKLQRYLMDEIQNVYRLQGVSINDKHIGVIIRQMMRKVEIRFVGDTKFIYGSSVDKYRFHEENARVMAEGGQPAIAQPMFQGNNKGVAQH

SEQ ID NO: 71897 - DNA, 1602 bp, Unknown
  Obtained from environmental sample
  misc_feature (1)..(1602): n is a, c, g, or t
atgcagcgtcaggcagttccgcttgttttccctgaagcgccccgcgttggcacgggaatggaagtaaagtgcgcctacgattccggcgttcttgtaaaagctcgcagagcgggcactgttcttcgcgtaacatcgcaggaaataattgtaaagccggaaagagcgggaaatgtaaaacccgccgcgcaggtttcgttagacgaaaacggcaacgatgtttatcagcttatcaaattccagagaaccaatcaggatacatgttacaatcagcgtcccattgttaaagtgggcgaaaaaattgtaagcggacaggtaattgccgacggacccgctacccaaaacggagagcttgctcttggaagaaatatccttgtaggctttatgccgtggaacgggtacaactatgaggactcgatacttatctctcagcgtgttgtaaaagatgatatgtttacttccattcacatcaaagaatttgttgtcgaagtaagggaaacaaaactcggtcccgaaaaaataacccgtgatattcccaacacttcggaaaaaagccttgataacatggacagcgaaggcattatccgcatcggagcaaaagtgcgctccggcgatatattggtcggtaaagttacgccgaaaagcgaaaccgagaccacgccggaattcaaactgctcaattcaatcttcggcgagaaggcgaaagaagtgcgcgacacttcgcttaaagttccgcacggaattgacggaacggttatcgacattcagcggcttaaacgcacggatcatgactcattgagtcccggcgttgatgaagttgtaaaagtgcttatcgccacaaagcgcaaactgcgcgagggcgataaaatggctggtcgccacggtaacaagggcgttgtcgctcgtattctgccggaagaagatatgccgtttatggaagacggaacgccgttggatatttgtttaacgccgctcggcgttccctctcgtatgaatatcggtcagcttttggagacggaacttggctgggctggttctacgcttgacgaatggtattcaacgcctgtgttccaatcgccgtctaccgaacaaatagaggtaaaacttaaagaagccgggcttcctttaaccagcaaggcgacgctgaaagacggaagaacaggcgaagaatttgtaaatcagattttctgcggaataatttacttccttaaattgcatcaccttgtcgacgacaagatgcacgcccgttcaacaggtccgtactcgcttgttacacagcagccgttgggcggaaaagcgcagttcggcggtcagcggttaggtgaaatggaagtatgggcgcttgaagcgtacggcgctgcgaatacattgcaggaacttttgacgattaagtcggacgatatgacaggacgctccaagatttacgaggcgattgtaaaaggagaaccttcaacgaccgccggtattcccgaatcatttaacgtactggttcaggaattgcggggtcttgcgctggacttgtcaatctttgacgtaaaaggaaaacaaataccgctcaccgaaaaagatgaggaattaataactaagtcgggaagtaatttctaa

SEQ ID NO: 71898 - protein, 533 aa, Unknown
  Obtained from environmental sample
  DOMAIN (435)...(511): RNA polymerase Rpb2, domain 7
  misc_feature (1)..(533): Xaa is any amino acid
MQRQAVPLVFPEAPRVGTGMEVKCAYDSGVLVKARRAGTVLRVTSQEIIVKPERAGNVKPAAQVSLDENGNDVYQLIKFQRTNQDTCYNQRPIVKVGEKIVSGQVIADGPATQNGELALGRNILVGFMPWNGYNYEDSILISQRVVKDDMFTSIHIKEFVVEVRETKLGPEKITRDIPNTSEKSLDNMDSEGIIRIGAKVRSGDILVGKVTPKSETETTPEFKLLNSIFGEKAKEVRDTSLKVPHGIDGTVIDIQRLKRTDHDSLSPGVDEVVKVLIATKRKLREGDKMAGRHGNKGVVARILPEEDMPFMEDGTPLDICLTPLGVPSRMNIGQLLETELGWAGSTLDEWYSTPVFQSPSTEQIEVKLKEAGLPLTSKATLKDGRTGEEFVNQIFCGIIYFLKLHHLVDDKMHARSTGPYSLVTQQPLGGKAQFGGQRLGEMEVWALEAYGAANTLQELLTIKSDDMTGRSKIYEAIVKGEPSTTAGIPESFNVLVQELRGLALDLSIFDVKGKQIPLTEKDEELITKSGSNF

SEQ ID NO: 71899 - DNA, 300 bp, Unknown
  Obtained from environmental sample
  misc_feature (1)..(300): n is a, c, g, or t
atgtcgataaccgttccgtcaattccgtgcggaactttaagcgaagtgtcgcgcacttctttcgccttctcgccgaagattgaattgagcagtttgaattccggcgtggtctcggtttcgcttttcggcgtaactttaccgaccaatatatcgccggagcgcacttttgctccgatgcggataatgccttcgctgtccatgttatcaaggcttttttccgaagtgttgggaatatcacgggttattttttcgggaccgagttttgtttcccttacttcgacaacaaattctttgatgtga

SEQ ID NO: 71900 - protein, 99 aa, Unknown; identical to SEQ ID NO: 5302
  Obtained from environmental sample
  misc_feature (1)..(99): Xaa is any amino acid

SEQ ID NO: 71901 - DNA, 741 bp, Unknown
  Obtained from environmental sample
  misc_feature (1)..(741): n is a, c, g, or t
atgggcaacacgatgaaaaccgcctttagccgcatggaacggattgccaaggagcggatgagccttaaagagacggacacaattaagccgcaggatctaatttccataaagccggttgtggcggcgatcaaggaattcttcggttccagccagctctcccagttcatggatcaggtaaatcccctggcggagcttacgcacaaaaggcgccttaacgcgcttggccctggcggcctttcccgcgagcgggctggcttcgaggtgcgggatgtccactacacgcattacggcaggatgtgcccgatagaaaccccggaaggcccgaatatcggccttattgtttctttggcaaattatacccgcgtgaacgattacggtttccttgagaccccttaccgcaaagttgttaagggcatcgcctccaaagacattgaatacctttcggcaatggacgaggacaggtactacatcgcccaggcttcggctaaattaaacaactcagggagctttgtggacgcccaggtgccttgcagaaggcagggcgattatactacccgctctccaggcgatattgaatacatggacgtgtctcccaagcagataatttcggtttcagcttcattaattccgttccttgaacacgatgacgcaaaccgcgccctcatgggttccacatgcagcgtcaggcagttccgcttgttttccctgaagcgccccgcgttggcacgggaatggaagtaa

SEQ ID NO: 71902 - protein, 246 aa, Unknown
  Obtained from environmental sample
  DOMAIN (54)...(123): RNA polymerase Rpb2, domain 3
  misc_feature (1)..(246): Xaa is any amino acid
MGNTMKTAFSRMERIAKERMSLKETDTIKPQDLISIKPVVAAIKEFFGSSQLSQFMDQVNPLAELTHKRRLNALGPGGLSRERAGFEVRDVHYTHYGRMCPIETPEGPNIGLIVSLANYTRVNDYGFLETPYRKVVKGIASKDIEYLSAMDEDRYYIAQASAKLNNSGSFVDAQVPCRRQGDYTTRSPGDIEYMDVSPKQIISVSASLIPFLEHDDANRALMGSTCSVRQFRLFSLKRPALAREWK

SEQ ID NO: 71903 - DNA, 888 bp, Unknown
  Obtained from environmental sample
  misc_feature (1)..(888): n is a, c, g, or t
atgggcgacatcccgatcatgagcgaacggggaacttttatcatcaacggcgcggaacgcgtggttgtttcgcagctgcaccgttctcccggcgttattttcagccatgagaaagggattttttcttcccgtatcataccctaccgagggagctggctggaatttgaaattgaccagaaacgcgagcttatctacgcgaagatcgacaggaaaaagcgcatacttggcacgattttcctgcgcgctcttggctttgaaagccgcgaggaaattatcaaggctttctatgtcaccgaaacgattaaagtcaaggacgaccgcgaaaccagggactatatctccgggcgcgttcttgccgccgcagtttgggtaaaggacaccgccacgggccggaaaagcagcaagtccgatacccacgacgggatgaaaaaattgttcagggcgggtgaaaagctccatccacacaatgttgaagagcttctctcaaacaacatcaaatcaatcgaagcgataaaattcgttgaacttgaggatccctccgatgaaaaatccctgaattattctctggactccgatattctccttaactgcttcgagagggaggagataaaatataccaaagaaggtaatgaggagccgacaaaagaagaatccctcatggctgtattcgcggtgctgatgcagggagagaccatatcaattgacgctgcggaaaaagagcttacggggatgttctttaccagccgccgctatgatctgggcagggtagggcgctacaagctcaacaaaaaattcggttttgatcctcccctttacgattttaccctgaccaaagacgacattatcgccacaatgaaaatcctttataaaggtttacataggcgatga

SEQ ID NO: 71904 - protein, 295 aa, Unknown
  Obtained from environmental sample
  misc_feature (1)..(295): Xaa is any amino acid
MGDIPIMSERGTFIINGAERVVVSQLHRSPGVIFSHEKGIFSSRIIPYRGSWLEFEIDQKRELIYAKIDRKKRILGTIFLRALGFESREEIIKAFYVTETIKVKDDRETRDYISGRVLAAAVWVKDTATGRKSSKSDTHDGMKKLFRAGEKLHPHNVEELLSNNIKSIEAIKFVELEDPSDEKSLNYSLDSDILLNCFEREEIKYTKEGNEEPTKEESLMAVFAVLMQGETISIDAAEKELTGMFFTSRRYDLGRVGRYKLNKKFGFDPPLYDFTLTKDDIIATMKILYKGLHRR

SEQ ID NO: 71905 - DNA, 1428 bp, Unknown
  Obtained from environmental sample
  misc_feature (1)..(1428): n is a, c, g, or t
ttggtgaccaagcacgatttccccaaaatccacttttatgatcaggattttgtcgatatttacgataaaacatgggcgtggatacaagattgctggattagcggcggcgaaaagagcaaaatagaaggaaaaatcttctcttaccccgattctcaggtggtaactcagactgacgctatcctttcctcgttttttctggtgtactccaatagtattttccaggctcattcaactttggacctcttttatagccgtcaggaggaaaatggggctatccgctccgcctatgaccttaattcgggggctcccgtaatcgagaaagataactccgaagggcttggaatgcccctttttgcatgggcggagcacaatatctaccataaatcgggtaataaaaagcgagttaaggatactttgcccattttatgcaaatactcagcatggatcgattctacctttaaaaagtcaaacggactgtataaaacgccccttggcgccggcggaatgacaaatcttccccgcggggacgcctattaccccatggacttcaataccatgatggcgattaatatgctctatatttccgccctcgcggacattttgaacgataaagagacaagttttcagtataagcggctgtatttctcccttaaaacaagaatcaatacattgatgtacaacgcggcggacggtttttattacgatatcaacaaaaacgaaaaacaagtccccattaaaacaatcgccggatactggcctctccttgcggaaattcccaatggggaaaaagccgagcgcattatcgaaaaactttccgatcctaaatatttcggcacggctcacccgtttccgtctgttgcgctgtccgaaaaagaatttgacgagacagggaaaggattcagaggctctgtttttccttatctgacattcatggttataaaaggacttgaacgttatcaacgctgggatttagcgcgcgagtgcgcgattaggcatgtgtactttatgctcgattcaatgagtccggacggaaatcatcacaagggaaatttatgggaagcgtatttgcccacaaaggaaggtcccgcaaaatggaccggtaaacccgcttttccgcgcccgcagtatttaacttacgacgcgctttcaactatctgtcttatcatcgaaaatattgtcgggctttcaatatcgcttccgcgcaaaacagtggattgggtcattccaagtttggaaattatgggcgtggaaaatctttccctaaaaaacaatatgattacaattctttccaacaaaagcggcagagggtgggagatacacatggaaagcgaaaaactttattactttactattaatattctgggtgtgaaagaaaaaacattaccaattccctccggtaaatgttcaatccttattgataagctgtaa

SEQ ID NO: 71906 - protein, 475 aa, Unknown
  Obtained from environmental sample
  DOMAIN (46)...(367): Trehalase
  misc_feature (1)..(475): Xaa is any amino acid
MVTKHDFPKIHFYDQDFVDIYDKTWAWIQDCWISGGEKSKIEGKIFSYPDSQVVTQTDAILSSFFLVYSNSIFQAHSTLDLFYSRQEENGAIRSAYDLNSGAPVIEKDNSEGLGMPLFAWAEHNIYHKSGNKKRVKDTLPILCKYSAWIDSTFKKSNGLYKTPLGAGGMTNLPRGDAYYPMDFNTMMAINMLYISALADILNDKETSFQYKRLYFSLKTRINTLMYNAADGFYYDINKNEKQVPIKTIAGYWPLLAEIPNGEKAERIIEKLSDPKYFGTAHPFPSVALSEKEFDETGKGFRGSVFPYLTFMVIKGLERYQRWDLARECAIRHVYFMLDSMSPDGNHHKGNLWEAYLPTKEGPAKWTGKPAFPRPQYLTYDALSTICLIIENIVGLSISLPRKTVDWVIPSLEIMGVENLSLKNNMITILSNKSGRGWEIHMESEKLYYFTINILGVKEKTLPIPSGKCSILIDKL

SEQ ID NO: 71907 - DNA, 1569 bp, Unknown
  Obtained from environmental sample
  misc_feature (1)..(1569): n is a, c, g, or t
atgagcgatatagacgtttcaacttacaaaccctcagacggaacaacgctgacagcgattattgaaatcggctctacgggaataagattgaatatcgcggagattaattcaaacggaagctggcaggttctggacagggcgatgcgtcccgcgtctcttgggcgcgatgtatttacttccggcttgctttcgcgcgaatcaattcttgagtgtctttctgttcttcaaaattaccgcgaacttttatcggggtggggaattgaggataacaatattcatgttatcgctacaagcgcccttcgcgccgcgcacaacagagatgtttttatagataggatatatcaggaaacaggatttaaactttccattgtagaaggcatcgaggaaaacagattaatgtatcttgcggtgcgttttgcgctgaagcaagaccttcctcttttttggaaagccaattcaatgattattgagattggcggcggctctacggaaattatgcttctgcggcgcggacagatggtagcggctcacagcttaaaaatgggaacgataattatcgatcagcgttcccgccagggttttaacacaaatattttttatgaacgctatttaaatgaaaatataaagaacactttggggcatttaaacatggaaatggatcttgcccatgtgcgggtgttggtggcttccagcggagacgcgcgtattgtcgcggataaggcgggaaaagaattaaacgagaattgccgcattattgatcgcgaagattttataaagtttttagataaaatccgcaattacagcatagaagaaagcatgaaagaatttggaattacttatgccgaagctgaagggcttgttttgggtcttctggtactcaaactttttcttgaacaaaccggagccgcaagtatcgccgttccgcttgttacaatccgcgacggctatcttgtcgatttggtttccggcgttgactcttctttgcaagatgaattcttttcgcagattatcgcttccgccgttaaccttggacgtaaataccattttgacgaagcgcatggcaaacttgtcgccaaccactgcatgacattatttgacgctcttacaaaagaacatggcatgaaccggcggcacaggataatgctggaaacagccgctattctgcacgatgtcggcgcttacataaaagaatcgagacatcaaaagcacggtcagtacattgtcgctaactctgaaattttcgggcttcatcaggacgagcttgaaataatagccaacgtaatcaactgtcatcgcggagaaccgcccactcattctgattttgagtttatgacactccaacgcgaggagcgcgttcttgttcttaaaatggcttctattttaagagtcgcggacgctttggatcgcggtcatacacagcaagttaaaaaaattactgttgaacgccgttcggagacagtagtcgttcatgtggataaagtttatgatctttcccttgaattaatgggtattgaagaaaagggcggattgtttcaagatgtatttggatataaagtcatattgagctaa

SEQ ID NO: 71908 - protein, 522 aa, Unknown
  Obtained from environmental sample
  DOMAIN (357)...(470): HD domain
  misc_feature (1)..(522): Xaa is any amino acid
MSDIDVSTYKPSDGTTLTAIIEIGSTGIRLNIAEINSNGSWQVLDRAMRPASLGRDVFTSGLLSRESILECLSVLQNYRELLSGWGIEDNNIHVIATSALRAAHNRDVFIDRIYQETGFKLSIVEGIEENRLMYLAVRFALKQDLPLFWKANSMIIEIGGGSTEIMLLRRGQMVAAHSLKMGTIIIDQRSRQGFNTNIFYERYLNENIKNTLGHLNMEMDLAHVRVLVASSGDARIVADKAGKELNENCRIIDREDFIKFLDKIRNYSIEESMKEFGITYAEAEGLVLGLLVLKLFLEQTGAASIAVPLVTIRDGYLVDLVSGVDSSLQDEFFSQIIASAVNLGRKYHFDEAHGKLVANHCMTLFDALTKEHGMNRRHRIMLETAAILHDVGAYIKESRHQKHGQYIVANSEIFGLHQDELEIIANVINCHRGEPPTHSDFEFMTLQREERVLVLKMASILRVADALDRGHTQQVKKITVERRSETVVVHVDKVYDLSLELMGIEEKGGLFQDVFGYKVILS

SEQ ID NO: 71909 - DNA, 672 bp, Unknown
  Obtained from environmental sample
  misc_feature (1)..(672): n is a, c, g, or t
atgaaatttacagaaagaactttccgcccatccgcagttatttttgacatggacggtcttatgtttgatacggaaaatctgacaattcctttttgggaagttgcgggcaagccgtttggatataacataacctatgacattgttcttcgcatggtagggataagcgccgaaaaagcgcgattagttatgcaagaagaattcggcgatgatttcccatacgacgctattcgcgatgaattcagaaagattgtacaaaaagaagtggaaaaaaacggagtacccttaaagccggggcttctctttttgcttgatcgtctttccgccgcaaagatacctcttggagtcgcgacttcttcacgaaacgccacggcggttaacatgctcactaaagccggaataatcgatcgttttgccgcgcttacctgcggcgatgaagtgacaaacggaaaacccgcccccgatatttttcttcttgccgcgaaaaaactggggcagccgccctccgcctgcgtcggctttgaagactcgcctccggggcttcagggactgcatgccgccgggatacgctcgatttttattaaagaccttcttgagccgtcaaaggaaatccttgccacagtttggcataggtgcaaggatttgaaggaagcggcgaagtacttgaagatttga

SEQ ID NO: 71910 - protein, 223 aa, Unknown
  Obtained from environmental sample
  DOMAIN (10)...(196): haloacid dehalogenase-like hydrolase
  misc_feature (1)..(223): Xaa is any amino acid
MKFTERTFRPSAVIFDMDGLMFDTENLTIPFWEVAGKPFGYNITYDIVLRMVGISAEKARLVMQEEFGDDFPYDAIRDEFRKIVQKEVEKNGVPLKPGLLFLLDRLSAAKIPLGVATSSRNATAVNMLTKAGIIDRFAALTCGDEVTNGKPAPDIFLLAAKKLGQPPSACVGFEDSPPGLQGLHAAGIRSIFIKDLLEPSKEILATVWHRCKDLKEAAKYLKI

SEQ ID NO: 71911 - DNA, 1644 bp, Unknown
  Obtained from environmental sample
  misc_feature (1)..(1644): n is a, c, g, or t
atggacaaaattgaatataacaagcttgaattcccctacatcagccgcgacctttcatgggtggactttaacgaacgcgtaatgaacgagggtctgcgcaaggaaacgcccctgctcgaaaggttaaggtttctttctattgtctctaccaattttgacgaatttttcatggtcagggtagcggcgctgaaacgcctgcaaaaagcggaagcgggcagggcagtcgatccttccggcttaactcccgatcaacagttaaaagcgatttctcaaaaagtccatgacattatgaacagacagtatgaatgtttgcgtaacgaaatatttcccgggctcgcaaaaaacggtttgtcccttctgcgccccgattcatggactgtcccgcagcttgattttttaaactcgttttttttaagccatatatatcctgttttgactcccctgcgtttggaagacgacaaacccatgccgtttatcgaaagccgtttgttaaacgccgtctttctgcttgaacctgaaaatccgaatccgcctcaagggtttgaatttgaaaccgccgccgctctgaaagaattaaaagtaattattcccctgcccggcgttttagacagacttgtctggatgccgagctttgaggcggaacataccaacggcgaaaaagaaaagtttcagcttgctttgcttgaagatgtaattgtcacatggggcgcttatcttttccccggtttcaaaataaaagaatccatgttgtttaaaattaacagagacgcggatttttccgtagatgaacagagagacgaagattttgtttcggcgatggtggaagttctggaaggcagaggaagatcggattgtatcagaatggtttattctcccggaagtgttctgttaaaagaggatcttgcaaaacgtttctcgcttgataatgattttttgtatgaagttgacggaccgattaaccctgttgattttatggaattgtccggggtggcgagtatggaagacttaacggaaaagccgtggaaaattcataagcctttagtttttaacgaggacacgttgatatgggatcagatcagtcagggcgacattatgctgcatttgccgtatcagtcttttgatcccgttgtaagattttttcaggaagctgcggtagacccgcaggttatttcgatacgaaccgcgctttacagaacgggcggcgccattccgggaataggtcaatcaatagaaaaagtagatgaatggtttgaacaaataaaaaaagaacaaggaaattcacatattcgattaggaatatttttaaataatggaacgattattggtgatattgctttacaagacatagataataaaaatagatcatgttctattggaatgggtatgtcaaaattggaatataggaataaaggatatgggaaagaggctgtaaaattattattagaatatggatttaataattatggtttggaaaggattacagcaagtacattagaaacaaacatatctgcccaaaaatcagtggaaaaattaggatttaagttggaagggaaagaacgaaaagcaatttattttgctgggaaaaaatatgacagatatatttatggaatattagttgaagaatatatcaataaaaatatataa

SEQ ID NO: 71912 - protein, 547 aa, Unknown
  Obtained from environmental sample
  DOMAIN (432)...(514): Acetyltransferase (GNAT) family
  misc_feature (1)..(547): Xaa is any amino acid
MDKIEYNKLEFPYISRDLSWVDFNERVMNEGLRKETPLLERLRFLSIVSTNFDEFFMVRVAALKRLQKAEAGRAVDPSGLTPDQQLKAISQKVHDIMNRQYECLRNEIFPGLAKNGLSLLRPDSWTVPQLDFLNSFFLSHIYPVLTPLRLEDDKPMPFIESRLLNAVFLLEPENPNPPQGFEFETAAALKELKVIIPLPGVLDRLVWMPSFEAEHTNGEKEKFQLALLEDVIVTWGAYLFPGFKIKESMLFKINRDADFSVDEQRDEDFVSAMVEVLEGRGRSDCIRMVYSPGSVLLKEDLAKRFSLDNDFLYEVDGPINPVDFMELSGVASMEDLTEKPWKIHKPLVFNEDTLIWDQISQGDIMLHLPYQSFDPVVRFFQEAAVDPQVISIRTALYRTGGAIPGIGQSIEKVDEWFEQIKKEQGNSHIRLGIFLNNGTIIGDIALQDIDNKNRSCSIGMGMSKLEYRNKGYGKEAVKLLLEYGFNNYGLERITASTLETNISAQKSVEKLGFKLEGKERKAIYFAGKKYDRYIYGILVEEYINKNI

SEQ ID NO: 71913 - DNA, 840 bp, Unknown
  Obtained from environmental sample
  misc_feature (1)..(840): n is a, c, g, or t
atgaacagacttaaaattaacgctgaaaacgccgaatatcaaattattcaatctctgaaaacaaacagggtaaaacgcaataaattacatgagatatttattgaagggatagaatgcataaaacaggcaattaattcaaatattgagattacaaggataatagttaaagaaataaacgctttgtcaaattggggaaaaaatataattaaacaatacaaaggcgtaaaaattattgaaatgtcaaataaattatataatgaattaaccgataaaacaaatccttccgaaatgcttataacagcaaaaatcacgccctatacacttgatgacattcaagaaaaaaatccgtttattattttatttgacaggccaagtgattatggaaatttgggttcaattatacgttcggcaaatgcttttaacgctgatggattattcataatcggacatggagcagacatttatgagccaaaggttatcagggcaagcatgggaagtatattttttacaaaaatagtaacgatagaatctatggagatattggctgaatatattaaaaatcaaaaaacaaaaaataacttggaaataataggtactgattccgccggaactgtatcaatagatgaatataaaataaaaagacctgtaatgattattataggaaatgaggcaaaaggtatgagtataaagttaaaggaattgtgtgataaaattgtaaagatacctataaaaggaaatgtaaattcattgaacgtgtcttgcgccgcgtcaattattatgtgggaagtatggaaaaatatcaggaaaaatgcagaaagaatttactcaaaaacagcatag

SEQ ID NO: 71914 - protein, 279 aa, Unknown
  Obtained from environmental sample
  DOMAIN (116)...(261): SpoU rRNA Methylase family
  misc_feature (1)..(279): Xaa is any amino acid
MNRLKINAENAEYQIIQSLKTNRVKRNKLHEIFIEGIECIKQAINSNIEITRIIVKEINALSNWGKNIIKQYKGVKIIEMSNKLYNELTDKTNPSEMLITAKITPYTLDDIQEKNPFIILFDRPSDYGNLGSIIRSANAFNADGLFIIGHGADIYEPKVIRASMGSIFFTKIVTIESMEILAEYIKNQKTKNNLEIIGTDSAGTVSIDEYKIKRPVMIIIGNEAKGMSIKLKELCDKIVKIPIKGNVNSLNVSCAASIIMWEVWKNIRKNAERIYSKTA

SEQ ID NO: 71915 - DNA, 960 bp, Unknown
  Obtained from environmental sample
  misc_feature (1)..(960): n is a, c, g, or t
atggatcatattgatattttgcaggaaatgctgcaatacattgatatacacataaaagaagaaatgaatgttgaaaaactggcggaacgggcaggtttttctccgtattatttctgccggatttttcaatgcggcgtaggcgctaccattatggaatatgtaaggaacaggcggcttgcctacgccgcttccgaacttaattcgggccgtaaaataatcaacatagctgttgattacggatttgaaacacattcgggtttttcaaaagcgttcaagcgttattttggatgtccgccggagatataccgagcttacgcgtcattcgatgttccaaagatacctgatctttcaaagtcgcatcaatttatttccgaatttgttatagaacctaaaataatagcaaaaaaaacatcttttaaattggcaggttttgcatttaaaataaaacttccaataaatatttcttctccggtaccgcattatttagatcctcaaagccctgttattgatactgacgacggaagaaaacctctaaataaacttcaggaattatgggaagaatgcagagcggacggaagactggaaaaattacataaagaatcatttattaaatttcacgcggaatacggagcctgctttttcaaagataatgatgaagaaaaatccgtatatcttatcggagtagaagcaaaatcaagggtaaatattccttttgagtatgatgtttatataatacccgaagccatgtttgccgttttttcaactcctccggccaatgaggataatttttcatcaatacttaaagatacatggaaatttatattttccgaatggtttccaaattcaggttatgaatttgacgataactcatttgcttttgaactttatgatgaacgcagtatgggtgatacaaataaagtttgtaatatatatattcccattgtaaacagacagctttga

SEQ ID NO: 71916 - protein, 319 aa, Unknown
  Obtained from environmental sample
  DOMAIN (11)...(55): Bacterial regulatory helix-turn-helix proteins, AraC family
  misc_feature (1)..(319): Xaa is any amino acid
MDHIDILQEMLQYIDIHIKEEMNVEKLAERAGFSPYYFCRIFQCGVGATIMEYVRNRRLAYAASELNSGRKIINIAVDYGFETHSGFSKAFKRYFGCPPEIYRAYASFDVPKIPDLSKSHQFISEFVIEPKIIAKKTSFKLAGFAFKIKLPINISSPVPHYLDPQSPVIDTDDGRKPLNKLQELWEECRADGRLEKLHKESFIKFHAEYGACFFKDNDEEKSVYLIGVEAKSRVNIPFEYDVYIIPEAMFAVFSTPPANEDNFSSILKDTWKFIFSEWFPNSGYEFDDNSFAFELYDERSMGDTNKVCNIYIPIVNRQL

SEQ ID NO: 71917 - DNA, 651 bp, Unknown
  Obtained from environmental sample
  misc_feature (1)..(651): n is a, c, g, or t
atggctatggatttggccgcgtttggccgtttttcacggacatttcaggcaggcgacataattttctccgaatacgaacttggcgatactttttaccttattcagtcgggcagggtacagcttgtaaaacttgtcggcgacatagagcggacgctcgacgtccttcagccttcagaaatgttcggcgaaatggctattttagaaaactccccccgttccgcgacagcggtagcgcttgacgaagttaaggtgctggaatttaactcccagaactttgaaatccttctgctcggcaacccgcagattgccctgaaacttttaaaaatgttctgcaaacgcatttacgactcaaaacggcggtttatgatcctgaccctccccgacccgcagacaaaagtagccgacgtgttccttatgctggatgaaaccggccttgacatagacaaatccaccgaacgccgtgaatttaaaacaactgttgagggcgtggcgcactgggcgggaatgtccgtaaatgaagtaagggatgttttaggccattatgtaaaccagaggcgcgtggagattttcccggacaagattattgtaaaaaatataaatgatttcgcgcgttatgtatcgtcccgccgcaaagacagccgcggacggtaa

SEQ ID NO: 71918 - protein, 216 aa, Unknown
  Obtained from environmental sample
  DOMAIN (12)...(101): Cyclic nucleotide-binding domain
  misc_feature (1)..(216): Xaa is any amino acid
MAMDLAAFGRFSRTFQAGDIIFSEYELGDTFYLIQSGRVQLVKLVGDIERTLDVLQPSEMFGEMAILENSPRSATAVALDEVKVLEFNSQNFEILLLGNPQIALKLLKMFCKRIYDSKRRFMILTLPDPQTKVADVFLMLDETGLDIDKSTERREFKTTVEGVAHWAGMSVNEVRDVLGHYVNQRRVEIFPDKIIVKNINDFARYVSSRRKDSRGR

SEQ ID NO: 71919 - DNA, 1017 bp, Unknown
  Obtained from environmental sample
  misc_feature (1)..(1017): n is a, c, g, or t
atgccgaaaccgcttcagtaccgcacaggttcgcttatatatttccagggagatcccgcggataaaatttatattctgcaaaacggcaagataagccttgtttcccaggatatagaaaccggtgaggatatacgcgagtcggttcagcccggcgaattcttcggggtaaaatccgcgttgggacgttacccgcgcgaggaaaacgccatggccttatctgacgcgaccgttatggtttttaccgtgcaggaatttgaagccgtagcgatggcaaacacaagaattatcatgaagatgcttaaagttttctccaaccagatgaggcgcgtgcacaaacaagtgtcaaaattgatggcgaaagcggaagagccgcccgccgacggtttgttcaatgtcggtgaattttaccttaagaacaaacgatttacccacgccaaatacattttcagccgttatctgatatattatccttccggaaaaaacgcgcatcaagcgacaaaaaatcttgagattgcggaaaatgcgctttcccgctacggggacggcaaaggacccggcgttgcggtaagttccggcggcggctcatccgccccgtcaaacggttcttcaaacggcttttccgccggcccctccgcggacgatcctgccaaaatttacaatgacgcgattatccttgtttccaaggggaaatatcaggaagcgtttatgtcatttaaattgatagcggactccggaacagacgcgggctggaccgcaaaagcttcttatgaaatagggcgctgcatgttccttatgaacaagtttgacgagagcttgaaatatttaacgaatatgctgactaagtatcccaagcaccccaatctgttagacgccatgcttgttatcggccagtgccacgaaaaaatgggaagaaaggaacaggcggcggctttctttaaaaagataatttccatgggcggcagcagcgacggcgccgcggaaaaagcaaaacgggcgttagccgccctgggagcgtaa

SEQ ID NO: 71920 - protein, 338 aa, Unknown
  Obtained from environmental sample
  DOMAIN (4)...(94): Cyclic nucleotide-binding domain
  misc_feature (1)..(338): Xaa is any amino acid
MPKPLQYRTGSLIYFQGDPADKIYILQNGKISLVSQDIETGEDIRESVQPGEFFGVKSALGRYPREENAMALSDATVMVFTVQEFEAVAMANTRIIMKMLKVFSNQMRRVHKQVSKLMAKAEEPPADGLFNVGEFYLKNKRFTHAKYIFSRYLIYYPSGKNAHQATKNLEIAENALSRYGDGKGPGVAVSSGGGSSAPSNGSSNGFSAGPSADDPAKIYNDAIILVSKGKYQEAFMSFKLIADSGTDAGWTAKASYEIGRCMFLMNKFDESLKYLTNMLTKYPKHPNLLDAMLVIGQCHEKMGRKEQAAAFFKKIISMGGSSDGAAEKAKRALAALGA

SEQ ID NO: 71921 - DNA, 1239 bp, Unknown
  Obtained from environmental sample
  misc_feature (1)..(1239): n is a, c, g, or t
gtgtcagaatacaccttggaaaatggggtgatagtttccccgggaaaaaaagcatattccggcaaattgggaatcagcggtgaaaaaataacttctccctgcggctctgtaaaaatcaatctaaaggattcttttgtttatccttctcttattaatacgcatgatcatttgcagggaaattaccgtccgcccgtaggtccgcctcccggaagcttctaccttacatggctgccctgggataacgacttaaaagcgtccgatacattcaaagaacgctcccagttaacaagggaggatctttacgctctttccggttacaaatgcctgttttccggcgttactacggtgaacgatcattttccgcataaatttaacagtcaaatattacccactttgccaatcagagcgattcaggattattgtattgagcatgaatgttcgtcttacgatcttaaatggggcgacggcatagaaattgagcacgagcgcgcggtaaaaaataaatggccttttattacccatctttccgagggctttgataaagaggcaatgcacggtgtagaaaaactggaaagcctgaaagctctggacagccattgcttgtttatccattgtataggattcagcgacgaggacattcagaaagtcgccagggccggggcgagcgtttcatggtgcggtttttccaatatgtttatgtttaacgtaactgccaaaatacgtaaaatgcttaaggcgggagtaaatgttacaatagggacagattcttccgcgacaggctcagccaatcttcttgcggaaattaaatatgacagggaattgtacagaaagctttacggcgaagatcttgaagccgaaaaaatattccaaatgatgactataaacgcggcaaaagctttttggatgcaggataaaatcggcagtttggacgaaggcaagttaggtgacattcttgttctgaaatccaaaaacagcgatccttatgaaaatattgttaacgctgatatgcaggatattgaacttttaattttagccggcactccgatatacggtgagatgcgcttccttgatatttttaacggaaaacttcccgccggatatacgcagataaaaacgggtaataaggaaatgtttgtaaaaggcgaccctgccggtctttacagggaagcaagaaaaaaaataggttttaagaaggaactggattttctgccttttgaaccggagcaggaaggtaaataa

SEQ ID NO: 71922 - protein, 412 aa, Unknown
  Obtained from environmental sample
  DOMAIN (45)...(319): Amidohydrolase family
  misc_feature (1)..(412): Xaa is any amino acid
MSEYTLENGVIVSPGKKAYSGKLGISGEKITSPCGSVKINLKDSFVYPSLINTHDHLQGNYRPPVGPPPGSFYLTWLPWDNDLKASDTFKERSQLTREDLYALSGYKCLFSGVTTVNDHFPHKFNSQILPTLPIRAIQDYCIEHECSSYDLKWGDGIEIEHERAVKNKWPFITHLSEGFDKEAMHGVEKLESLKALDSHCLFIHCIGFSDEDIQKVARAGASVSWCGFSNMFMFNVTAKIRKMLKAGVNVTIGTDSSATGSANLLAEIKYDRELYRKLYGEDLEAEKIFQMMTINAAKAFWMQDKIGSLDEGKLGDILVLKSKNSDPYENIVNADMQDIELLILAGTPIYGEMRFLDIFNGKLPAGYTQIKTGNKEMFVKGDPAGLYREARKKIGFKKELDFLPFEPEQEGK

SEQ ID NO: 71923 - DNA, 1170 bp, Unknown
  Obtained from environmental sample
  misc_feature (1)..(1170): n is a, c, g, or t
ttgatttttacagagccgcagggagaagttattttttcaccgctgattcccaatttgccggaatatgctttttttcccggggaaactatcaccccattttccaaggtgtattctgacacttacaaaccgtccttattatcaattttaagcaaaatatccctaataatcaatgatccagggattcctatcttaattatcggtaaatatgatgaattttcaaaaataaattgctacaatacttttgtgatagacctgcatacccattccaatatatctgacggggactttagtcctgataagcttatcaaggaggctgcgaaacagggtcttagcgccatcgctcttaccgatcatgataccattaacggccttgaaagcgcaaaaaaggcggctcttggtgaaaatatcagatttatccccggaatcgagataaatattacgtggaacggaggcaaaggagttccaggagtaggtcccggaggcgaatttcaccttctcggactgggaattaactcaccgaccggcaatttcacttcatctatcgaaggattattacgaagaagagaggacagaagccgtaaaatactggatagaatgcacgaattgagcatagacgcgacgtgggaagagcttctaagcactgcagaacatgactcaaagggagaaacaagcgaaaaaaacggcttttcaacgaaggaagcgggcggacgttccattgggcggcctcattttgcggctcttctggtgaaaaagaagattgtcaagagcgtaaatcaggcgtttgcccgctatttaggtgtgggaaaacccctgtatgtacaaaaagaggggctggattttgatgaagcagtctccctcatacgcgaatccggcggcattcctgtactggcgcacccgatttcgctctttatagcgtgggggcgtctccccgatatgataaaaatcctgcaaaagcgcgggctgatgggtatagaagcatggcatcccacagccaaaaccggctcctgccgccggctcgaagctcttggcaaatccctggggctctacattaccgaaggcagcgacttccacggccatgtccgccccgataggaaactcggctattcaagtaaaagcagaaaaatagaagacgccgttttagaggcgattcctgaattagccttgcgctaa

SEQ ID NO: 71924 - protein, 389 aa, Unknown
  Obtained from environmental sample
  DOMAIN (83)...(360): PHP domain
  misc_feature (1)..(389): Xaa is any amino acid
MIFTEPQGEVIFSPLIPNLPEYAFFPGETITPFSKVYSDTYKPSLLSILSKISLIINDPGIPILIIGKYDEFSKINCYNTFVIDLHTHSNISDGDFSPDKLIKEAAKQGLSAIALTDHDTINGLESAKKAALGENIRFIPGIEINITWNGGKGVPGVGPGGEFHLLGLGINSPTGNFTSSIEGLLRRREDRSRKILDRMHELSIDATWEELLSTAEHDSKGETSEKNGFSTKEAGGRSIGRPHFAALLVKKKIVKSVNQAFARYLGVGKPLYVQKEGLDFDEAVSLIRESGGIPVLAHPISLFIAWGRLPDMIKILQKRGLMGIEAWHPTAKTGSCRRLEALGKSLGLYITEGSDFHGHVRPDRKLGYSSKSRKIEDAVLEAIPELALR

SEQ ID NO: 71925 - DNA, 1653 bp, Unknown
  Obtained from environmental sample
  misc_feature (1)..(1653): n is a, c, g, or t
atgcaaaatacatctgcgcacatatatatacatgaggagttttatatgagtgttatggcttacatgccctatggggcgggcggaatcattatccgggttgaggcggatataaggcggggaattcccggtgtcgatattacggggcttgcggaaggagcggtaagggaagcgcgggacagggtgagggcggcgtttcggaattccgggttcagttttccgttggacaggattttgataaacctggcgccggcgggattgaaaaaagacggggcagcgcttgacttgcctatcgctctgtctgtcatggcggcggcggaaatcgcgcctgtttccggtgacctgcttgtgatgggcgagcttgagctttcgggaaaaatcaggccggtgaggggagtgcttgccgctatcgccgcgggattgtccgaaggaatcagcgagtttattgttccggcggaaaacgcgggagaggcggctattcttgcgcaaaaaggcgcgcgctttacagcggcggaaagtttacaggaagcggttaacgcgctttttataagagaggaacaaggcgctcttccagcgtcatttgacgcattgcctgtgagcgctgacacaggcggcgcttttggtatctctcctgagggcgatttttccgaagtgcgcgggcaggccgtttacaagcgcgctctggaaattgccgccgcgggcgggcacaatgttttagtcttcgggccgccgggcgccggaaagactatgctcgcgcgccggcttacttccatcatggcgccgcttaccccggacgaggcggtcgaagttacgcgcctttacagccttgccggtccccttatgtataacggcgacccttactcgcaaaaatttatcgaccgccttatcataaacgcgccgtttcgcgccccgcaccattcggcaagcgcggaaggcattctcggcggcggcagaaacccgcgcccgggagaaatcagccttgcacacttcggcgtgctcttccttgatgaagcgcctgagtttcggatcaacgtgctgcaggcgctccgcgagccgcttgaagacagggtgatcagcatttcaagggcggaagggccggtgcgcctgcccgccgaatttcaaatgctgatggcggctaacgcttgtccctgcggacgcctcggaatacaggaaacggacaacgcctgctgctgctcacctgaagaaattaacaggtactggcgcaagttttcaggcgcgctgctggacagggtggaaatccgcgtcgctgtccttccgccaaaagtaggagaaatgaacgccgcgcttggcaaaaaagcgagacctgaagaaaaaagcgcagtcatcatggaaagggttaaggcggcggtggaaatacagcgcctgcgttttaaggggacccagattcgcagaaatgccctgcttcccgccggaaaaaccgcttccctttgccctttaagcgaaaaagcggaaagcgcgcttaacacagcaatttcaagaatggggctttccggcagagcctttcacggagttttacgggtagccagaaccatcgcagatcttgagggcagtgaagttatagaaacggaacatatacttgaagcaatacagcaccgccgtttgggggaagatccgtgggagattttatcaatttag

SEQ ID NO: 71926 - protein, 550 aa, Unknown
  Obtained from environmental sample
  DOMAIN (217)...(382): Sigma-54 interaction domain
  misc_feature (1)..(550): Xaa is any amino acid
MQNTSAHIYIHEEFYMSVMAYMPYGAGGIIIRVEADIRRGIPGVDITGLAEGAVREARDRVRAAFRNSGFSFPLDRILINLAPAGLKKDGAALDLPIALSVMAAAEIAPVSGDLLVMGELELSGKIRPVRGVLAAIAAGLSEGISEFIVPAENAGEAAILAQKGARFTAAESLQEAVNALFIREEQGALPASFDALPVSADTGGAFGISPEGDFSEVRGQAVYKRALEIAAAGGHNVLVFGPPGAGKTMLARRLTSIMAPLTPDEAVEVTRLYSLAGPLMYNGDPYSQKFIDRLIINAPFRAPHHSASAEGILGGGRNPRPGEISLAHFGVLFLDEAPEFRINVLQALREPLEDRVISISRAEGPVRLPAEFQMLMAANACPCGRLGIQETDNACCCSPEEINRYWRKFSGALLDRVEIRVAVLPPKVGEMNAALGKKARPEEKSAVIMERVKAAVEIQRLRFKGTQIRRNALLPAGKTASLCPLSEKAESALNTAISRMGLSGRAFHGVLRVARTIADLEGSEVIETEHILEAIQHRRLGEDPWEILSI

SEQ ID NO: 71927 - DNA, 537 bp, Unknown
  Obtained from environmental sample
  misc_feature (1)..(537): n is a, c, g, or t
gtgtcagcgctcacaggcaatgcgtcaaatgacgctggaagagcgccttgttcctctcttataaaaagcgcgttaaccgcttcctgtaaactttccgccgctgtaaagcgcgcgcctttttgcgcaagaatagccgcctctcccgcgttttccgccggaacaataaactcgctgattccttcggacaatcccgcggcgatagcggcaagcactcccctcaccggcctgatttttcccgaaagctcaagctcgcccatcacaagcaggtcaccggaaacaggcgcgatttccgccgccgccatgacagacagagcgataggcaagtcaagcgctgccccgtcttttttcaatcccgccggcgccaggtttatcaaaatcctgtccaacggaaaactgaacccggaattccgaaacgccgccctcaccctgtcccgcgcttcccttaccgctccttccgcaagccccgtaatatcgacaccgggaattccccgccttatatccgcctcaacccggataatgattccgcccgccccatag

SEQ ID NO: 71928 - protein, 178 aa, Unknown
  Obtained from environmental sample
  misc_feature (1)..(178): Xaa is any amino acid
MSALTGNASNDAGRAPCSSLIKSALTASCKLSAAVKRAPFCARIAASPAFSAGTINSLIPSDNPAAIAASTPLTGLIFPESSSSPITSRSPETGAISAAAMTDRAIGKSSAAPSFFNPAGARFIKILSNGKLNPEFRNAALTLSRASLTAPSASPVISTPGIPRLISASTRIMIPPAP

SEQ ID NO: 71929 - DNA, 462 bp, Unknown
  Obtained from environmental sample
  misc_feature (1)..(462): n is a, c, g, or t
atggaaaaagacaatattataataaaaaatttgaatgataatgaaattggaaaaattatgcatttattaatagctcttgctgatcatcataataagacatcagtaaatttcattggtttttacccattaaaaccttttgaaaaaattatatctgaaatatctcaaaagattaaagatggatattcaacaatcgatattattcaagaaaatggtcaaattattgcttttagtcaatacacaattgaacaaaatttaggtatactggaatatcttgtcattctacctgaatatagaaatcgtggatatggcaaattacttgtggatagggtattaaaatattttaaggataaaaatattgcaagagttgaattaaaagttgcatatgggaatgatgatgcaaaaagattttatgaaaattatggatttaaattattatcgcagaatatgacaatgattttatag

SEQ ID NO: 71930 - protein, 153 aa, Unknown
  Obtained from environmental sample
  DOMAIN (65)...(143): Acetyltransferase (GNAT) family
  misc_feature (1)..(153): Xaa is any amino acid
MEKDNIIIKNLNDNEIGKIMHLLIALADHHNKTSVNFIGFYPLKPFEKIISEISQKIKDGYSTIDIIQENGQIIAFSQYTIEQNLGILEYLVILPEYRNRGYGKLLVDRVLKYFKDKNIARVELKVAYGNDDAKRFYENYGFKLLSQNMTMIL

SEQ ID NO: 71931 - DNA, 603 bp, Unknown
  Obtained from environmental sample
  misc_feature (1)..(603): n is a, c, g, or t
atgaaacagaaaggattttttgatgaagccgacaggctaaagaagttaagcgagctgggtgattcattggaaaaactcaatgaacacatagaatggaatgattttcaaaggccgttaagcagagcgtttgaaaaagaagcgaaggggccgggcggacggccgccgtttgattatgtaatgatgttcaagatattaatattacaaaaaatatataacataagcgatgaccagacagaataccagataaacgacaggctgagttttcaacggtttatagggatacaattatacgacactgtacccgacgcaaaaacgatatggcattttaaggaagtattgaaagaaacggacgtactagaaaaaatatttaagatgtttacagaaaagcttgagaaaaaaggggtaataacccaaagcggaagcatagtggacgcgacatttgtagaagcgccgaaacaaaggaatacgaaagaagaaaaactaagaataaaagaagggaaaatactaaaggaatggcagaccgaagaaaacagcataaaatgcgcaaaagaactgacgcgcgtgatgacaaaaacaagacgtcatacgggttnagatctataa

SEQ ID NO: 71932 - protein, 200 aa, Unknown
  Obtained from environmental sample
  misc_feature (1)..(200): Xaa is any amino acid
MKQKGFFDEADRLKKLSELGDSLEKLNEHIEWNDFQRPLSRAFEKEAKGPGGRPPFDYVMMFKILILQKIYNISDDQTEYQINDRLSFQRFIGIQLYDTVPDAKTIWHFKEVLKETDVLEKIFKMFTEKLEKKGVITQSGSIVDATFVEAPKQRNTKEEKLRIKEGKILKEWQTEENSIKCAKELTRVMTKTRRHTGXDL

SEQ ID NO: 71933 - DNA, 1428 bp, Unknown
  Obtained from environmental sample
  misc_feature (1)..(1428): n is a, c, g, or t
atggcaaaagctgcaaaagggaaaaaagcaaaattatcggataaattgtttttcaagctgaaaagctgttgggaaggaattgataaaaagacggaaaaagaagttgaggaacttgccgagtcttacaaacaatttttaaatacgggaaagaccgagcgcgaatgtacccagacggcttgcgaaatccttgagaaaaacggctttgtaaatatcgacactttaaaagataaaaaatttacggcaggcatgaaggtttatcagaatatccgaggaaagtccgttattgccgccgtcgtcggaaaaaaacccgtcattgagggctgtaacattctgggcgctcatgtagactctccccgccttgatttaaaacagaaccctctatacgaagaaagcgaacttgcgctttttgacactcactactacggcggcatcaaaaaatatcagtggacgaccataccgctttccatgcacggcgtatttgtaaacgaagccggtaaaaaaacaaccatcaatatcggcgaggactcaggcgatcctgttttcacgattacagaccttctgccccaccttgcaaaggagcagatggataaaaaagcatcgttagtggtagagggcgaagacttagatattcttgcgggttcgcgtccctattcggataaggacgaaaaagaaaaagtaaaattgtatctgcttgatctgctaaacaaaaaatacggtatcacagaaaaaaactttgcaagcgcggagattgaatttgttcccgctttcaaggcaagcgacgtagggctggacagaagtttaatcggctcttacgggcacgacgaccgctgctgcgccttccccgccctgcaggctgtcaccgctattgcgcgtgaaaaaggcgcgcccaacaaaacattggtttgttatctttcagacaaagaagaaatcggttctgtcgggaacacgggcgcgcgttccgtcagctttgaaaattttatcgctctcctttgcggcggctctcaggcggacttacggctgtgcttctctcgctccgccatgctgtccgccgatgtcaacgctgcgtttgatccaacctatgcaagcgtgttcgacaaaaacaacggatcgtttatcgggaagggaattgtgctttcaaagtacacaggctcaggcggcaagagcggagcgagcgacgccaacgctgaattctgcgcgaaggtgcaggcgatcatgagcaggaacaaagttcagtggcaattcggcgaattgggaaaagtagacaagggcggcggcgggacaatcgccttgtatgccgccaatttgggaatagaagttattgattgcggcattcccgtgctgtcaatgcattcgccgtttgaggtgatcagtaagattgatctgtatacaacgtataggggatatatcgctttttatagggaagcgtag

SEQ ID NO: 71934 - protein, 475 aa, Unknown
  Obtained from environmental sample
  DOMAIN (45)...(472): Aminopeptidase I zinc metalloprotease (M18)
  misc_feature (1)..(475): Xaa is any amino acid
MAKAAKGKKAKLSDKLFFKLKSCWEGIDKKTEKEVEELAESYKQFLNTGKTERECTQTACEILEKNGFVNIDTLKDKKFTAGMKVYQNIRGKSVIAAVVGKKPVIEGCNILGAHVDSPRLDLKQNPLYEESELALFDTHYYGGIKKYQWTTIPLSMHGVFVNEAGKKTTINIGEDSGDPVFTITDLLPHLAKEQMDKKASLVVEGEDLDILAGSRPYSDKDEKEKVKLYLLDLLNKKYGITEKNFASAEIEFVPAFKASDVGLDRSLIGSYGHDDRCCAFPALQAVTAIAREKGAPNKTLVCYLSDKEEIGSVGNTGARSVSFENFIALLCGGSQADLRLCFSRSAMLSADVNAAFDPTYASVFDKNNGSFIGKGIVLSKYTGSGGKSGASDANAEFCAKVQAIMSRNKVQWQFGELGKVDKGGGGTIALYAANLGIEVIDCGIPVLSMHSPFEVISKIDLYTTYRGYIAFYREA

SEQ ID NO: 71935 - DNA, 687 bp, Unknown
  Obtained from environmental sample
  misc_feature (1)..(687): n is a, c, g, or t
gtgcctcgtttccgtcccggtcccgatcctgattttccgcgattagagccaacggtatattttcaattccccgatccaaacgaatgtgaagacaacatcgtcggcgtaggcggcaacctttcgccgggaatgttactctccgcctacgagcagggaatcttcccgtggtacggacccgaagaccccctcatctggcaatcccccgatcctcgctgtgtaatctttcccgaaaaactgcacgtctcctcctccatgcgaaaaatcttaaacgccgacacattcaaaataacctacgatgaaaactttgacggagtaataagaggctgtgccgaaaagatacgccccggtcaaaacggaacatggatcacaaaagacataatcgaggcgtacacggaattacatcaacttggctttgcgcattccgccgaagcatggcaggacggaactcttgtcggcggctgttacggtttactgcttggaaaagttttctgcggcgaatcaatgttcgccaacgtgcccaacgcctcaaaagccgccttcttaagttttgcggaaaaactttttgcggagggaaccgctttcattgactgtcaaataccgacaaggcatttaatcagtcttgggggggaagaaatgtcacgaagggattttcttgagttactgaagaaatatatagtcttacgttaa

SEQ ID NO: 71936 - protein, 228 aa, Unknown
  Obtained from environmental sample
  DOMAIN (41)...(214): Leucyl/phenylalanyl-tRNA protein transferase
  misc_feature (1)..(228): Xaa is any amino acid
MPRFRPGPDPDFPRLEPTVYFQFPDPNECEDNIVGVGGNLSPGMLLSAYEQGIFPWYGPEDPLIWQSPDPRCVIFPEKLHVSSSMRKILNADTFKITYDENFDGVIRGCAEKIRPGQNGTWITKDIIEAYTELHQLGFAHSAEAWQDGTLVGGCYGLLLGKVFCGESMFANVPNASKAAFLSFAEKLFAEGTAFIDCQIPTRHLISLGGEEMSRRDFLELLKKYIVLR

SEQ ID NO: 71937 - DNA, 1737 bp, Unknown
  Obtained from environmental sample
  misc_feature (1)..(1737): n is a, c, g, or t
ttgcccagcgaatcattgccggcaatgttcctccngcttctaagaaactttagtatctacgcccttgatatgggttctctccttgccggcacaaagtaccgcggcgactttgaagaaagagtaaagcgggttgtcgaagaactgttaaaaaaagaaaagacaatactttttatcgatgagatacatacccttgtcggggcgggagcggtttccggcggcgcgatggacgcttccaatctgctaaagcccgcgcttacttccggtaaactccgctgtatcggctccacaacgcatgaggagtacaacaagttctttgaaaaagaccgggcgctttcacggcgtttccaaaaaatcgatattaacgaaccttccgtagaaacagcaattgatatactcaagggagttaaatgccgatacgaagactaccaccatgttcactacagcgacgaagttgtggagacagccgtgcgtctttccgcgcaatttatcacagagcgccgcctgcccgataaagccattgatgtaattgacgaagcgggcgcttacgcgcggatagaagcgtacaagcacgcgaatgaagattcaagcgaagacggcaagaccgcaaacgagtcggttgaacaaccgacggttgaagtgtcggaagcaaaagcattggcggaagaaatgacggcggctgagaagacgcacaagtcttcgacagtgcaagacgctcaaattgaaaaattggaaattaccctgcctgtcattgagtcagttgtttcaaaaatcgcgcgaataccgcagaggtcggtgggcgagagcgagaaagacaaacttaaagatttggagacaagacttaaacaaaaagtctttggtcaggacgacgctatatcggcggtggtaaaagccgttaaacgttcaagagcgggattcagggcggacggcaaacccgtagcaaactttttatttgtcggacccacaggcgtaggcaagacagaacttgcgcgtcagttggcggaaacattgggaatttccatgctccgctttgacatgagcgagtatcaagagaagtatacaatctcgcgtcttatcggctcctcgcccggctatgtcggctacgaagacggcggtcagcttaccgacgcggttcgcaaacagccgcacgccgtagtcctacttgatgaaattgaaaaagcccatagcgatatcttcaatatactcctgcagattatggattatgccacccttaccgacaatcagggacgcaaggcggacttccgcaatgtaattttgataatgacaagcaacgccggagcgagagagattggcaaggggcttatcggttttggagatcgtattcaagatgacagcgcggtaaacgaagctgtggaaaaaatcttcactcccgaattccgcaacagactggacgccattgtccgctttgggcatctttcgcgcgaaattatggtttccattgtccataaagaattggacgctttcaccgcccagcttacggaaaagaacgtaacccttaccgttacggaaacctgtgtggacaagttggcggaagaaggctacagcaaagaattcggcgcaaggaacgcgggcagactaattgaggaaaagataaaaagcttctttgtagatgaagttcttttcggcagtctgagcgagggcggaagcgcggttgtggactggcgcgacggctactgcatggacatcgaagaaacgcaagatgtaacagcggaaaattag

SEQ ID NO: 71938 - protein, 578 aa, Unknown
  Obtained from environmental sample
  SIGNAL (1)...(21)
  DOMAIN (268)...(541): Torsin
  misc_feature (1)..(578): Xaa is any amino acid
MPSESLPAMFLXLLRNFSIYALDMGSLLAGTKYRGDFEERVKRVVEELLKKEKTILFIDEIHTLVGAGAVSGGAMDASNLLKPALTSGKLRCIGSTTHEEYNKFFEKDRALSRRFQKIDINEPSVETAIDILKGVKCRYEDYHHVHYSDEVVETAVRLSAQFITERRLPDKAIDVIDEAGAYARIEAYKHANEDSSEDGKTANESVEQPTVEVSEAKALAEEMTAAEKTHKSSTVQDAQIEKLEITLPVIESVVSKIARIPQRSVGESEKDKLKDLETRLKQKVFGQDDAISAVVKAVKRSRAGFRADGKPVANFLFVGPTGVGKTELARQLAETLGISMLRFDMSEYQEKYTISRLIGSSPGYVGYEDGGQLTDAVRKQPHAVVLLDEIEKAHSDIFNILLQIMDYATLTDNQGRKADFRNVILIMTSNAGAREIGKGLIGFGDRIQDDSAVNEAVEKIFTPEFRNRLDAIVRFGHLSREIMVSIVHKELDAFTAQLTEKNVTLTVTETCVDKLAEEGYSKEFGARNAGRLIEEKIKSFFVDEVLFGSLSEGGSAVVDWRDGYCMDIEETQDVTAEN

SEQ ID NO: 71939 - DNA, 342 bp, Unknown
  Obtained from environmental sample
  misc_feature (1)..(342): n is a, c, g, or t
ttgagtatatcaattgctgtttctacggaaggttcgttaatatcgattttttggaaacgccgtgaaagcgcccggtctttttcaaagaacttgttgtactcctcatgcgttgtggagccgatacagcggagtttaccggaagtaagcgcgggctttagcagattggaagcgtccatcgcgccgccggaaaccgctcccgccccgacaagggtatgtatctcatcgataaaaagtattgtcttttctttttttaacagttcttcgacaacccgctttactctttcttcaaagtcgccgcggtactttgtgccggcaaggagagaacccatatcaagggcgtag

SEQ ID NO: 71940 - protein, 113 aa, Unknown
  Obtained from environmental sample
  misc_feature (1)..(113): Xaa is any amino acid
MSISIAVSTEGSLISIFWKRRESARSFSKNLLYSSCVVEPIQRSLPEVSAGFSRLEASIAPPETAPAPTRVCISSIKSIVFSFFNSSSTTRFTLSSKSPRYFVPARREPISRA

SEQ ID NO: 71941 - DNA, 1101 bp, Unknown
  Obtained from environmental sample
  misc_feature (1)..(1101): n is a, c, g, or t
gtgcgaaaaatggttctgaacggaacgcttaaagagtttatactcgcggatgtttttaatcttctgacacaacagaggattacgggacgccttgacctttccagcgggaagcgtgaggcgtgtattgtttttaaggatgggatgatcgtaggcggcggagacggcgaggaaaaccttaccaataagctttttaattacttgattgacataaaacgcaagacatcggagcaaataagccctattttcagcgccaataccaacgacctcagcgccctatcgtccgccctgattgaaaacaaccttttaaccgcggcggaactcaaaggcttcgccgaatcgtgcattgaggatatttgctgtggtctcctgacttggaacgagggcacctaccgcttcaattccgtaggcagcgtgtccgatattgcttgcggggtcgtcaacatatccgccgagaacatcataatggaggggatgcgccgcgttgacgagtgggcgcgtatgcaggactacataacagaggatatggttttcgcccccgcccccaattctgtcggcagcgacattcctcccgacgagatcgacatagcgtcctcaccggaggagtacatcttcggcctgctagacggaaacaacaccgtcaaaagcattaagaaatcgtgctgcctctgcgagtacaaagtttacgaatcgataaacttcttgttgcaggcgcagcgcataacggccatgcaacaacactacacggaatccattaaagcggcgctggcgcgtaaagaggcggaggtggcgtcggtacagcggacgacgttcttcagctcgcttatcgcggcggcgatcgcgggagcgttcatcgtctttttcctcttttgccggacgcatttgttacccaaacttgacgccgacacttatgaccgcgataccgttgaacaccgccggataaacgaggtaatggggtcggacgccatgctgggcgcgtcactgctgtaccgggcgattaacggggggcaaggcaataatccggatacgctcaaaaaggccgggcttttgacggatagggatttgtatgggcgggcggatatttttgggcgttcgggacgttga

SEQ ID NO: 71942 - protein, 366 aa, Unknown
  Obtained from environmental sample
  misc_feature (1)..(366): Xaa is any amino acid
MRKMVLNGTLKEFILADVFNLLTQQRITGRLDLSSGKREACIVFKDGMIVGGGDGEENLTNKLFNYLIDIKRKTSEQISPIFSANTNDLSALSSALIENNLLTAAELKGFAESCIEDICCGLLTWNEGTYRFNSVGSVSDIACGVVNISAENIIMEGMRRVDEWARMQDYITEDMVFAPAPNSVGSDIPPDEIDIASSPEEYIFGLLDGNNTVKSIKKSCCLCEYKVYESINFLLQAQRITAMQQHYTESIKAALARKEAEVASVQRTTFFSSLIAAAIAGAFIVFFLFCRTHLLPKLDADTYDRDTVEHRRINEVMGSDAMLGASLLYRAINGGQGNNPDTLKKAGLLTDRDLYGRADIFGRSGR

SEQ ID NO: 71943 - DNA, 1593 bp, Unknown
  Obtained from environmental sample
  misc_feature (1)..(1593): n is a, c, g, or t
atggcgacacccaaaagaatcctgcccgtaggtatccaagacttccccgatatacgtaagcggggttttgtctatgtggataagaccgcacgcgcctacgagtttatcaccggctccgggaaagcgttcttcctttcgcgtccgcgacgcttcgggaagtcgctgctctgttcgacgcttggggcgatctttgaggggcggcgggagctgttcggtgagattgcaggaaggccggcgttggccttgaattcgctagattgggagtggaagacgcacccggtgatccgcattgacttgagtgccggggagtactccaagcacggggtggaggcgctttacgatacgttgcacgcggagattcggagggaggccggaaagtacggggttaagattgataaaacggtcagtccggccagtcaattcaaaaatcttatagaggaagcctgcaaaaaagcaggcgaagacgcggtcgtgattattgatgaatacgacagcccgctgacggataccctaaacctgcggaatgtccatattgaattgcgggacgcgctcaaggcgttctacggcgtcctaaaatcttacgacgcccaactgcgctttgtctttattaccggtgtgagcaagttctcccacgttagtatcttttccgccatgaaccaactgtatgacatgacctttgacccgcgttacgccgacctatgcggattgaccgaagaggagataacggcaaactttgagcctgaaatagacggtatcttgaaaacctccgggcgcagccgcgaagggtacattgatgcgttgcgcagcttctacaacggctaccgcttctccgaagccccgctcacggtctacaacccgttcggtatgctcaaccattttgaacataacggaagattcgaggactattggtacaacaccgccacgccctctttccttgtggaactggtcgagaagaaaaagatcaatgtcctaaacatgaacaatatgcaggttagaaacatagacttcagtaagtacgatatagacaacatgacgcccgcgccgattttgtgccaagccggctacctcacgatttccacatacaacgcggaaacgggcgtctacacgctcgatttccccaacaacgaggtacgcgcctcattcgcaggaacgcttgtaagacactacgtaggagaggcggacgacgatagactggacttaaaactgttaagcgcaatagccgaaggcaatctggaaacggccatagataccctgaaccgcttcctcgccgcaatcccatacgagatcgtcgttgaaaaagagaagtacttccaaacggtggtgcacctgctattcacgatgctgaacctcaactgccgctcggaggtgcaaatagcggcgggacggatcgatacgctggttgtgacgcaaaattttgtctattgctttgagttcaagttagacggtagcgcgaaggcggcgctggaacagattgacggtaaggagtacgctttcccgtggacaggtagcggtaagaaggtgtttaaggtcggggtgaactttgactataaaaagaaaaggataggggagtgggtgtccgcaaacgggatatga

SEQ ID NO: 71944 - protein, 530 aa, Unknown
  Obtained from environmental sample
  DOMAIN (1)...(524): Protein of unknown function (DUF1703)
  misc_feature (1)..(530): Xaa is any amino acid
MATPKRILPVGIQDFPDIRKRGFVYVDKTARAYEFITGSGKAFFLSRPRRFGKSLLCSTLGAIFEGRRELFGEIAGRPALALNSLDWEWKTHPVIRIDLSAGEYSKHGVEALYDTLHAEIRREAGKYGVKIDKTVSPASQFKNLIEEACKKAGEDAVVIIDEYDSPLTDTLNLRNVHIELRDALKAFYGVLKSYDAQLRFVFITGVSKFSHVSIFSAMNQLYDMTFDPRYADLCGLTEEEITANFEPEIDGILKTSGRSREGYIDALRSFYNGYRFSEAPLTVYNPFGMLNHFEHNGRFEDYWYNTATPSFLVELVEKKKINVLNMNNMQVRNIDFSKYDIDNMTPAPILCQAGYLTISTYNAETGVYTLDFPNNEVRASFAGTLVRHYVGEADDDRLDLKLLSAIAEGNLETAIDTLNRFLAAIPYEIVVEKEKYFQTVVHLLFTMLNLNCRSEVQIAAGRIDTLVVTQNFVYCFEFKLDGSAKAALEQIDGKEYAFPWTGSGKKVFKVGVNFDYKKKRIGEWVSANGI

SEQ ID NO: 71945 - DNA, 948 bp, Unknown
  Obtained from environmental sample
  misc_feature (1)..(948): n is a, c, g, or t
atggctacccttaaaagccttaaaaaccgttatgaaccgtggaaagctttgcgggatgaagtcgccgatttgcaagccttatttgaactggcgactgaggcaaaagatgaaagtgaaagctccgatattgaaaaaataataaaagatttaaccgcccgctatgaaaaacagaatatgtttgaacttatgacgggcgagatggataaaaacccctgttttcttacagtccattcgggagcgggcgggactgaagcctgcgactggacgcagatgctctaccgtatgtacctgcgttgggcggagcaaaaaggcttttcagttgaagaagttgaccagcaggaagcggaaggggggctaaagtcagccacttgccgtatagacggggacttcgcctatggttatttaaaaggcgaatcgggaattcataggcttgtaaggatcagcccatttgacgcaaacgcgcgtcggcatacgtctttcgcgtcggtttacctttttcccgttattgatgatacaatcgaagtagacataaaacccgaagatctgcgtgtggacacctaccgctcgggaggtgcgggagggcagcatgtaaacaagacggacagcgcggttcgttttacccacctgccgacaggcattgtcgttgcctgccagaacgagcgcagtcagattaaaaaccgcgcaatcgcaatgagcatgctaaaagcgcggctttacgagtattacaggcaggagaaggaaaaagaaaacgaaaaatattcgcaggagaaaaaagatatttcctggggacaccagataagatcgtatgtgttccagccgtatacaatggtaaaagattaccgtacaaaagttgaaaagggaaatatacaggctgtaatggacggcgatatcgatccttttattgaagagtatttaaggttttcatggcgtaatggggagatgaattga

SEQ ID NO: 71946 - protein, 315 aa, Unknown
  Obtained from environmental sample
  DOMAIN (29)...(138): PCRF domain
  misc_feature (1)..(315): Xaa is any amino acid
MATLKSLKNRYEPWKALRDEVADLQALFELATEAKDESESSDIEKIIKDLTARYEKQNMFELMTGEMDKNPCFLTVHSGAGGTEACDWTQMLYRMYLRWAEQKGFSVEEVDQQEAEGGLKSATCRIDGDFAYGYLKGESGIHRLVRISPFDANARRHTSFASVYLFPVIDDTIEVDIKPEDLRVDTYRSGGAGGQHVNKTDSAVRFTHLPTGIVVACQNERSQIKNRAIAMSMLKARLYEYYRQEKEKENEKYSQEKKDISWGHQIRSYVFQPYTMVKDYRTKVEKGNIQAVMDGDIDPFIEEYLRFSWRNGEMN

SEQ ID NO: 71947 - DNA, 867 bp, Unknown
  Obtained from environmental sample
  misc_feature (1)..(867): n is a, c, g, or t
atgaaattcagcgaaaaattaaagaatttttttagcgggaagctggtaataaatgaagaactatttgacgaactttgcgatttgttaatagaaggcgattttggcgcgagtcaggcgtataaaacggttgagttattaaaagatcaatgtaaaaaagacaacgccgccgcgttgcccgataaattggctcaattacttgaagacgagttaaaaaaagcgccggctgttaatcattctgatgattcggaaaaactaaccgctattttgcttcttggcgtaaatggagtaggcaaaacaactaccgccgcaaagctttcccacctttacaatacaaaattaaataaaaaaacaatactcgccgctgcggacacattcagagccgcggcaattgatcaattaaaaattcacggagaaaaattgaatacgcgggtagtggctcataaacagggcggagaccctgcggcggtagtttatgacgcgttggaagccgcgcagtcggggggcgcggatgttgttatagcggacaccgccggaagaatgcatacaaaatccgcgttagttgaagaattacgcaaaattgacagggtagtggagtcaagagcgggcggagcgaattatattaaataccttgtgctggacgcgactaccggaagaaacgcttttgcgcaggcggaaatatttcacggcgcggttgttcttgacggagtaatattgacaaaatacgattctacggcgaagggcggagtggttttttctttggcggacgaattaaaactgcctgtggcgtatatatgtacaggcgaaaaatacggggatatcgaattatttgatcctcataaatttgcgagggaatttgcgggtatttaa

SEQ ID NO: 71948 - protein, 288 aa, Unknown
  Obtained from environmental sample
  DOMAIN (84)...(287): SRP54-type protein, GTPase domain
  misc_feature (1)..(288): Xaa is any amino acid
MKFSEKLKNFFSGKLVINEELFDELCDLLIEGDFGASQAYKTVELLKDQCKKDNAAALPDKLAQLLEDELKKAPAVNHSDDSEKLTAILLLGVNGVGKTTTAAKLSHLYNTKLNKKTILAAADTFRAAAIDQLKIHGEKLNTRVVAHKQGGDPAAVVYDALEAAQSGGADVVIADTAGRMHTKSALVEELRKIDRVVESRAGGANYIKYLVLDATTGRNAFAQAEIFHGAVVLDGVILTKYDSTAKGGVVFSLADELKLPVAYICTGEKYGDIELFDPHKFAREFAGI

SEQ ID NO: 71949 - DNA, 1329 bp, Unknown
  Obtained from environmental sample
  misc_feature (1)..(1329): n is a, c, g, or t
ttgggaagacggaagaaaaatatcggaaacaagggtaagaaattgaaaaagtcgtgggtattatttgtagcgtctcgttatatttttaaaggacgaagcagttctcccgttttagctgttttgggaatagcgataggagtgcttgctctgatagtgattatcgccgttatgaatggatttcaattaggttttatagagagtattttagaagtttcgtcgtttcatttacgcatagaatcttttgatcagaaaaatattaaggaaatacaggatattatgctggggattccaggcgtaagagcggcggttccttttaaggaatatcaggctatcgcaagaggtaaacgcttaaaccagcaagcggtattaataagagggttaggcgaaaacactctggaaatagataaagcaatggccggtaaattggattttgaggacggctcttttgatttatcaaaaaacaaaaatatattattgggttctgaacttgcttacaggcttggtctttccataggagacgatataactcttttttcgcttacaggcattttatcgcaggaggacggaagcagttttgacggacaggttacgggaatattcagaacaggatactatgaatatgactgcagctgggtttttatcaacatagaaaacaattcatttttacaaaacgagagcgatttaatactggggataaaacttgcaaaccgttttatggacaaagcgactttggaacaggcaaaaaaaagattatccgcttataaagacataaaaataaccggttggcgcgattataaccgttcttttttcggcgcgctaagaaccgaaaaactatttatgtttatacttgtagggcttatttttatcgtggtcggattaaatatttttcaggcgcaaagaagatcggttctgcaaaggcgcgaagaaatcggtttattacgcgccgtaggcggctcgcgcagggcggtgcgttttgtattcgttcttgacggagcgattatagggcttacaggcgcgtctatcggcatgatttttggattggctatcgctttgcatatagcaggcttttttacattagtggaaaaaataataaattggcttatagatataatgaatatattggcgggttcgcttggagcgggaatggctggaaattttgccgtgttttcccccgcggtattctacataaaagaaataccttcgcggcttcttccttttgaagtagtgttaatatttatgtttggatttatatccgcttttgcggcggcttggattgcgtcaagaaaagtatctaatatacaaccggcggaggtattgcgttatgaatga

SEQ ID NO: 71950 - protein, 442 aa, Unknown
  Obtained from environmental sample
  DOMAIN (227)...(435): Predicted permease
  misc_feature (1)..(442): Xaa is any amino acid
MGRRKKNIGNKGKKLKKSWVLFVASRYIFKGRSSSPVLAVLGIAIGVLALIVIIAVMNGFQLGFIESILEVSSFHLRIESFDQKNIKEIQDIMLGIPGVRAAVPFKEYQAIARGKRLNQQAVLIRGLGENTLEIDKAMAGKLDFEDGSFDLSKNKNILLGSELAYRLGLSIGDDITLFSLTGILSQEDGSSFDGQVTGIFRTGYYEYDCSWVFINIENNSFLQNESDLILGIKLANRFMDKATLEQAKKRLSAYKDIKITGWRDYNRSFFGALRTEKLFMFILVGLIFIVVGLNIFQAQRRSVLQRREEIGLLRAVGGSRRAVRFVFVLDGAIIGLTGASIGMIFGLAIALHIAGFFTLVEKIINWLIDIMNILAGSLGAGMAGNFAVFSPAVFYIKEIPSRLLPFEVVLIFMFGFISAFAAAWIASRKVSNIQPAEVLRYE

SEQ ID NO: 71951 - DNA, 780 bp, Unknown
  Obtained from environmental sample
  misc_feature (1)..(780): n is a, c, g, or t
ttggatttatatccgcttttgcggcggcttggattgcgtcaagaaaagtatctaatatacaaccggcggaggtattgcgttatgaatgatacgcagggaaatgttttacttatagtaaaaaacatcgtaaagaattatgtttcgggaaacgagacgcttcatatcctaaaaggcattaactttgagattgaagagggaaaatccgtcgcaatcagcgggcagagcggaagcggaaaaagtacgcttttaaatatcataggcgggcttgataaggccgatgagggaagtgtatttttaaacggcgttgatattacatcgctttcagaaaaagagatttcattgtatcgatccacgcagacaggatttgtttttcagtttcattatcttttaaaagattttacggcgctggaaaatattatgcttccggcttacatcgcgggggtaaataaaaaagaagcgattgacagggcaagacagttgttagccgacgtaaaactggaagacagaagcgggcattttccgtcgcagctttcgggcggggaacgtcaaagggtagcggtggcgcgttctatggtaaatgatcccgcgctgattcttgcggatgaaccgacgggaaatttagatccgcaaaacagcgaaattgcggcggaattgttatacgaaagcgcgcaaaaaagaaaaaaaacattgattgtagtcacgcatgataaaaaagtagcgcaaagggcgtctgtcagatttacattgataaacggtcaattatcagaggaagagatttga

SEQ ID NO: 71952 - protein, 259 aa, Unknown
  Obtained from environmental sample
  DOMAIN (38)...(256): RecF/RecN/SMC N terminal domain
  misc_feature (1)..(259): Xaa is any amino acid
MDLYPLLRRLGLRQEKYLIYNRRRYCVMNDTQGNVLLIVKNIVKNYVSGNETLHILKGINFEIEEGKSVAISGQSGSGKSTLLNIIGGLDKADEGSVFLNGVDITSLSEKEISLYRSTQTGFVFQFHYLLKDFTALENIMLPAYIAGVNKKEAIDRARQLLADVKLEDRSGHFPSQLSGGERQRVAVARSMVNDPALILADEPTGNLDPQNSEIAAELLYESAQKRKKTLIVVTHDKKVAQRASVRFTLINGQLSEEEI

SEQ ID NO: 71953 - DNA, 1812 bp, Unknown
  Obtained from environmental sample
  misc_feature (1)..(1812): n is a, c, g, or t
atggactacgatacaatcgttatcggcggcggtcatgccggaatagaagcgtccctagcgacaagccgccttggattttccactctcctcgttacacagaacccagacagaataggggctctttcctgcaaccccgcgatcggcggtctttccaaaggcaaccttgtgcgcgaagtagacgctctcggcggcgaaatggcaaaattaacggacgcgacaatgattcaataccgtgtgcttaaccgctccagaggtcccgccgtacaggctccgcgcgcgcaagccgacaaacaaatgtaccaaatggcggcgcgttccgttttggaaaagcaaaaaaatcttacaatttttatggataccgttacggatttattaatagaaaatactgccgataaaaataccgccgcgcagggagattccgctaaagtctgcggtattgttacagcgcggggacatcgtataacggcgcataccgtgatactctctgccgggactttcatggaaggaaaaatatttatcggcgaatatgacgctccctgcggacggcttggggaatcggcggcggaaggactgggcaaatccttgcgccgtcttggctttcctgtaggacgattaaagacgggcacaccggcgcggatagcggagccttccattgatttttcaaaaatggaaaaacaggacggcgatgaaatgcgcccgttttctttttgcgctcaaacaggagcgggcggcggcgttaaagacagaccctctttgccgtgctggattacttacactaattcaaaaacacacgaaattataaaagcaaatatacatcgatcccctttgttcggcggaaaaataatcggagtgggagcgcgttactgtccgtccatcgaggataaagttgtgcgtttcccccagcgcgagcgtcatcatatttttattgagccggaaggaatttcaactaacgaaatgtacatgaacggcgcgtcaagctctttgccggaggacgttcagcgcgattttattcacagcattgcgggacttgaagacgcaaaaattgtccgccccgcctacgcggtcgagtatgattacatcgatcccctcgatctttatccgtctcttgaatcaaaacgtctatccggtttttttacggcggggcagaccaacggatcgtcaggttacgaagaagccgccgcgcaagggctaatggcgggaataaacgccgcaatgaaaatgctgggaagacagccgcttattttgtcgcgcgcggaagcgtatatcggcgttttagttgacgaccttacaacgcttggaacaaaagaaccgtaccgcatgtttacaagcagggcagagcaccgccttatgctccgccacgacacagcggacacaagactcactcccaaggggcgcgatgtcggacttgtagacgacattcgctgggaacgctttttggaaaaaataaaaatgttagacgaaattaatgaactgcttgcaaagcgaaaacagagcgattattcgcttgacgaaaatgatgcggaattgtcccgttatccggctgaattggcggagagggcattgctcgataaaaagtacgccggttatatagaaaaagaaattcgctttgccgcaaaagcggctaaaatggacgctattaaacttgacccgaatttagattatactgctatcatgggactatcaaccgaggcaaaggaaaaactggcggctgtaaaaccgctgaatgtgggtcaggcggcgcggatacccggcgtaaggcagggagatattgcgttgttgattattttggcgaataagagaggcgcaaaatga

SEQ ID NO: 71954 - protein, 603 aa, Unknown
  Obtained from environmental sample
  DOMAIN (4)...(411): Glucose inhibited division protein A
  misc_feature (1)..(603): Xaa is any amino acid
MDYDTIVIGGGHAGIEASLATSRLGFSTLLVTQNPDRIGALSCNPAIGGLSKGNLVREVDALGGEMAKLTDATMIQYRVLNRSRGPAVQAPRAQADKQMYQMAARSVLEKQKNLTIFMDTVTDLLIENTADKNTAAQGDSAKVCGIVTARGHRITAHTVILSAGTFMEGKIFIGEYDAPCGRLGESAAEGLGKSLRRLGFPVGRLKTGTPARIAEPSIDFSKMEKQDGDEMRPFSFCAQTGAGGGVKDRPSLPCWITYTNSKTHEIIKANIHRSPLFGGKIIGVGARYCPSIEDKVVRFPQRERHHIFIEPEGISTNEMYMNGASSSLPEDVQRDFIHSIAGLEDAKIVRPAYAVEYDYIDPLDLYPSLESKRLSGFFTAGQTNGSSGYEEAAAQGLMAGINAAMKMLGRQPLILSRAEAYIGVLVDDLTTLGTKEPYRMFTSRAEHRLMLRHDTADTRLTPKGRDVGLVDDIRWERFLEKIKMLDEINELLAKRKQSDYSLDENDAELSRYPAELAERALLDKKYAGYIEKEIRFAAKAAKMDAIKLDPNLDYTAIMGLSTEAKEKLAAVKPLNVGQAARIPGVRQGDIALLIILANKRGAK

SEQ ID NO: 71955 - DNA, 624 bp, Unknown
  Obtained from environmental sample
  misc_feature (1)..(624): n is a, c, g, or t
atgattaaattagccgtctttcttggcaatcccggcgcggaatattcgcgtaacaggcacaatgccggacgtatgcttgcgcaggcgcttcccttttatgactctctttcatggcaaaaaaaatacaaagggctgtacgcttcacatgatgaaaaacactttcttatgcctgaaacatacatgaacttatccggcgaatccgttcaagccgccgccgcgtttttcaaaattgacgtaaaggaaattatcgtaattcacgatgaattggaactgccgctgggtgttatttctttaaagtattcaggcgggcttggcggacacaacgggcttcgttccatgaaaaaaagttttaacagcgcggatttttggcgcatacggataggtataggtcgccccgattcaagacttcccggcgagggcgggcatgaaggaagcggagagggcgtttacgactgggttttgtcggatttttcaaagaatgagcaagagacgcttatgcccgctctcgacgcgggcgcgaatcttttaatgaaaacttttgaagacgaccctgaaactttgttaaaagaatgggcaaagaagaaaataataattgataaaccggaaggcggtgaacaaaaatga

SEQ ID NO: 71956 - protein, 207 aa, Unknown
  Obtained from environmental sample
  DOMAIN (4)...(192): Peptidyl-tRNA hydrolase
  misc_feature (1)..(207): Xaa is any amino acid
MIKLAVFLGNPGAEYSRNRHNAGRMLAQALPFYDSLSWQKKYKGLYASHDEKHFLMPETYMNLSGESVQAAAAFFKIDVKEIIVIHDELELPLGVISLKYSGGLGGHNGLRSMKKSFNSADFWRIRIGIGRPDSRLPGEGGHEGSGEGVYDWVLSDFSKNEQETLMPALDAGANLLMKTFEDDPETLLKEWAKKKIIIDKPEGGEQK

SEQ ID NO: 71957 - DNA, 768 bp, Unknown
  Obtained from environmental sample
  misc_feature (1)..(768): n is a, c, g, or t
atgacggcgcaggaagcatttaaagagttatacgacattgtagtaaggttgcgcggtcccggcggctgtccgtgggacattgaacaaacgccttcttcgcttagaggctcgttagttgaagaaacctacgagtgccttgaggctattgatgaaaaagattcggatcacatagccgaagaacttggagatttatttttactcgcaaccatgattagctacatgcacgaacaggaaggaaaattttccgttgcggacgcgttatcaaatgtaggcaagaaattaatccgccgccacccgcatgtgttcggcgaggtaaaagtaaaagacagcgccgaagttttaaacaactgggcggaaataaaagtaaaacaggaaggacgaaagccgaaagattcaatacttgatgaagtaagcggcgggcttccgccgatggagcgttcttttaaactgcaaaaaaaagccgccaaagcgggttttgattggcaagacattgaaggagtgatggaaaaaattaaggaagagcttgaagaagtacgcaccgcaaaaattgagacggaaaccgaagaagagttaggtgatctgcttttttccgtaatcaatctttgccgttacttaaaaatcgaaccttccgccgctcttaaccgcacaaataacaaatttattgaacggtttaagtatgtggaaaagaaaatgaaagagacgggacaggaaatgaaaaaagagaatcttaacattatggataaatactggaacgaagcaaaaaagtaa

SEQ ID NO: 71958 - protein, 255 aa, Unknown
  Obtained from environmental sample
  DOMAIN (162)...(224): MazG nucleotide pyrophosphohydrolase domain
  misc_feature (1)..(255): Xaa is any amino acid
MTAQEAFKELYDIVVRLRGPGGCPWDIEQTPSSLRGSLVEETYECLEAIDEKDSDHIAEELGDLFLLATMISYMHEQEGKFSVADALSNVGKKLIRRHPHVFGEVKVKDSAEVLNNWAEIKVKQEGRKPKDSILDEVSGGLPPMERSFKLQKKAAKAGFDWQDIEGVMEKIKEELEEVRTAKIETETEEELGDLLFSVINLCRYLKIEPSAALNRTNNKFIERFKYVEKKMKETGQEMKKENLNIMDKYWNEAKK

SEQ ID NO: 71959 - DNA, 1086 bp, Unknown
  Obtained from environmental sample
  misc_feature (1)..(1086): n is a, c, g, or t
atggctcatagtgaaacaagaaggtttggaattttaacggcgggcggcgattgtcccggactgaatgccgctattcgcggagtatgccgcgcggcttatgatcgttatggtatggaaattgtcggtatcgcgaaaggttttcgcggtttaatcgaagaagatacaaaaattcttaaaccggaagatttttccggtatccttacgcgcggcggaacaatcctcggctcaagcagagaaaaaccgtttagccgcgtcgataatgatgaagtcgcgctcgaaaaagtttccgcaataaaagatacatattcaaaattaaaacttgactgccttgttgtgctaggcggaaacggaacaaacacaacgggatataaacttgcgtgggaaggtcttaatgtaatcgggcttccaaaaacaattgacaacgatattgtcggcactgacaaaacattcggatttgattcggctttgtctatctgcacggaagctatagaccgtcttcactccacggcgcaaagccatagccgcgttatcgtaattgaattaatgggacacaaggcgggatggctctcgctttacgcgggagtcgccggcggcggcgatatagttctgatacctgaaatcccctacgatatacgcgctattggcaatcatcttgaggaccgcgcaagaacgggaaaaacattttcgatagttgtcgtcgcggaaggcgcgttatctgttaaagaagcggcaatggataaaaaggacagaaaaaaatacagagcggaaaacggtccttctgtggcgtatcgtctcgcaaaagaaatcggcgaggaaacaggaatggaaacccgcgctacagttttaggttatgtacagcgcggaggcataccaagcgcaacagatcgcgttcttgcgacaagccttggaaccgccgccgtggaacttctggctaagggtgattacggacgcatggtagcgttaaacggcacggaaattgattctgtcgatttaagtatccctgagggcaaagtaaaaagcgtaccgctggatcattatatgattgaaaccgcgaaagctgtcggcacttgtatcggcgttttttaa

SEQ ID NO: 71960 - protein, 361 aa, Unknown
  Obtained from environmental sample
  DOMAIN (7)...(312): Phosphofructokinase
  misc_feature (1)..(361): Xaa is any amino acid
MAHSETRRFGILTAGGDCPGLNAAIRGVCRAAYDRYGMEIVGIAKGFRGLIEEDTKILKPEDFSGILTRGGTILGSSREKPFSRVDNDEVALEKVSAIKDTYSKLKLDCLVVLGGNGTNTTGYKLAWEGLNVIGLPKTIDNDIVGTDKTFGFDSALSICTEAIDRLHSTAQSHSRVIVIELMGHKAGWLSLYAGVAGGGDIVLIPEIPYDIRAIGNHLEDRARTGKTFSIVVVAEGALSVKEAAMDKKDRKKYRAENGPSVAYRLAKEIGEETGMETRATVLGYVQRGGIPSATDRVLATSLGTAAVELLAKGDYGRMVALNGTEIDSVDLSIPEGKVKSVPLDHYMIETAKAVGTCIGVF

SEQ ID NO: 71961 - DNA, 1110 bp, Unknown
  Obtained from environmental sample
  misc_feature (1)..(1110): n is a, c, g, or t
atggctgagcagtcgctttccgaaaaagaagaattccttacccggcaattaattacatatattggcagtaaacgcgctttgttggactttattggggaaggaattaacaaggttcaacagagactgaataaagataaattgagaatgttcgatgtgttcagcgggtcgggtattgtcgccaggtttttcaaacggttttctgagttgcttattgttaatgatttggaaaaatactctgcgctgattaatgaatgttatttatctaatgaaagtgaactagacttaaatttattgcgtgaacattacaaagaaattattgaagaaacaaacaaaaatttagtaaaagggattatttccgaattgtacgctcctagtgatgataaaaatataatgcccaatgaacgtgttttttataccgcgcgaaacgcaatgtatatcgacaccgcaaggcaattaatcgggaaattgccgaaagaaatgcaaaaatattttttggctcctttgttgtcggaggcgtcaatacacgcaaatacttcgggggtttttaagggattttataaaaataaagaaacggggattggacaattcggcgggaagaaccaagacgcattgtttagaataacaggcaatatcgaattgccgtttcccatattcagtaattttaattgcgatacgcttgtctataaccaagattcaaatgaattgataaaatcattgccggaagttgatattgcctatttagacccgccttataatcaacacccttacgggtcaaattattttatgttgaatttgatacttgactattcctatcctgaaaatacaagtaaagtttcaggcataccggaagattggaaacgctctgactataacaaaggacatcgcgctttaaaggcgttaacttcccttgttgaaaatataaaggcaaaatatgtgataatatcatttaattccgaagggtttataagcgccgaaaatatgaaaaatatgttatcaaaaataggcgcgcttgaagtattggaaacaaagtataatactttcagaggaagcagaaatttgaataaccgcgaaattcatgttaaagaatatttatacttgctggagaaatag

SEQ ID NO: 71962 - protein, 369 aa, Unknown
  Obtained from environmental sample
  DOMAIN (20)...(330): D12 class N6 adenine-specific DNA methyltransferase
  misc_feature (1)..(369): Xaa is any amino acid
MAEQSLSEKEEFLTRQLITYIGSKRALLDFIGEGINKVQQRLNKDKLRMFDVFSGSGIVARFFKRFSELLIVNDLEKYSALINECYLSNESELDLNLLREHYKEIIEETNKNLVKGIISELYAPSDDKNIMPNERVFYTARNAMYIDTARQLIGKLPKEMQKYFLAPLLSEASIHANTSGVFKGFYKNKETGIGQFGGKNQDALFRITGNIELPFPIFSNFNCDTLVYNQDSNELIKSLPEVDIAYLDPPYNQHPYGSNYFMLNLILDYSYPENTSKVSGIPEDWKRSDYNKGHRALKALTSLVENIKAKYVIISFNSEGFISAENMKNMLSKIGALEVLETKYNTFRGSRNLNNREIHVKEYLYLLEK

SEQ ID NO: 71963 - DNA, 999 bp, Unknown
  Obtained from environmental sample
  misc_feature (1)..(999): n is a, c, g, or t
atgacccattacgaagcctgccgcctgtgtccccgaaactgcggaattaaccgccttgcgggcgaagtcggcttttgcggagaaaccgcggaattgcgaatcggggcggcggttattcacaagggcgaagaacctccgcttgtcggaacaggcggctccgggacaatttttataagcgggtgcaatttaaaatgcgccttctgccagaattatcagatttctcaaggcgaaaacgcaaaagaagcgacaaccgccgcaagcctcggcagagcggtttctccgcgtgagtttgcggaaatatgcgccgcattatgtgaaaagggagctgaaaatatcaatattgtaacgggcagccacgcagtgccgggacttatcgaaggatttattgagatgcgaaaagcgggcgtagaattgccgattttatggaattcatcggggtatgacagcgtagaagcgctggaattgctaaaggactatatcgacatttaccttcccgatttaaaaacattggacagcgaaatatcaaaaaaattctttaacgcgccggattatcccgatacagcggcggcggctatctttaaaatgattgagttaacagaaaaaaaatcccctaacaacgcgcgtgaaaaaattattatccgccaccttgttttacccggttttccggagtctacccgttccgttttgcgctggtttgcggataacattaaaaaccgggcaatgctttccgtaatgacgcaatacacgcctattccggggataaaacgggaaatgccgcaaaattatttgtcggcggatgaatacgaaacggtcattaaatggctggaagaatttaaaatagaagacgggttttgtcaggagcttgtaacggggagcgattggctgccggattttaagagagcgaatccgttttcatcggaattgtctgtgccggtgtggcattaccagccgaacttaagcccgaagtttatgccgaaaccggttccgctccaaacttga

SEQ ID NO: 71964 - protein, 332 aa, Unknown
  Obtained from environmental sample
  DOMAIN (55)...(232): Radical SAM superfamily
  misc_feature (1)..(332): Xaa is any amino acid
MTHYEACRLCPRNCGINRLAGEVGFCGETAELRIGAAVIHKGEEPPLVGTGGSGTIFISGCNLKCAFCQNYQISQGENAKEATTAASLGRAVSPREFAEICAALCEKGAENINIVTGSHAVPGLIEGFIEMRKAGVELPILWNSSGYDSVEALELLKDYIDIYLPDLKTLDSEISKKFFNAPDYPDTAAAAIFKMIELTEKKSPNNAREKIIIRHLVLPGFPESTRSVLRWFADNIKNRAMLSVMTQYTPIPGIKREMPQNYLSADEYETVIKWLEEFKIEDGFCQELVTGSDWLPDFKRANPFSSELSVPVWHYQPNLSPKFMPKPVPLQT

SEQ ID NO: 71965 - DNA, 723 bp, Unknown
  Obtained from environmental sample
  misc_feature (1)..(723): n is a, c, g, or t
atgacatttttaacaggctttcatgccatagaagaaagaattaaatcgggtcaatcctgcggtcctctgcttgtagcaaaagcgggtccccgcgcgaaagaaattgttacgctcgctgtcaacaataaaatacgcctggagcgcacgggcgcttttgaacttgacggtatcgcgccggacaaccgaggtattgctctgcaagttgaagacgagtcaggcaaagccgacatcagccttgaaaactttatcgccgaattaggtgaccgaaaagacgctctcgttatgattcttgatgaaattactgatccgcataactacggcgctattctgcggtgctgtgatcagtttgcggttgatttggtaataagcagaaaccgtcggaacgcgaaacaagcaccgatagtttcacaaacttcggcgggagccgtttcatgggtggcgcaggcggagacgcccaaccttgtgcgcgcgatagaagacttaaaagaagccggtttttggatttacggggccgacatggacggcgaccctgtttacaaattggatttaagcggcagaacagcgttagtcttgggcagtgaaggcggcggcatttcccgtcttttgcgtgaaaagtgcgacggcatggttgggataccctcatacggcagaattgattcgctcaatgtatcggtagccgccggtgtgttgttgtatgaagtacggcggcagcgcgcaaaatag

SEQ ID NO: 71966 - protein, 240 aa, Unknown
  Obtained from environmental sample
  DOMAIN (3)...(74): RNA 2'-O ribose methyltransferase substrate binding
  misc_feature (1)..(240): Xaa is any amino acid
MTFLTGFHAIEERIKSGQSCGPLLVAKAGPRAKEIVTLAVNNKIRLERTGAFELDGIAPDNRGIALQVEDESGKADISLENFIAELGDRKDALVMILDEITDPHNYGAILRCCDQFAVDLVISRNRRNAKQAPIVSQTSAGAVSWVAQAETPNLVRAIEDLKEAGFWIYGADMDGDPVYKLDLSGRTALVLGSEGGGISRLLREKCDGMVGIPSYGRIDSLNVSVAAGVLLYEVRRQRAK

SEQ ID NO: 71967 - DNA, 531 bp, Unknown
  Obtained from environmental sample
  misc_feature (1)..(531): n is a, c, g, or t
atgggtancgatattattccccaggttgcgcgttatttggcggctaaatttgttatctcgcttgtaaatggagtggttctcgccgcttgtttgagttttgcaaaactggaatttgccgttgtttggggagtaattcagttcatcatgaattttatcccgtctatcggcagtatcgttgttggcgttatagtttccttttttgctttactgcaattttggcctgagccgggaccggtcattctagttatttcgatcatacttgtaaccaacatgatcacctatgtactcgacccgaaaattatcggcgataatatgcgaatatcgcctcttgtggtgcttgccgccgtggcaatatggggttatatctggggttttgccggcatgattcttgcggttcccatgatggtaataattaaaatcgtgtgcgaaaatattcctattatggagccgatttccgtattaatgggatcaaaaagatcgacttacgcaagaaaagcggaaaatgataaaacaccggcaatacaagaataa

SEQ ID NO: 71968 - protein, 176 aa, Unknown
  Obtained from environmental sample
  misc_feature (1)..(176): Xaa is any amino acid
MGXDIIPQVARYLAAKFVISLVNGVVLAACLSFAKLEFAVVWGVIQFIMNFIPSIGSIVVGVIVSFFALLQFWPEPGPVILVISIILVTNMITYVLDPKIIGDNMRISPLVVLAAVAIWGYIWGFAGMILAVPMMVIIKIVCENIPIMEPISVLMGSKRSTYARKAENDKTPAIQE

SEQ ID NO: 71969 - DNA, 540 bp, Unknown
  Obtained from environmental sample
  misc_feature (1)..(540): n is a, c, g, or t
atggcgggcctcaatgcgcctcgagaagccggcggttacgacctcgtgctgtgcggaagacaggcgattgacggcgataccgctcaagtcggtccgcagaccgccgagaaacttggaataaatcaaattacttgcgtttcaaaaatagaaaaaatcgatacgtcgaaaaaagaaattaccgctgtccgttcaatcgaaggcggttgggaaaaagttaaggcaaaaatgcccgtccttcttacttttacagaggaaggtgaatcgccccgaccggcttccgccgtcaaaacttgcgctttcaaaaaagcggctcccgtcgcaggtgtcgacggaactcaaagcgcaaatccgatggcgttatgggacatcgccgcaatcaacgccgatcccgtacattgcgggctttcaggttcgcctacaaaggtgaagaaaattgattctgtcgtgcttaccgccgccgatatcaagtatatcgagccgagcgatgcgggcgttaccgagttgatccacggtctaattgcggatcatacatttggataa

SEQ ID NO: 71970 - protein, 179 aa, Unknown
  Obtained from environmental sample
  misc_feature (1)..(179): Xaa is any amino acid
MAGLNAPREAGGYDLVLCGRQAIDGDTAQVGPQTAEKLGINQITCVSKIEKIDTSKKEITAVRSIEGGWEKVKAKMPVLLTFTEEGESPRPASAVKTCAFKKAAPVAGVDGTQSANPMALWDIAAINADPVHCGLSGSPTKVKKIDSVVLTAADIKYIEPSDAGVTELIHGLIADHTFG

SEQ ID NO: 71971 - DNA, 1011 bp, Unknown
  Obtained from environmental sample
  misc_feature (1)..(1011): n is a, c, g, or t
atgagcgataacagtgtaatggtttacatacaacaacatgaaggaaaagcggctgaggtaagtctcgaacttgtctcgaaagcccgtgagcttgcggataaattaaaagtcgaggttagcgccgcccttttcggcgagaaagtaagcgcggaagtttcacgcctcgcctcgcttggcgcggatcgtgtttacatagccgaagacgctcggcttaaatactatacgccgataccttacagcaaattgatgaatcaagtagtggaagaatacaaaccgcaaattgttttgttcggtgcgacaaccgaaggacgcgatcttgctccccgtgtcgcatcgcatttgaaagtggggcttacagcggattgtaccgatttgcagataggcgaccacacgcaaaaagaaaccgagtacaaagacatactgtatcagatacgacccgctttcggcggcaacatcatcgcaaccattgtcagcccggagaaaaaaccgcagatggcgacagttcgggaaggcgttatgcgaatggcgcagcccgacaaatcacgaaaagccgaaaccgtaaaaattaaaacatcgctgggagcggacgatttccttacggaaattatcgaacgtgtaatggaagaaaaaaccgtcaacctgaaaggcgcgcagattattgtcgcaggcggcatgggcgtaggaagcaaagataacttcgcccttatccgcgaccttgcgcaaactctcggcgctgaaatcggcgcttcacgcgccgcagtggatcagggctttatcggcaaagaacatcaggttgggcagacaggaacaacagtgcgcccgaaactttacatcgcctgcggcatttccggggcaatacagcatcgagccggcatggacgggtcggcgagaataatcgccattaacaacgatcccgaagcgccgatattcagcgtagcgcattacggcatagtgggagacctgaacgaagttatcccaaaaatgatcaaggcttataaggcaagagtttaa

SEQ ID NO: 71972 - protein, 336 aa, Unknown
  Obtained from environmental sample
  DOMAIN (5)...(202): Electron transfer flavoprotein domain
  misc_feature (1)..(336): Xaa is any amino acid
MSDNSVMVYIQQHEGKAAEVSLELVSKARELADKLKVEVSAALFGEKVSAEVSRLASLGADRVYIAEDARLKYYTPIPYSKLMNQVVEEYKPQIVLFGATTEGRDLAPRVASHLKVGLTADCTDLQIGDHTQKETEYKDILYQIRPAFGGNIIATIVSPEKKPQMATVREGVMRMAQPDKSRKAETVKIKTSLGADDFLTEIIERVMEEKTVNLKGAQIIVAGGMGVGSKDNFALIRDLAQTLGAEIGASRAAVDQGFIGKEHQVGQTGTTVRPKLYIACGISGAIQHRAGMDGSARIIAINNDPEAPIFSVAHYGIVGDLNEVIPKMIKAYKARV

SEQ ID NO: 71973 - DNA, 1734 bp, Unknown
  Obtained from environmental sample
  misc_feature (1)..(1734): n is a, c, g, or t
atggaaaattttttaacagataacgaagatattttatttcatctggatcatatcgatcttgatcgcataatcaaaatgaaagaggacaattttgagcaggcaaaacaatttgcccacgctcctacagacgttgaagacgcaaaagattcttaccgcaggattttatccatcatcggtgaaattgcgggcgaacacatggctcctcacgctcccgctgtcgatgaaagcggtcccactctggcgaataatcaagttacgctgaaccccgccacaaaaaaagcgttggatatgctggcaaaagccgatatgttcggttttgtcattcctcgcagatacggcggcttgaatatgcccaacacaattcttactatcggcgcagacattttatcccgtgcggacggctctttcctcaacttcggtcttcagcaggacaacgccggaacgataaataaatttgcgtcggaagaacagaagcaggcttatctgccgaaactttgttcgggcgaatgggattcctcgatggttttgacggaacctgatgcgggcagtgatttgcaatcggtaaacttgaaagcgactcaaggacctgacggaaaatggcatttgaacggcgttaaacgctttatcaccaacggctgtgcgaaaatcgcccttgttctcgcccgaagcgaagaaagaaaaggtgcaaggggtctttcgttcttcctgtacaaacgtgaagatgatccgtcgaagcagacgatgataatccgccgtcttgaacataaacttggtattcacggctctcccacctgcgagcttcaatttaacaatgcgcctgcggaattagtcggcgagcgtcagcatgggcttacaaaatacaccatgtggctgatgaacaacgcgcgtctgggcgtcgccgctcaaggcgtaggcattgccgaagccgcatatcgggaggctgatctttacgccgcaaagcgtattcagttcggcgcgcctgttcgggacttgccccctgtttatgaaatgcttaccgaaatgaaagtcgccgtagaagcgggtcgcgctctgttatacgaaacagcccgttttgtcgatttgaaagaagtgctggaagaatactccgacaatcaccccgaagaaaagggcgagattatcgaagagaaaaagaaatacgcaaaactcgccggcttatttacgcctttggtaaaaggctacacgacggagatggcgaacaaagtttcctacgacgctattcagatacacggcggaacgggttacatgaaagagtttaacatcgaacgccattaccgagacgcaaggatcaccaacatttacgaaggcacgactcaattacaggttgtcgccgccattggtcctgtaacatcgggagtagcgcagtcgataatggacgaatacgacggcgcaaactacaaccacggtgcggaacttcttgctaaagttcgtgaggctcgcaaagtttttgacgaggcgttggagtacgcaaaggcgtacaaggaaaacgcggactttttgacttatcactcacgaaggcttgtggaaatggcgactgatttgattattagttacttgtttatgagggacgggaattatagtgagagaaagcagaaggttgcggcgattttcataaccaagatgatttcgagaattagagcgaatagagatttcattgtgggagaaaatgctactttgttgaagaattataaggctgttattgacgctagtaagtaa

SEQ ID NO: 71974 - protein, 577 aa, Unknown
  Obtained from environmental sample
  DOMAIN (297)...(445): Acyl-CoA dehydrogenase, C-terminal domain
  misc_feature (1)..(577): Xaa is any amino acid
MENFLTDNEDILFHLDHIDLDRIIKMKEDNFEQAKQFAHAPTDVEDAKDSYRRILSIIGEIAGEHMAPHAPAVDESGPTLANNQVTLNPATKKALDMLAKADMFGFVIPRRYGGLNMPNTILTIGADILSRADGSFLNFGLQQDNAGTINKFASEEQKQAYLPKLCSGEWDSSMVLTEPDAGSDLQSVNLKATQGPDGKWHLNGVKRFITNGCAKIALVLARSEERKGARGLSFFLYKREDDPSKQTMIIRRLEHKLGIHGSPTCELQFNNAPAELVGERQHGLTKYTMWLMNNARLGVAAQGVGIAEAAYREADLYAAKRIQFGAPVRDLPPVYEMLTEMKVAVEAGRALLYETARFVDLKEVLEEYSDNHPEEKGEIIEEKKKYAKLAGLFTPLVKGYTTEMANKVSYDAIQIHGGTGYMKEFNIERHYRDARITNIYEGTTQLQVVAAIGPVTSGVAQSIMDEYDGANYNHGAELLAKVREARKVFDEALEYAKAYKENADFLTYHSRRLVEMATDLIISYLFMRDGNYSERKQKVAAIFITKMISRIRANRDFIVGENATLLKNYKAVIDASK

SEQ ID NO: 71975 - DNA, 897 bp, Unknown
  Obtained from environmental sample
  misc_feature (1)..(897): n is a, c, g, or t
atggaaacatggttaatcagccagccagccaatacagccgccactccatatactgtcaaactgaacgtgaacgagagtcaaccttttgactgttatgacgtaggagaggtgctttataacaacataacaaaatatgtctctcttgacctttccggcagtacatttaccagcattgggaatagctctttttggtggtgtgaaaaccttaccagcgtaatcataccggataacgttaccagcatggggataagggctttttccgattgcaccagtcttaccagcataaacataccgaacagcgttaccagcattgggagcggggctttttacgaatgtaccagtcttaccagcataaacataccggatagcgttgccagtattggagataatgctttttataatacagtatggtatacggtatggttaaatagccagccaaacggcgtagtttatatggggaaagtagcatacatatacaaaggaactatgccttcaaatacaagaataacattacttgatggcacaaaaggaattgctgggtccgcttttcgagactgcaccagacttatcagcataaccataccggatagcgttaccaatattggagcatatgcttttgaaaaatgcaccagtcttaccagtataaccataccgagcagcgttactagaattggagataatgcttttggttgcagtaacattaccagagtaacatttgcaacgggaagcaacataacagtaaataactttggaagtgatgcttttcctatatacgactctagcaaaacctacggtggcaattatttaagggctgcctacttttcaacaagtacaagcaaggaaggaacatatacgagggaggcaaacggctttgaatggacgtggagtcaatattaa

SEQ ID NO: 71976 - protein, 298 aa, Unknown
  Obtained from environmental sample
  misc_feature (1)..(298): Xaa is any amino acid
METWLISQPANTAATPYTVKLNVNESQPFDCYDVGEVLYNNITKYVSLDLSGSTFTSIGNSSFWWCENLTSVIIPDNVTSMGIRAFSDCTSLTSINIPNSVTSIGSGAFYECTSLTSINIPDSVASIGDNAFYNTVWYTVWLNSQPNGVVYMGKVAYIYKGTMPSNTRITLLDGTKGIAGSAFRDCTRLISITIPDSVTNIGAYAFEKCTSLTSITIPSSVTRIGDNAFGCSNITRVTFATGSNITVNNFGSDAFPIYDSSKTYGGNYLRAAYFSTSTSKEGTYTREANGFEWTWSQY

SEQ ID NO: 71977 - DNA, 1014 bp, Unknown
  Obtained from environmental sample
  misc_feature (1)..(1014): n is a, c, g, or t
ttgaccggaactgcgccaacttgtacagagaccggaagcgggaaaagaaagtgcagactctgcggcatagaagaaaccattaacgttatccccgcgctcgggcatgactggggagaatggacgcaaacaacccgcccaaccgaaaccgaagacggagaggaaaccagaacttgcgcccatgacgaaacgcataaagaaacccgctctgtagccgcgctcgggcatacccacgtctggggcgaatgggcattgacaaccgatcccacttgcgccagagaaggcgaagaaacgcggatttgtacgcttaacgccagccatatcgaaacccgcccaaccgcaatagtcccgaacgcgcatgagtggggcgaatggatacaaactaaagcccccaccgaaacagaggacggcgaagaagtcagaacatgcgcccatgacccaacgcataaagaaacccgctctgtagccgcgctcgggcatacccacgtctggggcgaatgggcattgacaaccgatcccacttgcgccagagaaggcgaagaaacgcggacttgtacgcttaacgccagccatatcgaaacccgccctatagccatagtctcgaccgcgcacaactggggcgcgtggatacagacagccgcgccgacctgtacaacagcgggagtggatacaagaacctgttcccatgacgcaacgcacaaagaaacccgcccagtggcaatagtcccgaccgcgcacaactggggcaactggatacagacagccgcgccgacctgtacaacagcgggtgtagatacaagaacctgttcccatgacgcaacgcataaagagacccgcacaggagccgccggtattggacatatctacgacaattggacgttaacagcagccgccacggaatttgaagacactatagaaaccgcaacctgtttgcataatgcaacgcataccataaacgctcaatacctgatacaagacttccctttaccagcattgacagaatggaaacatggttaa

SEQ ID NO: 71978 - protein, 337 aa, Unknown
  Obtained from environmental sample
  misc_feature (1)..(337): Xaa is any amino acid
MTGTAPTCTETGSGKRKCRLCGIEETINVIPALGHDWGEWTQTTRPTETEDGEETRTCAHDETHKETRSVAALGHTHVWGEWALTTDPTCAREGEETRICTLNASHIETRPTAIVPNAHEWGEWIQTKAPTETEDGEEVRTCAHDPTHKETRSVAALGHTHVWGEWALTTDPTCAREGEETRTCTLNASHIETRPIAIVSTAHNWGAWIQTAAPTCTTAGVDTRTCSHDATHKETRPVAIVPTAHNWGNWIQTAAPTCTTAGVDTRTCSHDATHKETRTGAAGIGHIYDNWTLTAAATEFEDTIETATCLHNATHTINAQYLIQDFPLPALTEWKHG

SEQ ID NO: 71979 - DNA, 1608 bp, Unknown
  Obtained from environmental sample
  misc_feature (1)..(1608): n is a, c, g, or t
gtggggggagtgggctgccttaatattatagacatgatacagccgacgcttgagaacgttataaggacacgggaagaaatttccgcaacatcaatttattcaaacaacgggtttattctggcgagctatgtgaaggagcgcgtaggcaagaaactgaccgaggtggataccatctacggccagcatatcaatgcggcaaatatggccgttcgtgacggcgaagaatattcctgcacaagctactcgtctgtgttgaattcggaggtggaaattgtcataatgcctgtagccatgggcaattcaggcaagacctggagcgtaatgatcgcgtcaacgagatcgtacattttaaaagaagtaaacgaattgactcgttttacagctataatcgcggtgataaccgttgtgatagctgtgataattatctatcttatcctgggcagcactacaaaaccaattgtcatggtggcggacacgcttaaggacatttccgaaggcgaaggcgatctgacaaagaccgttgacatcaaatccaaggatgagataggcgaccttgccaaatacttcaatcaaacgcttaagaaaataaaagaccttgtggttcttattaagaagcaggctggcgtattgaaagatataggtaacgacctgtccggcaatatgaacgaaactgccgccgcggtaaatcaaatcaccgcgaacatccagagcatcaaaggcagagtaatgaaccagagcgcaagcgtaacccaaaccaacgcgacaatggaacaggttatcgccaacatcaacaaactcaacgaacatgtggaagcccagagcagaaacgtatcgcaggcgtcatccgccattgaggagatggtggcaaacatcggctctgttaccaacacgctggtcaacaatgccgccaacgtaagcaccttaaaggaagcctccgaagtgggaaaggaaggcttgcaggaagttgcgacggacattcaggaaatttcccgcgaatccgaaggcctgttggagattaactcggtaatggaaaacatcgccagccagacaaatctgctttcgatgaacgccgcgattgaggcggcgcacgccggagaagcgggcaaaggcttcgcggttgtcgccgatgaaatccgcaaactggcggaaagctccggcgagcagtcaaaaacaatcagcacggtattaaagaaaatatcggaatcaatcaaaacaataacaggctccaccgaaaacgtactgcacaaattcgaggcgatagactccggcgtaaagacggtatctctgcaggaagaaaacatccgcaacgcgatggaagagcagggagaagggagcaagcaaatcctgctaagcgcaagctctttaagccagcttacacagcaggtaaaaatcggttccgaagagatgcttgagggcagcaaggaagtaatgaaggaaagccgtaaccttgaaacggtaacgcaggaaataacaggcggcatgaacgagatggcaaacggggcggatcagataaatctggcggtaaacaatgtcaacgggatgactcagaagaacagggacgcgattgattctttgataaaggaagtatcgcggttcaaggttgagtag

SEQ ID NO: 71980 - protein, 535 aa, Unknown
  Obtained from environmental sample
  DOMAIN (271)...(500): Methyl-accepting chemotaxis protein (MCP) signaling domain
  misc_feature (1)..(535): Xaa is any amino acid
MGGVGCLNIIDMIQPTLENVIRTREEISATSIYSNNGFILASYVKERVGKKLTEVDTIYGQHINAANMAVRDGEEYSCTSYSSVLNSEVEIVIMPVAMGNSGKTWSVMIASTRSYILKEVNELTRFTAIIAVITVVIAVIIIYLILGSTTKPIVMVADTLKDISEGEGDLTKTVDIKSKDEIGDLAKYFNQTLKKIKDLVVLIKKQAGVLKDIGNDLSGNMNETAAAVNQITANIQSIKGRVMNQSASVTQTNATMEQVIANINKLNEHVEAQSRNVSQASSAIEEMVANIGSVTNTLVNNAANVSTLKEASEVGKEGLQEVATDIQEISRESEGLLEINSVMENIASQTNLLSMNAAIEAAHAGEAGKGFAVVADEIRKLAESSGEQSKTISTVLKKISESIKTITGSTENVLHKFEAIDSGVKTVSLQEENIRNAMEEQGEGSKQILLSASSLSQLTQQVKIGSEEMLEGSKEVMKESRNLETVTQEITGGMNEMANGADQINLAVNNVNGMTQKNRDAIDSLIKEVSRFKVE

SEQ ID NO: 71981 - DNA, 504 bp, Unknown
  Obtained from environmental sample
  misc_feature (1)..(504): n is a, c, g, or t
atgccgcctgttatttcctgcgttaccgtttcaaggttacggctttccttcattacttccttgctgccctcaagcatctcttcggaaccgatttttacctgctgtgtaagctggcttaaagagcttgcgcttagcaggatttgcttgctcccttctccctgctcttccatcgcgttgcggatgttttcttcctgcagagataccgtctttacgccggagtctatcgcctcgaatttgtgcagtacgttttcggtggagcctgttattgttttgattgattccgatattttctttaataccgtgctgattgtttttgactgctcgccggagctttccgccagtttgcggatttcatcggcgacaaccgcgaagcctttgcccgcttctccggcgtgcgccgcctcaatcgcggcgttcatcgaaagcagatttgtctggctggcgatgttttccattaccgagttaatctccaacaggccttcggattcgcgggaaatttcctga

SEQ ID NO: 71982 - protein, 167 aa, Unknown
  Obtained from environmental sample
  misc_feature (1)..(167): Xaa is any amino acid
MPPVISCVTVSRLRLSFITSLLPSSISSEPIFTCCVSWLKELALSRICLLPSPCSSIALRMFSSCRDTVFTPESIASNLCSTFSVEPVIVLIDSDIFFNTVLIVFDCSPELSASLRISSATTAKPLPASPACAASIAAFIESRFVWLAMFSITELISNRPSDSREIS

SEQ ID NO: 71983 - DNA, 2145 bp, Unknown
  Obtained from environmental sample
  misc_feature (1)..(2145): n is a, c, g, or t
gtgatggacgccgcgttcgaggtcggagcgccctcggggattatcaactggatagacgagcccagccttgaaatgaccaacatggtgatgaaagaggcggacatcattcttgccacgggcgggccgggcatggtcaagtccgcctactcctcaggcaagcccgccgtcggcgtcgggtcgggcaatgtgccggctattatcgacgacagcgcggacatactcctcgccgtcaactcaatcatccactcaaaaacttttgacaacggaatgatatgcgcctccgagcaatcggtcatcgccctgcaaagtgtttacgaaaaagtgaaagccgagttcaaacgccggggctgttatttccttacgccggaagaaaccgagaaggtacggaaaacaattatcgttaacggatcattgaacgcgaaaatcgtcggacagaaggcggcgaaaatcgcggagcttgcgggcgtgaaggtggacgaggcgacaaaaattctcatcggcgaagttgagagcgtggagctttcagaagaattcgcccacgaaaaactttccccggtgctggcgatgtacagggcgaaggattttgacgacgctctggacaaggccgaccaattaataaaagacggcggctacggacacaccgccagcgtttttctcaacccgcaaaccgcctcggaaaaacttaaagaattcggcaggcgcatgaagacctgccgcatactgctgaacacgccgtcggcgcaaggcggcataggcgacttgtacaacttccgtctgcggccttcgctcacactaggctgcggcagttggggcggcaattcggtttcggaaaatgtcggcgttaaacatctgttaaatattaaaacactggcggcaaggagggaaaatatgctgtggttccgcgctcccgaaaaagtatatatcaagaggggatgcctccccgtggctctggacgaacttaaaaccgtaatgggaaaaaaacgcgcgttcatcgtaaccgatacattcctgtacgaaaacggttacaccaaaacgattacagaaaaactggacagcatgggtatagttcacgaaactttttttgatgtcgcccccgacccgactcttgcctgcgcgtataaaggcaaggctcagatgagcgccttcaagcccgatgtgatcatcgccctgggcggcggctcggcaatggatgcgggcaaaatcatgtgggtactctacgaacatcccgaagttgattttgaggatatggctatgcgcttcgccgacatacgcaagcgcatctacaccttccccaaaatgggagagaaggcgtactttatcgccatacccacctccgccggaacgggcagcgaggttacgccctttgccgtcatcaccgatgaaaaaaaaggcatgaagtacccgcttgcggattacgaacttttacccgacatggcgatagtggacgccgacgtgcagatgaacgcgcccaagggtctgacaagcgcaagcggcatagacgctgtaacccacgcgctggaagcctacgtctcggtcatggcgacggactacaccgacggtcttgcgatacaggcgctcaaagtgattttcgaatggctgcccatcgcgtacaacgaaggcgcggcgaatccaacagcgcgcgaaaagatggcgaacgccgcgacgattgcgggcatggctttcgccaacgcgttcctcggcgtatgccactcgatggcgcacaagctcggcgcgtttcatcatctgccccacggcatcgccaacgcgctgatgatcagcgaagtgctgcgctacaacgcctgcgaagttccgccgaagatgggatccttccctcaatatgatcaccccaaaacattatcccggtacgcgcagatagcggacgcgctggctctcggcggaaaaaccgacgaggaaaaattggaaaaattaatcgccgccgtagaaaagctgaaagatcagatcggtatcaagaagacaatcaaagattacggcatagatgaaaaagatttccttgcccgccttgacgacatgagcgaacaagcctttgacgatcaatgcacaggcgcgaatccgcggtatccgttaattgaggaaattaagaagatgtacttgaatgtttactacgggaaaaaggagaaagtgtaa

SEQ ID NO: 71984 - protein, 714 aa, Unknown
  Obtained from environmental sample
  DOMAIN (303)...(699): Iron-containing alcohol dehydrogenase
  misc_feature (1)..(714): Xaa is any amino acid
MMDAAFEVGAPSGIINWIDEPSLEMTNMVMKEADIILATGGPGMVKSAYSSGKPAVGVGSGNVPAIIDDSADILLAVNSIIHSKTFDNGMICASEQSVIALQSVYEKVKAEFKRRGCYFLTPEETEKVRKTIIVNGSLNAKIVGQKAAKIAELAGVKVDEATKILIGEVESVELSEEFAHEKLSPVLAMYRAKDFDDALDKADQLIKDGGYGHTASVFLNPQTASEKLKEFGRRMKTCRILLNTPSAQGGIGDLYNFRLRPSLTLGCGSWGGNSVSENVGVKHLLNIKTLAARRENMLWFRAPEKVYIKRGCLPVALDELKTVMGKKRAFIVTDTFLYENGYTKTITEKLDSMGIVHETFFDVAPDPTLACAYKGKAQMSAFKPDVIIALGGGSAMDAGKIMWVLYEHPEVDFEDMAMRFADIRKRIYTFPKMGEKAYFIAIPTSAGTGSEVTPFAVITDEKKGMKYPLADYELLPDMAIVDADVQMNAPKGLTSASGIDAVTHALEAYVSVMATDYTDGLAIQALKVIFEWLPIAYNEGAANPTAREKMANAATIAGMAFANAFLGVCHSMAHKLGAFHHLPHGIANALMISEVLRYNACEVPPKMGSFPQYDHPKTLSRYAQIADALALGGKTDEEKLEKLIAAVEKLKDQIGIKKTIKDYGIDEKDFLARLDDMSEQAFDDQCTGANPRYPLIEEIKKMYLNVYYGKKEKV

SEQ ID NO: 71985 - DNA, 1344 bp, Unknown
  Obtained from environmental sample
  misc_feature (1)..(1344): n is a, c, g, or t
ttgggcgacggcgttttcgaggttaaatccacaaacggcgacacccaccttggcggcgacgatttcgaccgccgtatcatggaatggcttatcgccgagtttaaaaaagatacaggcattgatatcgggaaggacaaaatggcgctccagcgattgcgcgaggcggctgagaaggcgaagattgagttatccgccatgcaaacaacggagattaacctaccgtttatcaccgcggatcaggccggcgccaagcatctgcaaaaatcccttacacgcgcaaagtttgaacagatggtggaagatttgcttgagcgttccaaagacccgtgcagaaaagcgcttgaggacgcgaaccttaaagcggaacagattgacgaggttatccttgtcggcggttccacgcgcattcccgcggttcaacaggttgtaaaagaacttttcaaaaaagaacccaacaagggcgttaacccggacgaagctgtcgcggcaggcgcggcaattcagggcggaatccttggcggcgactttaaaaacgagctgctgctgctggacgttactcccctttcgctgggcatagaaacattgggcggcgttatgacaaaactgattacgcgtaacacgaccattcccacccgcaagagccagattttctccaccgccgcggacggccagacagccgtctccattcaggtgctgcagggcgagcgcgagatggcgagccagaaccgcgtgctcggccgcttcgaccttgtgggaattcctcccgccccgcgcggtattccgcagatagaagttgctttcgacatagacgcgaacggcatagtccatgtaagcgcgaaagatctgggcacaggcaaagagcagaagattcggattgaaagttccagcggactgagcgactcggacattgaccgcatggttaaagaggcggagattcacgccgaggaagacaagaaagagcgcgagagggccgaagtgcgaaacgaagccgactcgatgatttacaccacggaaaaaaacatcaaagacctgggcgacaaggtaagcgcggcggacaaatccaaaacagaggaagccatcgccgatttgcgcaaagctcttgagagcggcgacattcaatccatcaaggacaagaccgaggcgctcaagcaggcgtcttacaaaatagccgaagaaatttataaacagcagagcgcggcgggacaaggcggcgctcagggcgcggggggacctgacacgggtcccgatatgggtttcaatcaaaacatgggcggcaatcccggcggcggcggcacaaagggcgcggaagacgctgattatgaagtggtagacgataacaagtga

SEQ ID NO: 71986 - protein, 447 aa, Unknown
  Obtained from environmental sample
  DOMAIN (1)...(395): Hsp70 protein
  misc_feature (1)..(447): Xaa is any amino acid
MGDGVFEVKSTNGDTHLGGDDFDRRIMEWLIAEFKKDTGIDIGKDKMALQRLREAAEKAKIELSAMQTTEINLPFITADQAGAKHLQKSLTRAKFEQMVEDLLERSKDPCRKALEDANLKAEQIDEVILVGGSTRIPAVQQVVKELFKKEPNKGVNPDEAVAAGAAIQGGILGGDFKNELLLLDVTPLSLGIETLGGVMTKLITRNTTIPTRKSQIFSTAADGQTAVSIQVLQGEREMASQNRVLGRFDLVGIPPAPRGIPQIEVAFDIDANGIVHVSAKDLGTGKEQKIRIESSSGLSDSDIDRMVKEAEIHAEEDKKERERAEVRNEADSMIYTTEKNIKDLGDKVSAADKSKTEEAIADLRKALESGDIQSIKDKTEALKQASYKIAEEIYKQQSAAGQGGAQGAGGPDTGPDMGFNQNMGGNPGGGGTKGAEDADYEVVDDNK

SEQ ID NO: 71987 - DNA, 1047 bp, Unknown
  Obtained from environmental sample
  misc_feature (1)..(1047): n is a, c, g, or t
ttgattgaaacccatatcgggacccgtgtcaggtccccccgcgccctgagcgccgccttgtcccgccgcgctctgctgtttataaatttcttcggctattttgtaagacgcctgcttgagcgcctcggtcttgtccttgatggattgaatgtcgccgctctcaagagctttgcgcaaatcggcgatggcttcctctgttttggatttgtccgccgcgcttaccttgtcgcccaggtctttgatgtttttttccgtggtgtaaatcatcgagtcggcttcgtttcgcacttcggccctctcgcgctctttcttgtcttcctcggcgtgaatctccgcctctttaaccatgcggtcaatgtccgagtcgctcagtccgctggaactttcaatccgaatcttctgctctttgcctgtgcccagatctttcgcgcttacatggactatgccgttcgcgtctatgtcgaaagcaacttctatctgcggaataccgcgcggggcgggaggaattcccacaaggtcgaagcggccgagcacgcggttctggctcgccatctcgcgctcgccctgcagcacctgaatggagacggctgtctggccgtccgcggcggtggagaaaatctggctcttgcgggtgggaatggtcgtgttacgcgtaatcagttttgtcataacgccgcccaatgtttctatgcccagcgaaaggggagtaacgtccagcagcagcagctcgtttttaaagtcgccgccaaggattccgccctgaattgccgcgcctgccgcgacagcttcgtccgggttaacgcccttgttgggttcttttttgaaaagttcttttacaacctgttgaaccgcgggaatgcgcgtggaaccgccgacaaggataacctcgtcaatctgttccgctttaaggttcgcgtcctcaagcgcttttctgcacgggtctttggaacgctcaagcaaatcttccaccatctgttcaaactttgcgcgtgtaagggatttttgcagatgcttggcgccggcctgatccgcggtgataaacggtag

SEQ ID NO: 71988 - protein, 348 aa, Unknown
  Obtained from environmental sample
  misc_feature (1)..(348): Xaa is any amino acid
MIETHIGTRVRSPRALSAALSRRALLFINFFGYFVRRLLERLGLVLDGLNVAALKSFAQIGDGFLCFGFVRRAYLVAQVFDVFFRGVNHRVGFVSHFGPLALFLVFLGVNLRLFNHAVNVRVAQSAGTFNPNLLLFACAQIFRAYMDYAVRVYVESNFYLRNTARGGRNSHKVEAAEHAVLARHLALALQHLNGDGCLAVRGGGENLALAGGNGRVTRNQFCHNAAQCFYAQRKGSNVQQQQLVFKVAAKDSALNCRACRDSFVRVNALVGFFFEKFFYNLLNRGNARGTADKDNLVNLFRFKVRVLKRFSARVFGTLKQIFHHLFKLCACKGFLQMLGAGLIRGDKR

SEQ ID NO: 71989 - DNA, 435 bp, Unknown
  Obtained from environmental sample
  misc_feature (1)..(435): n is a, c, g, or t
ttgaatttcaacctttgtgccgtaaaccgcgtccttaaacgggatttcgatatcgtagcgcaggttcgctccctgccttacgcccgacgaaccgcttttgcggaaaccgccgccgaaaaaactttcaaagatgttgcccagtccgccgtcgccgaagatgtcctcaaagccccggaaattactccagtcgtggctttgtcccatgccctcgacgcctgcgtggccgtactgatcataagcggcctttttctgatcatccgcgagaatctcgtaagcctcggtcgcctctttaaatttttcctcggcctgcttgtcgccgggatttttgtccgggtggtattgaatagcgagttttctataagctttttttatctcatctttagttgcgttcttttgaacaccaagaacctcgtagtagtctcgcttagccattaa

SEQ ID NO: 71990 - protein, 144 aa, Unknown
  Obtained from environmental sample
  misc_feature (1)..(144): Xaa is any amino acid
MNFNLCAVNRVLKRDFDIVAQVRSLPYARRTAFAETAAEKTFKDVAQSAVAEDVLKAPEITPVVALSHALDACVAVLIISGLFLIIRENLVSLGRLFKFFLGLLVAGIFVRVVLNSEFSISFFYLIFSCVLLNTKNLVVVSLSH

SEQ ID NO: 71991 - DNA, 1116 bp, Unknown
  Obtained from environmental sample
  misc_feature (1)..(1116): n is a, c, g, or t
atggctaagcgagactactacgaggttcttggtgttcaaaagaacgcaactaaagatgagataaaaaaagcttatagaaaactcgctattcaataccacccggacaaaaatcccggcgacaagcaggccgaggaaaaatttaaagaggcgaccgaggcttacgagattctcgcggatgatcagaaaaaggccgcttatgatcagtacggccacgcaggcgtcgagggcatgggacaaagccacgactggagtaatttccggggctttgaggacatcttcggcgacggcggactgggcaacatctttgaaagttttttcggcggcggtttccgcaaaagcggttcgtcgggcgtaaggcagggagcgaacctgcgctacgatatcgaaatcccgtttaaggacgcggtttacggcacaaaggttgaaattcaatattcacataacgaaacctgcgaagcctgcaaaggcgcgggctcggcggacggatcaggcaagaaaacctgcccgacatgccgcggctcggggcagatacgccaaagccacgggtttttctcggtagcccaaacctgccatacctgtcacggcgaaggtttcgtcatagaaacgccgtgcaaagaatgcggcggaaccggaacacagaaaaagcgtcagaagataatggttaccattcccgccggcaccgataacggcaaacggctggtaattccaagacagggggacgcgggccccaacggaggacagccgggcgacctgtatgtgttcataagagttaaacgccatgaatactttgagcgtcagggtcacgatctttactgcgccgtccctatctccgtaagccaggcggctctgggcgcggacattcaggtaacatcgcttgacaacaaaacgataaaggtaaaagtgcccgccggcacccaaagcggaaaaatgctccgtatccgcggcgcgggagtcccctcaggcggatcttacggcgatatgtacatcaaagttatcgtacagatacccgaaaaacttacccgccgcggcaaagaactgcttgaagaactggcaaaagccgaagggcagaacaacagcccgaaaccgattccgctctcgcagttggcggagaattga

SEQ ID NO: 71992 - protein, 371 aa, Unknown
  Obtained from environmental sample
  DOMAIN (138)...(218): DnaJ central domain (4 repeats)
  misc_feature (1)..(371): Xaa is any amino acid
MAKRDYYEVLGVQKNATKDEIKKAYRKLAIQYHPDKNPGDKQAEEKFKEATEAYEILADDQKKAAYDQYGHAGVEGMGQSHDWSNFRGFEDIFGDGGLGNIFESFFGGGFRKSGSSGVRQGANLRYDIEIPFKDAVYGTKVEIQYSHNETCEACKGAGSADGSGKKTCPTCRGSGQIRQSHGFFSVAQTCHTCHGEGFVIETPCKECGGTGTQKKRQKIMVTIPAGTDNGKRLVIPRQGDAGPNGGQPGDLYVFIRVKRHEYFERQGHDLYCAVPISVSQAALGADIQVTSLDNKTIKVKVPAGTQSGKMLRIRGAGVPSGGSYGDMYIKVIVQIPEKLTRRGKELLEELAKAEGQNNSPKPIPLSQLAEN

SEQ ID NO: 71993 - DNA, 819 bp, Unknown
  Obtained from environmental sample
  misc_feature (1)..(819): n is a, c, g, or t
atggaaattcttaaactcttatcaatcggacttgcccttggcattttagtcgttatccccggactttcgacggggacgatggcggtagttttcaacgtatacgaccgtcttatcggaataattacacctaacataaaaaaaataataagcgaatggaagttctggcttccccttataataggcggcgctgtaggcctcgcgtttatcagtaaagttgtcaccgttatgtacgacaaatacccgtttcccataacatggttttttatcggcgtcattacgggaagtctgccgcttctttacggaaggatgaaaccctctgagaaaaaactccctaatcttgcgcccgcgatttgcgctcttcttgcgcttgcggtaatgatagtaatggcggtaataagcccgaacgaaagtacagccgtttacacggaaatctcgccgcgcattttcggccttcttgtccttgccggatttttttccgctatagcgatgataattcccggaatctccggcgcgtttttgcttcttatcattggaatgtaccgcacagtaattcaatctgtctctgattttaacatcctgcttttactccctttagcgcttggcattatcgtaggtcttttagccggcgccgctcttgtccgtttcctgcttgcaaaagcgcctatggaaacctacggcgccgttttgggactggtagcaggctctattgtggttttgttccccggcggacttggagagggcaatattgttattatttcaacggtttgttttctagtcggcgcggcgctttcgttcttgcttggtaagaagaaaaattaa

SEQ ID NO: 71994 - protein, 272 aa, Unknown
  Obtained from environmental sample
  SIGNAL (1)...(25)
  DOMAIN (3)...(269): Domain of unknown function (DUF368)
  misc_feature (1)..(272): Xaa is any amino acid
MEILKLLSIGLALGILVVIPGLSTGTMAVVFNVYDRLIGIITPNIKKIISEWKFWLPLIIGGAVGLAFISKVVTVMYDKYPFPITWFFIGVITGSLPLLYGRMKPSEKKLPNLAPAICALLALAVMIVMAVISPNESTAVYTEISPRIFGLLVLAGFFSAIAMIIPGISGAFLLLIIGMYRTVIQSVSDFNILLLLPLALGIIVGLLAGAALVRFLLAKAPMETYGAVLGLVAGSIVVLFPGGLGEGNIVIISTVCFLVGAALSFLLGKKKN

SEQ ID NO: 71995 - DNA, 909 bp, Unknown
  Obtained from environmental sample
  misc_feature (1)..(909): n is a, c, g, or t
atgtgccaagccttattttcaaaaagagaaagccgccggagcagaaggcggaagaaaatgaagtgtgatccggcaaacccgaaaggctccggaattgtaaacatctggcaggaaacttttcccgtccgtttcggctctatagacagatcggacaggcttacgttagacgctatttttcaattttttcaggaagcggcgatttgccacgcggaaaatttaggtgtagggcgcgaggacatgctgcgcacggggcaaatctggatactttcgcgcatgtccgtaatcgtaaaaagacgcccaaaatattttgagaacatcactgtccgaacctggccgcgcggcggcgaaaaactctttgccgtccgcgattacgacatacgcggcaaggatgacattcccgtcgtgcgcgcccgaagcggctggatagtactggacgtggaaaagcgccgccccatcagacctcaatcattaatggacaatctgccgcagaacgagggagagaacgctctttctcccgaagacggcgccattgccgctcttgaagagcgaagcagcctgcaaaaaatcgccgaaagaaaagcgctctacacggaccttgattttaacggccatgtaaacaatgtccgctacattcaatggatagaggacgccgttgagccgcagtttctggaaagcgcggacagtatgcgtcttgacatcaactacctgaacgaaattctgggcggcgaagatgttgatattatgtccgcaaatatagaaaacgcaacttgttgcgactcggcctgcgccgaagcgtttgcttttgaaggcaagaagacggaaaactcgcaaacagcgccgcaaactgcggcgcaaactgcggcgcaaactgcgttcagggcggaattaaaactgtatggaaattcttaa

SEQ ID NO: 71996 - protein, 302 aa, Unknown
  Obtained from environmental sample
  DOMAIN (33)...(294): Acyl-ACP thioesterase
  misc_feature (1)..(302): Xaa is any amino acid
MCQALFSKRESRRSRRRKKMKCDPANPKGSGIVNIWQETFPVRFGSIDRSDRLTLDAIFQFFQEAAICHAENLGVGREDMLRTGQIWILSRMSVIVKRRPKYFENITVRTWPRGGEKLFAVRDYDIRGKDDIPVVRARSGWIVLDVEKRRPIRPQSLMDNLPQNEGENALSPEDGAIAALEERSSLQKIAERKALYTDLDFNGHVNNVRYIQWIEDAVEPQFLESADSMRLDINYLNEILGGEDVDIMSANIENATCCDSACAEAFAFEGKKTENSQTAPQTAAQTAAQTAFRAELKLYGNS

SEQ ID NO: 71997 - DNA, 693 bp, Unknown
  Obtained from environmental sample
  misc_feature (1)..(693): n is a, c, g, or t
gtgaacggccgaatgaaaataagaagagtcaaattcaggaaaatcccgctaaaaagaaaaaatttaaaaagaatgcccgtaaaggtttttacaagggaagatttaaagaaggggatttatatccttccttctttgtttacctgcggaaatatgagttttggcgtgctttctgttgtcgcgtctatcggcggccattttattccggcggcatggtttttaatcggcgcgctgtgctgcgacattatcgacggcagaatcgccagaatgaccaatacaaccagctcttttggcatggaactggattccttaagcgatcttgtttcgttcggaatagcgcccgcgataatgatgtatatgctggtgttaaacaccatgggaaaaataggaatcgccattgccgtgctttatgtcctgtgctgcgccctgcgtctcgcgcgttttaacgttcttgcgaactcgggcgaggttcacaagcacttcaaggggcttcccactcccgcttcggcaggcgtgataatttcgtttgtgttaagctaccagcttttagcgccggaaggtttccatcttaactctaaaacaatcccgaaattaatggaatttatgccgacattttttagggcaatgcccatagttatcgttgtgctttcgttcctgatggtttccaacattccgtatctgtcgtttaagaattga

SEQ ID NO: 71998 - protein, 230 aa, Unknown
  Obtained from environmental sample
  DOMAIN (70)...(226): CDP-alcohol phosphatidyltransferase
  misc_feature (1)..(230): Xaa is any amino acid
MNGRMKIRRVKFRKIPLKRKNLKRMPVKVFTREDLKKGIYILPSLFTCGNMSFGVLSVVASIGGHFIPAAWFLIGALCCDIIDGRIARMTNTTSSFGMELDSLSDLVSFGIAPAIMMYMLVLNTMGKIGIAIAVLYVLCCALRLARFNVLANSGEVHKHFKGLPTPASAGVIISFVLSYQLLAPEGFHLNSKTIPKLMEFMPTFFRAMPIVIVVLSFLMVSNIPYLSFKN

SEQ ID NO: 71999 - DNA, 486 bp, Unknown
  Obtained from environmental sample
  misc_feature (1)..(486): n is a, c, g, or t
atgaagaataccgccgccctgtacgacaacaatccttataaccgccttgtgacgttggcgaaagaagcgcaaaaggtcggcgttataaagggcattataatgcaccagggagaatccggcgctaagagcggtaattgggcgcagaaggtgaagggtatctatgacaatatgttgattgatttggggcttccggccaattcgataccgttcgtcgccggcgagccgtacggcgcggcgaatgggcagaataacgccggcactatcagggggttgacgaacacaatgaccgcaaagctgccaagcggcgagaacgtcgcgcacgtggtgtcgtcggcggggtgcgcgtcggggggggataatttgcattttagttatgaggggtataagaagttgggggaggagtacgggaagaagatgcttgaactgaattataagaatttgccgcccgctacctcgattaagtgggggacgtcgcggggggattga

SEQ ID NO: 72000 - protein, 161 aa, Unknown
  Obtained from environmental sample
  misc_feature (1)..(161): Xaa is any amino acid
MKNTAALYDNNPYNRLVTLAKEAQKVGVIKGIIMHQGESGAKSGNWAQKVKGIYDNMLIDLGLPANSIPFVAGEPYGAANGQNNAGTIRGLTNTMTAKLPSGENVAHVVSSAGCASGGDNLHFSYEGYKKLGEEYGKKMLELNYKNLPPATSIKWGTSRGD

SEQ ID NO: 72001 - DNA, 639 bp, Unknown
  Obtained from environmental sample
  misc_feature (1)..(639): n is a, c, g, or t
atgcgtaccgcgacttttttgacggtagggcgttctttgcgttggccggtgtttcttttgaccgccggagtgttgtttcttggaggtataatgattagcggctgctcacccgatagtgacggaaatcccgccggcgcggtgccgggggcggggtcttttagcgagttgttcaaacctgttgacgacggggcgcctgtgcccgcagttccgcagccgctttctgcggcggatgataaggagaacttccatatttatttggcgttcgggcagtcgaatatggaggggcagaattggagcgggtcgtcgattacttacaacgatgttattcccatgacgtacaaggagaatgtagaccagcgttttcaggtgatggcggcggtcggcggttcttataagatttccaactcccaaaacgagcagcgggcaaaggggcagtggtacaaggctgtgccgccgcttgtgagaaacaataccggattgtgtcccgccgactatttcggcaggacattggtcgccggaatatcggacgctaatataaaggtgggcgttatagcggtcgccgttgccggggccgcgatagagggtttgaaaaggggagcggtgcgaacagttatttcagtacgcaggagagctggatga

SEQ ID NO: 72002 - protein, 212 aa, Unknown
  Obtained from environmental sample
  misc_feature (1)..(212): Xaa is any amino acid
MRTATFLTVGRSLRWPVFLLTAGVLFLGGIMISGCSPDSDGNPAGAVPGAGSFSELFKPVDDGAPVPAVPQPLSAADDKENFHIYLAFGQSNMEGQNWSGSSITYNDVIPMTYKENVDQRFQVMAAVGGSYKISNSQNEQRAKGQWYKAVPPLVRNNTGLCPADYFGRTLVAGISDANIKVGVIAVAVAGAAIEGLKRGAVRTVISVRRRAG

SEQ ID NO: 72003 - DNA, 840 bp, Unknown
  Obtained from environmental sample
  misc_feature (1)..(840): n is a, c, g, or t
ttggagcgtctacgtcgtcgacgggaacgacgacggccagatacgcggcgcgctcaaggccgccgtaaacgagagggagcgcccgacgctcataatcggcaagacggttatgggcaagggggcgctcgcaaaggtcagggcgtctttcgagaaaaaggtctccacccacggtcagccgatctccgacgccggcgcgtcggcggaggagacgataaagaatctgggcggcgacccggccgatccgttcacggtatttccggacgtggcggagcattaccgcgccgcgctcgacaaaaaacgcgcctacgcccgcgaaaagaaggccgagcaggcggcatgggagaaggccaatccggaactcgcaaagaagttcgcggcgtacatgaaccgcgaactccccgatatagactgggcgtcgataaagcacaaacccggcgtggccagccgcgccgcctccggaacggtgctcgccgagttctcgtccaagatcggcaatatgatagtctcatccgccgacctctgcaacagcgacaagaccgacggcttcctaaagtcgtcgaaggcgctgcaaaaaggggatttctccggcggcttcctgcaggccggcgtcgcggagctaacgatggccgccgtgatgaacggcatagcctcgcacggcggggtgcttgccgtctgcggcacattcttcaccttctccgactacatgaagcctgcgatgcgcatggccgcgctcatggagctgccggtcaagtacgtttggtcgcacgacaacttcagggtaggggaggacggcccgacccaccaacctatagagcacgagacgcaggtcaggctgcttga

SEQ ID NO: 72004 - protein, 279 aa, Unknown
  Obtained from environmental sample
  misc_feature (1)..(279): Xaa is any amino acid
MERLRRRRERRRPDTRRAQGRRKREGAPDAHNRQDGYGQGGARKGQGVFREKGLHPRSADLRRRRVGGGDDKESGRRPGRSVHGISGRGGALPRRARQKTRLRPRKEGRAGGMGEGQSGTRKEVRGVHEPRTPRYRLGVDKAQTRRGQPRRLRNGARRVLVQDRQYDSLIRRPLQQRQDRRLPKVVEGAAKRGFLRRLPAGRRRGANDGRRDERHSLARRGACRLRHILHLLRLHEACDAHGRAHGAAGQVRLVARQLQGRGGRPDPPTYRARDAGQAA

SEQ ID NO: 72005 - DNA, 438 bp, Unknown
  Obtained from environmental sample
  misc_feature (1)..(438): n is a, c, g, or t
atgtgccgcagacggcaagcaccccgccgtgcgaggctatgccgttcatcacggcggccatcgttagctccgcgacgccggcctgcaggaagccgccggagaaatcccctttttgcagcgccttcgacgactttaggaagccgtcggtcttgtcgctgttgcagaggtcggcggatgagactatcatattgccgatcttggacgagaactcggcgagcaccgttccggaggcggcgcggctggccacgccgggtttgtgctttatcgacgcccagtctatatcggggagttcgcggttcatgtacgccgcgaacttctttgcgagttccggattggccttctcccatgccgcctgctcggccttcttttcgcgggcgtaggcgcgttttttgtcgagcgcggcgcggtaatgctccgccacgtccggaaataccgtga

SEQ ID NO: 72006 - protein, 145 aa, Unknown
  Obtained from environmental sample
  misc_feature (1)..(145): Xaa is any amino acid
MCRRRQAPRRARLCRSSRRPSLAPRRRPAGSRRRNPLFAAPSTTLGSRRSCRCCRGRRMRLSYCRSWTRTRRAPFRRRRGWPRRVCALSTPSLYRGVRGSCTPRTSLRVPDWPSPMPPARPSFRGRRRVFCRARRGNAPPRPEIP

SEQ ID NO: 72007 - DNA, 585 bp, Unknown
  Obtained from environmental sample
  misc_feature (1)..(585): n is a, c, g, or t
atgggatcagtatcaaaatcaggtaacgtcaacgtcaacgacaacgtcaacgtcagcacccgctgcgccgacaatatccgcgtcctatccgtcgctatggtggaacgcgcccgctcggggcatccgggcggggctatgggcggggcggactttataaacgtgctctacacggagttcctcaactgggatcccgacgaccccgcttgggcgaaccgcgaccgcttctatctcgatcccggccacctctcggctatgctctacgcggagcttgctttgtgcgggctcttcacgatggacgagctttcgaccttcaggcagtgggggagcgccgcgccggggcatccggagatgaacgcggctcggatgatcgacaactcctccgggccgctcggtcaggggcacgctatggggctcggcgccgctatcgccgagcgcttcctcgccgcccggttcggcgagtggatggcccacaagacctatacatatatatccgacggcgggatacaggaggagatctcgcagggggtcgggcggctcgccgggcacctgggtgctctccaacttcatcatgttcttcgactctaa

SEQ ID NO: 72008 - protein, 194 aa, Unknown
  Obtained from environmental sample
  DOMAIN (18)...(194): Transketolase, thiamine diphosphate binding domain
  misc_feature (1)..(194): Xaa is any amino acid
MGSVSKSGNVNVNDNVNVSTRCADNIRVLSVAMVERARSGHPGGAMGGADFINVLYTEFLNWDPDDPAWANRDRFYLDPGHLSAMLYAELALCGLFTMDELSTFRQWGSAAPGHPEMNAARMIDNSSGPLGQGHAMGLGAAIAERFLAARFGEWMAHKTYTYISDGGIQEEISQGVGRLAGHLGALQLHHVLRL

SEQ ID NO: 72009 - DNA, 381 bp, Unknown
  Obtained from environmental sample
  misc_feature (1)..(381): n is a, c, g, or t
atgacgaaaatagttcaaggtatgtttagcggcgccggcaagaaaatcggaatcgtggccggccgcttcaacgagttcatagtgggaaagctgctggaaggcgcctacgactgtttggagcgtcacggcgtanagcttgacgacgtgacggtctgttgggtccccggatcgtttgagattccgtctgcggtgcagcgtatggcgcgttcgaagaagtacgacgccgtaatagctttgggagccgttatcagaggcagcactccgcattttgattatgttgcggncgaagtgtctaaaggtatcgccaagataggtttggacgaaggattgcccgataatattcggagttctaaccacagacacgatagagcaagcggttga

SEQ ID NO: 72010 - protein, 126 aa, Unknown
  Obtained from environmental sample
  DOMAIN (11)...(125): 6,7-dimethyl-8-ribityllumazine synthase
  misc_feature (1)..(126): Xaa is any amino acid
MTKIVQGMFSGAGKKIGIVAGRFNEFIVGKLLEGAYDCLERHGVXLDDVTVCWVPGSFEIPSAVQRMARSKKYDAVIALGAVIRGSTPHFDYVAXEVSKGIAKIGLDEGLPDNIRSSNHRHDRASG

SEQ ID NO: 72011 - DNA, 1209 bp, Unknown
  Obtained from environmental sample
  misc_feature (1)..(1209): n is a, c, g, or t
atgaaaccatttgaagaaatagaatccgtaatctccgactaccgttccggcaaaatcgtcataatagtagacgacgaggagcgtgagaacgaaggcgacttcgctttcgcctccgagctttgcacgccggaaaagatcaacttcatggccacgcacggacgcggcctcatctgcgtctccatggagggggcaaggctcgacgcgctcggaatcccgcaaatggtttccgcgaacacgtcgcgtttcgaaacggcgttcacaatctcggtagaggcgcgagaggggaccaccaccggcatctccgttcacgacagggcggccaccgtgctcaagctcgtagatcccaagagcgttcccggcgactttgttatgcccgggcacatgtttcccataagggctcgcgagggcggcgtgctcgtccgcagcgggcagacggaggcctccgtcgatttggcgcggcttgccggacttacgccgtccggtgtgatatgcgaggtgatgaacgaggacgggacgatggcgcgtatgccgcaacttttggagatagggaagcggcatgggattaagataatatcggtggtcgacatcatccgctaccgcaccgcccacgagaagtttatcaaaagggcggcgcagacgcggctgcccacgcgccacggcgagtttaggatgaccgcctacgaagacggattgaccggcgcggtgcacgtcgctttgcagtcgggcgagatcgactccgagaaaccggtgctgacccgcgttcactccgagtgcttcaccggcgacattttgggctctctgcgctgcgactgcggcgagcagctgcataccgctatgcgcagggtggcggacgagggcggcgtagtcctctatctgcgtcaggagggccgcggcataggccttgtcaacaagatacgcgcctacgcgcttcaggacggcggcatggataccgtggaagccaacgagcaattgggcttcgcgccggatttgcgggactacggcataggggcgcagatattggttgatctgggtatacggaaattgcgcctgatgacgaataacccgcggaaaatcgtggggcttgagggttacgggcttgaggtgacggagagggtgccgatagagataaatcccgggcatgagaatagaaagtaccttaatacgaaaaaagaaaagctgggtcacttgtttgaagggagcgatatatga

SEQ ID NO: 72012 - protein, 402 aa, Unknown
  Obtained from environmental sample
  DOMAIN (207)...(374): GTP cyclohydrolase II
  misc_feature (1)..(402): Xaa is any amino acid
MKPFEEIESVISDYRSGKIVIIVDDEERENEGDFAFASELCTPEKINFMATHGRGLICVSMEGARLDALGIPQMVSANTSRFETAFTISVEAREGTTTGISVHDRAATVLKLVDPKSVPGDFVMPGHMFPIRAREGGVLVRSGQTEASVDLARLAGLTPSGVICEVMNEDGTMARMPQLLEIGKRHGIKIISVVDIIRYRTAHEKFIKRAAQTRLPTRHGEFRMTAYEDGLTGAVHVALQSGEIDSEKPVLTRVHSECFTGDILGSLRCDCGEQLHTAMRRVADEGGVVLYLRQEGRGIGLVNKIRAYALQDGGMDTVEANEQLGFAPDLRDYGIGAQILVDLGIRKLRLMTNNPRKIVGLEGYGLEVTERVPIEINPGHENRKYLNTKKEKLGHLFEGSDI

SEQ ID NO: 72013 - DNA, 1290 bp, Unknown
  Obtained from environmental sample
  misc_feature (1)..(1290): n is a, c, g, or t
gtgacccagcttttcttttttcgtattaaggtactttctattctcatgcccgggatttatctctatcggcaccctctccgtcacctcaagcccgtaaccctcaagccccacgattttccgcgggttattcgtcatcaggcgcaatttccgtatacccagatcaaccaatatctgcgcccctatgccgtagtcccgcaaatccggcgcgaagcccaattgctcgttggcttccacggtatccatgccgccgtcctgaagcgcgtaggcgcgtatcttgttgacaaggcctatgccgcggccctcctgacgcagatagaggactacgccgccctcgtccgccaccctgcgcatagcggtatgcagctgctcgccgcagtcgcagcgcagagagcccaaaatgtcgccggtgaagcactcggagtgaacgcgggtcagcaccggtttctcggagtcgatctcgcccgactgcaaagcgacgtgcaccgcgccggtcaatccgtcttcgtaggcggtcatcctaaactcgccgtggcgcgtgggcagccgcgtctgcgccgcccttttgataaacttctcgtgggcggtgcggtagcggatgatgtcgaccaccgatattatcttaatcccatgccgcttccctatctccaaaagttgcggcatacgcgccatcgtcccgtcctcgttcatcacctcgcatatcacaccggacggcgtaagtccggcaagccgcgccaaatcgacggaggcctccgtctgcccgctgcggacgagcacgccgccctcgcgagcccttatgggaaacatgtgcccgggcataacaaagtcgccgggaacgctcttgggatctacgagcttgagcacggtggccgccctgtcgtgaacggagatgccggtggtggtcccctctcgcgcctctaccgagattgtgaacgccgtttcgaaacgcgacgtgttcgcggaaaccatttgcgggattccgagcgcgtcgagccttgccccctccatggagacgcagatgaggccgcgtccgtgcgtggccatgaagttgatcttttccggcgtgcaaagctcggaggcgaaagcgaagtcgccttcgttctcacgctcctcgtcgtctactattatgacgattttgccggaacggtagtcggagattacggattctatttcttcaaatggtttcatgttttcatatctttaaatccactaataccccagtctctccatcttatcaacaagcgtctctttttgatcaacggacgatacggtatttatttcggaattgattga

SEQ ID NO: 72014 - protein, 429 aa, Unknown
  Obtained from environmental sample
  misc_feature (1)..(429): Xaa is any amino acid
MTQLFFFRIKVLSILMPGIYLYRHPLRHLKPVTLKPHDFPRVIRHQAQFPYTQINQYLRPYAVVPQIRREAQLLVGFHGIHAAVLKRVGAYLVDKAYAAALLTQIEDYAALVRHPAHSGMQLLAAVAAQRAQNVAGEALGVNAGQHRFLGVDLARLQSDVHRAGQSVFVGGHPKLAVARGQPRLRRPFDKLLVGGAVADDVDHRYYLNPMPLPYLQKLRHTRHRPVLVHHLAYHTGRRKSGKPRQIDGGLRLPAADEHAALASPYGKHVPGHNKVAGNALGIYELEHGGRPVVNGDAGGGPLSRLYRDCERRFETRRVRGNHLRDSERVEPCPLHGDADEAASVRGHEVDLFRRAKLGGESEVAFVLTLLVVYYYDDFAGTVVGDYGFYFFKWFHVFISLNPLIPQSLHLINKRLFLINGRYGIYFGID

SEQ ID NO: 72015 - DNA, 678 bp, Unknown
  Obtained from environmental sample
  misc_feature (1)..(678): n is a, c, g, or t
atgttcaccggactgatcgagactaccggcgttatcgcctccgttcgaccgcaaggcggggccatggagctttgtatcaggcccgacgccgccgatttcacagttgatataggcgcttccgtggccgtcgacggggtctgcctaacgcttgagaggtcggacggcgggggtcggctgttctttaccgccgtggcggagacgctggggcgctcctcggtaggcaaggctcaggcgggacggcgggtcaacttggaacgggctatgcgggccgacggccgtttagacggccatatagtcttaggccacgtcgacgccgtaggtcggatcgcctatgatgaaaaggtgggcgcaagcatcgtacggacgatagagatacctgatgaactctacccgctgacagccgaaaagggctccatagccgtagacggcataagtctgaccgtcgcgggagcaaaacggggttcggtatcaatatcgctgattccggcgacgatggcccaaacgacgatgggggagaaaaaagtcggcgacagcgtcaacattgagtgcgacgtcttggcgcggtacatatacggaatgattaaggcaggagtgtcaatcaattccgaaataaataccgtatcgtccgttgatcaaaaagagacgcttgttgataagatggagagactggggtattag

SEQ ID NO: 72016 - protein, 225 aa, Unknown
  Obtained from environmental sample
  DOMAIN (3)...(87): Lumazine binding domain
  misc_feature (1)..(225): Xaa is any amino acid
MFTGLIETTGVIASVRPQGGAMELCIRPDAADFTVDIGASVAVDGVCLTLERSDGGGRLFFTAVAETLGRSSVGKAQAGRRVNLERAMRADGRLDGHIVLGHVDAVGRIAYDEKVGASIVRTIEIPDELYPLTAEKGSIAVDGISLTVAGAKRGSVSISLIPATMAQTTMGEKKVGDSVNIECDVLARYIYGMIKAGVSINSEINTVSSVDQKETLVDKMERLGY

SEQ ID NO: 72017 - DNA, 480 bp, Unknown
  Obtained from environmental sample
  misc_feature (1)..(480): n is a, c, g, or t
ttgtatattatttttgaagacaaaatacaagaatggttcaaaacacgaatatccggatggaaccttgacgcgctccacagcgccgttctgaacggggatgccgagacgtttcaggatgagttatccgcgattctttcggagagcgtaagttacatggatagcgcagaaagcctttaccacgggcttatgatcgggacgttggcgcgaataaacggttacagattgaagtccaacagagagagcggagacggacgcagcgatttggtcttgtacagcgcaaacgaaagagacggaaaagcgattattttgnagtttaagatggcctctaatgccaaaatgctcacaaaagcttgcgaagacgctctgaaacagatagaaaataatanctatactgcatattgggacgaagatgactataaaaacattatcaaatatggcataggtttctacaaaaaaaagtgtgaagtaaggaaagggtga

SEQ ID NO: 72018 - protein, 159 aa, Unknown
  Obtained from environmental sample
  misc_feature (1)..(159): Xaa is any amino acid
MYIIFEDKIQEWFKTRISGWNLDALHSAVLNGDAETFQDELSAILSESVSYMDSAESLYHGLMIGTLARINGYRLKSNRESGDGRSDLVLYSANERDGKAIILXFKMASNAKMLTKACEDALKQIENNXYTAYWDEDDYKNIIKYGIGFYKKKCEVRKG

SEQ ID NO: 72019 - DNA, 729 bp, Unknown
  Obtained from environmental sample
  misc_feature (1)..(729): n is a, c, g, or t
ttgctgttttgcgggctgaagatagaggagaccggcgagcggtatatggggcatcaggggaagtatccggtgatatttctgagtttcaaggaaataagacaaggaagctttggctcatcatataatctgctgaacgattgcattgccgacgaatttgaacggcacgcctacgttacggaaaagatatcgagcgattatgaccggaatttgtttaagaacctgtccaaccgcaccggctctatcgaagattatgttgtggcgctcaaatttttgagcaagtgtttggagaattaccacggtaaaagaacaataatcctgattgacgaatacgatgtcccactggaaaattcttgggtttgcgattattacgatgaaatgatcgcattcatccgtccgctccttggcagcgcgttcaaagataatccgcatttgctgtttgcggtgatgacgggatgcttgcgtatttctaaagaaagtatttttacgggactgaataaccttatggtgatctcaatactcaataaatcttattccgagtattttggctttacgcagaatgagatggacgccatgctgaagtactacgaactggaggataagcggcaaatagtccgagactggtacaacggctatctgtattgtatattatttttgaagacaaaatacaagaatggttcaaaacacgaatatccggatggaaccttgacgcgctccacagcgccgttctga

SEQ ID NO: 72020 - protein, 242 aa, Unknown
  Obtained from environmental sample
  misc_feature (1)..(242): Xaa is any amino acid
MLFCGLKIEETGERYMGHQGKYPVIFLSFKEIRQGSFGSSYNLLNDCIADEFERHAYVTEKISSDYDRNLFKNLSNRTGSIEDYVVALKFLSKCLENYHGKRTIILIDEYDVPLENSWVCDYYDEMIAFIRPLLGSAFKDNPHLLFAVMTGCLRISKESIFTGLNNLMVISILNKSYSEYFGFTQNEMDAMLKYYELEDKRQIVRDWYNGYLYCILFLKTKYKNGSKHEYPDGTLTRSTAPF

SEQ ID NO: 72021 - DNA, 3204 bp, Unknown
  Obtained from environmental sample
  misc_feature (1)..(3204): n is a, c, g, or t
ttgatcgcgagaacactggagcgtatgattgcggctacagagaaatatgttatgagaaatgtcatcgtgatgaataactttttcattgttatggtgtctattgcaattgcggcggcggttgtaatcgtatacctccttctgagaagaaatatcaagtatattattatccacctaaaacatatccgcggcgtattttcatacgcgataattctgcttatcataatagcgtttacgctcatggtcatactaagttccgtctttatgaccaacatagtttccaaacagttggcggacaatgcgcttgcggcgcttgactatctggaaaccaatatcgcaatagacctcaaagagcctaggacgctgttgggcggcgcatccgaaaccgtgcgcaaaatgatcatacacggcgcaagcgaaaaagaagtacatacttatattcaagaaatcaccgagtttttactgagtgatgaagaacagcttgcggactttgacgggcttttcggttattttaacgtattcggcggagcgttactcgacggacaggatcgcgcgccgcctaaagattatgaccctctcgaccgtccatggtacaaagaatcggtggcgcgcggcggcgaaatagtatttatacagccccatttcagcgtaatgtcaatgacccctacgactatcattgcctatggacgagccatgtatgacgataacggaaacctgctcggcgtactcgccttgaacatgaattttgaaagggtcaaagcatatatcgtccatgcgaatttaggcaaattgtggtttggaatcttattgagcgaagattttgattttattttccatagagaccacagattggaaggtacaaattttgcgaacattaacaacgataccgcaagacttgtggcattgctgaaatcgggaaataacagagtttccgaatacagaatgatgaactatcagaatatcccttcaatcacatttatgaggaaactggaaaacggctggtatctcggcattgtaacgcccgaaaacgcgtatttcacggaaatcaaaagggtaaggtttattctcatattgctgggaattacgctgtcggcaatattcagcgtcatactggctaagatgataacggaaaaacaaaaggctgactcaaagatagaagaggcggaaaaggcgataatggcaaatcgcgttaaatccgattttcttgcaaagatgagccatgaaatacgttcgccgatgaatgtgattttgggtattctcgaaatgcagcttgagaaaatagacctgccgcaggaaacaatggaagcgctgggtaaaatgcagaattccggtcatttactgcttaatataatcaacgacatactggacctttctaaaattgaatcgggcaagatggaattggttcagaccaattatgatattccaagtctgatcaacgatacggtacagtttaacgttgtacgttttgacagtaagcccattcaatttgttttaaaagttgatgaaaatattcctgtaaatttatacggcgaccctctgcgcataaaacagatattgaataatctgctctccaacgctttcaaatacacagatatgggagaagttgaactgtcgttttccgccaagatttccgaaacaggcaagtctgtaatgcttattataaatgtaagtgataccgggcacggcatgactcaagaacagatagacaagctgtttgatgattacacgcggtttaacatagaccccaaacgtcaaattcagggtacaggcttgggcatgagcgttaccaaacgctttattgacatgatgaaaggcgagatttccgttaaaagcgagccgggaaaaggcacaacgtttaatatacgaataccgcagggttatatcgattcggatgtattggggaaggaagggacagataatctacagcaattatgcgccggaagagaagcaagagaaaaaaccgccgaatttgtcagagagtatatgccctacggcaaagtattggttgtagacgatatggagccgaatctttatgttactaacatggttcttgctccttacggattggcaatatctaccgccaaaagcggacaagaggcgattgataaaattaaaagcggtatgtcatttgatattatttttatggaccattatatgccggatatggacggcatggaaacgacaaagatattacgagacattgggtataagctccctattgtcgcgctgaccgctaacgctttggtcggacaatccaaggtttttttggaaaacggctttaacgggtttctttccaaacctattgatacgcgccatctcaattcaacgctgaacaaatttgttcgagacagacaacctatcgaagttatcgaagccgcccggaaagagaaaaaacatgaagaggaatccggactgccggatttaagtagcataaaggcgctgattgtggacgattttatgccgaattcgagcttaacagctggtttgctggaagagtataaaatacagtcggattgtctgttaagcggacaagaagcggttgataaaattaaaagcggggaaccgcagtacgatattatttttatggatattttgatgccggaaatggacggcatagaagcaaccaaattgatacgttcactgggtacggaatatgcgaacactatacctattatcgcccttacggcaataccggaaagcgagacagccgagaaagaaaaaacgtttttggacagcgggtttcaggctgttttgtacaaacccctcaccattgaaagcgtagatgcctttataaaagactggaaaaatgatagaataaagaactgttctattaagaaggagaaagatatggaaacaatcgacatacccggagtggataacgaaagaataaagcaaatttacggcgacaaattcaaaatctttttgaatgttttgcgttcatatctttccgttgtacccgccgctcttgaaaaaatgagcaaggtttcccaggaaacattgccgagttatgttgtcagcgtacacggcgtgaaaagcgtcagcgacagcataggcgcggaagaagcgagaaaaagggctcttgaactggagatgctgggcaaagccggagaccttaacggtatattggcaaagaacgaaacgttcattaaatacgcgaaagagcttatagtcaatgtacaaaaatatctggagaaatatcccgcataa

SEQ ID NO: 72022 - protein, 1067 aa, Unknown
  Obtained from environmental sample
  DOMAIN (209)...(291): Cache domain
  misc_feature (1)..(1067): Xaa is any amino acid
MIARTLERMIAATEKYVMRNVIVMNNFFIVMVSIAIAAAVVIVYLLLRRNIKYIIIHLKHIRGVFSYAIILLIIIAFTLMVILSSVFMTNIVSKQLADNALAALDYLETNIAIDLKEPRTLLGGASETVRKMIIHGASEKEVHTYIQEITEFLLSDEEQLADFDGLFGYFNVFGGALLDGQDRAPPKDYDPLDRPWYKESVARGGEIVFIQPHFSVMSMTPTTIIAYGRAMYDDNGNLLGVLALNMNFERVKAYIVHANLGKLWFGILLSEDFDFIFHRDHRLEGTNFANINNDTARLVALLKSGNNRVSEYRMMNYQNIPSITFMRKLENGWYLGIVTPENAYFTEIKRVRFILILLGITLSAIFSVILAKMITEKQKADSKIEEAEKAIMANRVKSDFLAKMSHEIRSPMNVILGILEMQLEKIDLPQETMEALGKMQNSGHLLLNIINDILDLSKIESGKMELVQTNYDIPSLINDTVQFNVVRFDSKPIQFVLKVDENIPVNLYGDPLRIKQILNNLLSNAFKYTDMGEVELSFSAKISETGKSVMLIINVSDTGHGMTQEQIDKLFDDYTRFNIDPKRQIQGTGLGMSVTKRFIDMMKGEISVKSEPGKGTTFNIRIPQGYIDSDVLGKEGTDNLQQLCAGREAREKTAEFVREYMPYGKVLVVDDMEPNLYVTNMVLAPYGLAISTAKSGQEAIDKIKSGMSFDIIFMDHYMPDMDGMETTKILRDIGYKLPIVALTANALVGQSKVFLENGFNGFLSKPIDTRHLNSTLNKFVRDRQPIEVIEAARKEKKHEEESGLPDLSSIKALIVDDFMPNSSLTAGLLEEYKIQSDCLLSGQEAVDKIKSGEPQYDIIFMDILMPEMDGIEATKLIRSLGTEYANTIPIIALTAIPESETAEKEKTFLDSGFQAVLYKPLTIESVDAFIKDWKNDRIKNCSIKKEKDMETIDIPGVDNERIKQIYGDKFKIFLNVLRSYLSVVPAALEKMSKVSQETLPSYVVSVHGVKSVSDSIGAEEARKRALELEMLGKAGDLNGILAKNETFIKYAKELIVNVQKYLEKYPA

SEQ ID NO: 72023 - DNA, 2247 bp, Unknown
  Obtained from environmental sample
  misc_feature (1)..(2247): n is a, c, g, or t
gtgatctttgtacctttgtgttctttgtgtgacctcttcgttaatatttactctcataaacaaaaattgtataataaattgatgaaaacagataaagtcctaaaaatagaacgacacggttatgactttattcccgccgaatatttgcctaagggaacggatgaatactggctgaggaacgcgcagcaggcggaattgttttccaaaaaagaagacagttggcgcaagcttaaacctgcggaaattgaaatactgattcaaaacaaaaatacctgcgcaaagtgggacgacttccttgtaaccgatcctttcgatccttcgctgatccgcgattcaaatttttacggtcttgtgcgtattggcgctttgcaaaatgttctgcttaaacatcatgacttttgtattccggcgggaattcgtttcagcacaattgtttcctgcgacatcggcgataattcggctattcaggaatgcgcgtatatctgcaattacataatcgggaacaactgtatactttcaagagttgatgaattgcagacgaccaaccacgcaaagttcggcaacggcgtaataaaggacggcgaagccgaagaagtgcgcgtctggatcgatgtgatgaatgaagccggcggacgttccattctgccgtttgacaaaatgatcgccgcggacgcctatctttgggcggcataccgcgatgataccgtgttaacagccaagttggcggagattacgcaaaaacagtacggcggcttacggggcagttacggagttatcgggtcaaacgcggtgattaaaagttgtttaattattaaagatacggcggtgggggagagcgcttacattaagggagcgaacaaacttaaaaatattacgatacagtcttccgccgaggagcctacgcagataggcgaaggcgtggaaatggtaaacggcattgtcggttacgcctgcaacgctttttacggttccaaggctgtgcgttttatcatgggcagaaacagtaacttaaagtacggagcaagattgatacactcggtactgggagacaactcaactgtatcatgctgcgagatacttaacaatttgattttccccgtgcatgaacagcaccacaacaattcatttttaatcgccagccttgtcgagggaatgtcgaatatggcggcggcggcgacaatcggcagtaaccacaacagccgcgccaatgacggagagataagggctaaacgcggtttttggcccggacttgccgtcagtcttaaacactcatgtgtcttcgcttcctttgtgatcatcgccaaaggcgaatatccgtcagagttaaatattccgcttccattctcgcttgtaaacaacaatacgcacagaaaccgtcttgaagtaatgcccgcttatttttggatacacaacctctacgctcttgagcgcaattcatggaaagccaaaaaccgcgacaagagaaaaataaaaatccagcgcattgaaaccgactatcttgcgcccgacacagcggaagaaatcattgccgctctgtcgctcctcggcggcttgctcggcgaggcgggtttctcgccgatggacttggcgggcgaggacggaattgaagtgcgtcaaattcactgccgccaccttgaacacagcaaaagagatcagatagtcataaagccgctggaagcgattgccgcttaccgccaaatgcttcgctattacgcggtaaaaactatcgcggcgtttttggattcgcgtaaagatttggattttaaaggcttaagtaaattgcttggcgatgatgagcgtgtcaaagagtgggttaacgcgggcggacagattgttcccgctttccgcgtggacgctctccgtaaggaaataggcggcggcaagtataaaaattgggacgagattcacaaggtatacgactcttgggacgaagaatatccgctggataaatgccgccacgcgtgggcggttctcgcgtttcttcatggaacaaacaaagctcctgacgtatctatgttaaaaaaagaatttgccgaagttttggagatacgccattggatagaaaaacaaatttttgagagcagggcgaaggactaccgtaatcattttaaaaaagccacattccgtaatcacgcggagatggaacaagtgcttggaaaaccggaagataatccctttatccggcttgtgaaagaagagggtatcggttttaaaaagatgatagaaagagcaagcgcaaagttgtaa

SEQ ID NO: 72024 - protein, 748 aa, Unknown
  Obtained from environmental sample
  misc_feature (1)..(748): Xaa is any amino acid
MIFVPLCSLCDLFVNIYSHKQKLYNKLMKTDKVLKIERHGYDFIPAEYLPKGTDEYWLRNAQQAELFSKKEDSWRKLKPAEIEILIQNKNTCAKWDDFLVTDPFDPSLIRDSNFYGLVRIGALQNVLLKHHDFCIPAGIRFSTIVSCDIGDNSAIQECAYICNYIIGNNCILSRVDELQTTNHAKFGNGVIKDGEAEEVRVWIDVMNEAGGRSILPFDKMIAADAYLWAAYRDDTVLTAKLAEITQKQYGGLRGSYGVIGSNAVIKSCLIIKDTAVGESAYIKGANKLKNITIQSSAEEPTQIGEGVEMVNGIVGYACNAFYGSKAVRFIMGRNSNLKYGARLIHSVLGDNSTVSCCEILNNLIFPVHEQHHNNSFLIASLVEGMSNMAAAATIGSNHNSRANDGEIRAKRGFWPGLAVSLKHSCVFASFVIIAKGEYPSELNIPLPFSLVNNNTHRNRLEVMPAYFWIHNLYALERNSWKAKNRDKRKIKIQRIETDYLAPDTAEEIIAALSLLGGLLGEAGFSPMDLAGEDGIEVRQIHCRHLEHSKRDQIVIKPLEAIAAYRQMLRYYAVKTIAAFLDSRKDLDFKGLSKLLGDDERVKEWVNAGGQIVPAFRVDALRKEIGGGKYKNWDEIHKVYDSWDEEYPLDKCRHAWAVLAFLHGTNKAPDVSMLKKEFAEVLEIRHWIEKQIFESRAKDYRNHFKKATFRNHAEMEQVLGKPEDNPFIRLVKEEGIGFKKMIERASAKL

SEQ ID NO: 72025 - DNA, 387 bp, Unknown
  Obtained from environmental sample
  misc_feature (1)..(387): n is a, c, g, or t
atgatgaatgaaaatcaaattgggataataatcgtagatactgctgtaaatttacacaaaaatcttggttctggactatttgaaagtgtttatgaagttattttatcaaaactgcttgtccaaaaagggctttatgtccaacgacaagtttcaattcctataaactttcaaggggaacatattgatgaaggttttcgcgcggatttattcgttgatggtaaggttatcattgaactaaaatcagtaaaaaatataactgatgcccacaaaaaacaattattaacttatttgaaactgacaaacacgaaactcggtttcatcttgaatttcggagcgggagtaatgaaagatggcatattcagaataataaatgggactcttaattaa

SEQ ID NO: 72026 - protein, 128 aa, Unknown
  Obtained from environmental sample
  misc_feature (1)..(128): Xaa is any amino acid
MMNENQIGIIIVDTAVNLHKNLGSGLFESVYEVILSKLLVQKGLYVQRQVSIPINFQGEHIDEGFRADLFVDGKVIIELKSVKNITDAHKKQLLTYLKLTNTKLGFILNFGAGVMKDGIFRIINGTLN

SEQ ID NO: 72027 - DNA, 2865 bp, Unknown
  Obtained from environmental sample
  misc_feature (1)..(2865): n is a, c, g, or t
gtggattgggcgaaagccccgaaattgacggtaagggttgaacatccggctctttggggcgttagtaaccctacggggaacatcactccggccaaagacatacgcaagggctatgcttttgaaattgagtttactcccgaccttgcctacagtttggaagggtggcgggcttatttaacttcatccctgcctgccgactggctgcttgaccccggccttctggacggtgttgaaaggcttgacggcgtatccgtaattgttcccgaacttccggcgcgcggagggataggcaaatttattatcaatacaaccgaaaatgtgacccttgtcccctggtgcaagaccgaaccttatgttctgaggacagtcccgcgcaactcacccgcgatattatatcctcgcggaacgacaatagaaatctttttcaacgcgcctttacttttaacgcccaatgaggaacttccccttttattcacggaaggaataatcaaaataaccgcaaagggcataaacaaagaagacgagcccgtactaatcagcggcaacaattacagttacaattatcccatatacaccgccaacaacgatcttggcgaatacaagataacgattactcccaccaacgtacccggagacagtcttgtcgaggtgacggtaggccctaatattctcaacgcctcaaacacccccatggcaaagtccgaagttttttccttcaacacctatcccgcctccggcggcggcagtatagacacatggagcgccgattacaatgaaagcgcgaaaaccatagaaatcaagtggacaacaacaggggcggtttttgtagaagcgcattaccgcgttaacaaaagcgccgacaatgaactttccggcggcagtcccgttatgataagaggcgtaagcgctcttaataattcaagcgtgagggaaggccgggaagtaagcaacatacaggaatacgagatatttttagacctgatagtggaaggcttaaaatccaacgtaggttcaaaatcattcaagatatggaacattcccggcatgagcgtggcgcataacaacccgattctggaaataaacactgaagccgcccttgccgccataaggactcccgcaacagacaacctatattacggtcttggcgccgcaaacgccgccaagcaatatgtgcttaccgatgacatcacgattacgacagcatggacgccgataggaaccgacaccgattctttccaaggaaaattctacggcaacgggcatgcggttagcattgtcaatttcgccgttccaagcgatgggactgcggatattggactattcggtgtagttggcggcggctttatccgcgattttacggtgcagcattcgggtagtgtaactcgttcgggcgagacccgatttggcggcatagccggtactatgaagggtactgcgaaaacggaaaatgttttggttaaaggtgtggttacggttactgtggacactgacaatgatatgtacgttggaggcattacgggacgtatgctcggtactacagaaacaaccaactcttacggcggacttgaccttattgtaaatcacccctacatctatactgtcgaaattgaatactttgtaggaggctccgtttatgtaggcggtattacgggaagtatgggtattgatgatgccggtattacagttaaagttgaaaaagtaacagttgtaggaaatatcaacattactgcaagttcttgcaatgcagaagacctttctcaaaattatggtcttatcataggtggtctcgcaggccaagttatccatgctaatatgaatgatacttattaccagcagggagacattattgtaaattcaaattatgggagtgcctttcttgggggcgcttttgggtatgttgaaaattcaataataagtaattgttactctgcggctagaaaatttaacacaataaaagaaaaatatggtaattcattttatgttggaggtttcatgggtcagtctgctaatggaggagtagttgtgaattgttattctgttaactcgataactgtagaagcaaataaattaaataacagttcaagtataggaggttttgttggttattgtaatagtgacattatatactgttattcaaaagctgatgtaaatacctatgtcactattggtgagatcggtggttttgtgggctcaggggggtataaaaaaagtttcaaatactgttatgcatcgggtaatataaatgctttaaattcttcaaataacaatattctttctgttggaggttttattggtttttctgattcttgtatcatcgcaaactgttattatcaagggaatgtgtttatcgattcaaataataataactatgttgatgccggaggattattaggtggtggtgtaggtaaccctattgagcataacttttctatgggcgcagtaactatttggaacagtacaggctctacctctgtaggtggtatttcttcttctgtttcatacattgatacttttcaaaataatgtagctttgtgcgcgagcattatggtaaccggttccggaaccaaaaacattgggcgaatcactggaagtgttttatctggttccccatctaactacgcttacagcgatatgatgctctcaacacgtacatctcacaatgcgtcatggacttcttttcccacgactgcgggagctgccacaaaagacggtgcagatgcccacgatggaaatttccgagacccggctttctggaaaggattaggtttctccgaagaagactggattttctccaccacggttggtatgcgtcatcccatactcagggcaagcaaaaacggcccggagatgggcggacagcggtga

SEQ ID NO: 72028 - protein, 954 aa, Unknown
  Obtained from environmental sample
  misc_feature (1)..(954): Xaa is any amino acid
MDWAKAPKLTVRVEHPALWGVSNPTGNITPAKDIRKGYAFEIEFTPDLAYSLEGWRAYLTSSLPADWLLDPGLLDGVERLDGVSVIVPELPARGGIGKFIINTTENVTLVPWCKTEPYVLRTVPRNSPAILYPRGTTIEIFFNAPLLLTPNEELPLLFTEGIIKITAKGINKEDEPVLISGNNYSYNYPIYTANNDLGEYKITITPTNVPGDSLVEVTVGPNILNASNTPMAKSEVFSFNTYPASGGGSIDTWSADYNESAKTIEIKWTTTGAVFVEAHYRVNKSADNELSGGSPVMIRGVSALNNSSVREGREVSNIQEYEIFLDLIVEGLKSNVGSKSFKIWNIPGMSVAHNNPILEINTEAALAAIRTPATDNLYYGLGAANAAKQYVLTDDITITTAWTPIGTDTDSFQGKFYGNGHAVSIVNFAVPSDGTADIGLFGVVGGGFIRDFTVQHSGSVTRSGETRFGGIAGTMKGTAKTENVLVKGVVTVTVDTDNDMYVGGITGRMLGTTETTNSYGGLDLIVNHPYIYTVEIEYFVGGSVYVGGITGSMGIDDAGITVKVEKVTVVGNINITASSCNAEDLSQNYGLIIGGLAGQVIHANMNDTYYQQGDIIVNSNYGSAFLGGAFGYVENSIISNCYSAARKFNTIKEKYGNSFYVGGFMGQSANGGVVVNCYSVNSITVEANKLNNSSSIGGFVGYCNSDIIYCYSKADVNTYVTIGEIGGFVGSGGYKKSFKYCYASGNINALNSSNNNILSVGGFIGFSDSCIIANCYYQGNVFIDSNNNNYVDAGGLLGGGVGNPIEHNFSMGAVTIWNSTGSTSVGGISSSVSYIDTFQNNVALCASIMVTGSGTKNIGRITGSVLSGSPSNYAYSDMMLSTRTSHNASWTSFPTTAGAATKDGADAHDGNFRDPAFWKGLGFSEEDWIFSTTVGMRHPILRASKNGPEMGGQR

SEQ ID NO: 72029 - DNA, 819 bp, Unknown
  Obtained from environmental sample
  misc_feature (1)..(819): n is a, c, g, or t
atggccgaggggatgttcctggaagctttaggcagggcgggaaagaccacaaaaataagctggggctatttggcatgcagcctttacctttgcctgacccaggcccttttttgccgccagtacggggaggaagccataattatttggaacgtagcgaccatggcttacgttacctaccttctcgcttacgaaataatatatttccatctctggaacaggcataaggataaagtctttgggactaaagcctttgaggaagaacccaaaggaagcgttcccatcgacagcatcctggtcggcatggcgatatgctacctgtgcggggctttcgactttatccacaacacgtttttcaaggacaacagctcccttttttcgtacagcgtgttcgcggtctacgtcgggatggtctttgccctgtccaagcggttcagcgcaatgtacgggcagctggaacagtccaacgccgtattggaaacgacggtaaaggaacggacacgggagcttgaggagcagacggcaatagcagtcgagcagacggaaatagcggtgcaggcctcgcgcgcgaaaagcgaattcctcgcgaccatgagccacgaaatacgcacccccctgaacgcggtaatcggcctgtccgaaatcgagctgcgggacgggccgtccggctccagcagggaaaacatagcccggatacgccagtccggcgcgtcgcttttggggattgtcaacgacatcctggacatttccaaatcgaggccggaagcttcgggcttgtcccctccgaatatgaaaccgcgccgtttgtcagcgacaccgtga

SEQ ID NO: 72030 - protein, 272 aa, Unknown
  Obtained from environmental sample
  DOMAIN (189)...(254): His Kinase A (phosphoacceptor) domain
  misc_feature (1)..(272): Xaa is any amino acid
MAEGMFLEALGRAGKTTKISWGYLACSLYLCLTQALFCRQYGEEAIIIWNVATMAYVTYLLAYEIIYFHLWNRHKDKVFGTKAFEEEPKGSVPIDSILVGMAICYLCGAFDFIHNTFFKDNSSLFSYSVFAVYVGMVFALSKRFSAMYGQLEQSNAVLETTVKERTRELEEQTAIAVEQTEIAVQASRAKSEFLATMSHEIRTPLNAVIGLSEIELRDGPSGSSRENIARIRQSGASLLGIVNDILDISKSRPEASGLSPPNMKPRRLSATP

SEQ ID NO: 72031 - DNA, 1572 bp, Unknown
  Obtained from environmental sample
  misc_feature (1)..(1572): n is a, c, g, or t
gtgaacctcaacatggtgcggttcggttccaaaccgattggctttgccctggaaatcggcggggactttccggcaaagcttataggcgacgagttgcgggtcaggcaggttttgaacaacctgctttcaaacgcggccaagtacaccgacgaagggaccgttgccctgaaaatagcgtggtctattcacagtgccggaaaggtcaaattggcttttaccgtgcgggataccggaataggcatacgcgccgaagacataaaaaagctgttcgccagctacgcccagctcgataccggtgcaaagcgcaaggccgggggaaccggcctggggcttgcaatcacaaaaaacctcgtggaaatgatgggcggcagcatctgcgtggaaagcgaatacggaaaaggctcggcctttaccgcggagattatacagggcattgcggaatacaagcctatcggggaagaaacagccgaagccctgcgcaatttccgttatgcgccagaaggcaaagaaaaaattattacccgttcctggctgcctcacgctcaagtattggtggtggacgacctgccagaaaacctcctcgtagcccaaggcttgcttgcaccctacggcctgaaggtagacgccgccgcttcagggcgggaagccatagaactggttaagagccatagctacggccttatattcatggatcacatgatgccgggaatggacggcatagaaaccgcggacaagatacgcgcattaggcacggaatacgcgaaaaaaatacccattatcgccttgaccgccaacgcgatacacggaacggaacagatgttccttgaacacgatttccaggcgtttatatccaagcccatcgacataatggagcttgattcagttataaggaaatggctgcgagacgaagagaaagaaaaagaactgggaaccaacgcgtacataacgcctgataattcttccgaagatgaaaaaaccgcgaatattacgatagaaatacccggagtagataccgaaaaagggctattactttacggcggcgacaagaaaatctacctttcgcttctgcgttcctacgttttcaacacgcctgtaaatttaagcaagctaaaaacggcatcaaaagatacattgaacagttatgttattgcggtacacggattaaaaggcaccagcgccggcataggggcggaatccatcagggaagaagccctgaatctggagaatttggccagatccggagacattaataaggttttggaactaaacaacaagctgattagcgatacggaagcagtcgtagaaagcgtaaaaacatggcttgaggggtacgactcccttaacgcgaaacccatccaaaaggcccccaatcctgaggttttggcgcgcctgaggcaatgctgcgagaaattcgacatgtccggcattgacaaagccatggcggaactggaaagtaccgattacgaagaaggcaatgatctggtaaaatggttaaaggataagatagttatatcggaaataacagaagcggcagcaaaaattgcgcagtatgaaaaggagttaaagaaatga

SEQ ID NO: 72032 - protein, 523 aa, Unknown
  Obtained from environmental sample
  DOMAIN (354)...(436): Hpt domain
  misc_feature (1)..(523): Xaa is any amino acid
MNLNMVRFGSKPIGFALEIGGDFPAKLIGDELRVRQVLNNLLSNAAKYTDEGTVALKIAWSIHSAGKVKLAFTVRDTGIGIRAEDIKKLFASYAQLDTGAKRKAGGTGLGLAITKNLVEMMGGSICVESEYGKGSAFTAEIIQGIAEYKPIGEETAEALRNFRYAPEGKEKIITRSWLPHAQVLVVDDLPENLLVAQGLLAPYGLKVDAAASGREAIELVKSHSYGLIFMDHMMPGMDGIETADKIRALGTEYAKKIPIIALTANAIHGTEQMFLEHDFQAFISKPIDIMELDSVIRKWLRDEEKEKELGTNAYITPDNSSEDEKTANITIEIPGVDTEKGLLLYGGDKKIYLSLLRSYVFNTPVNLSKLKTASKDTLNSYVIAVHGLKGTSAGIGAESIREEALNLENLARSGDINKVLELNNKLISDTEAVVESVKTWLEGYDSLNAKPIQKAPNPEVLARLRQCCEKFDMSGIDKAMAELESTDYEEGNDLVKWLKDKIVISEITEAAAKIAQYEKELKK

SEQ ID NO: 72033 - DNA, 1962 bp, Unknown
  Obtained from environmental sample
  misc_feature (1)..(1962): n is a, c, g, or t
atgacagagctgaaaaaaattatcgtagtggacgataatgttgaaaacctaaccgctatncaaaacacgctgaaggaaaagtacgaggtgtacccaagcctatcggcgctgaagatgtttgatcttctggagcatatcacgccggacttaatacttctggacgttgagatgccggagatgaacgggtatgacgccgctaaaaaactgcttggctacgaaaaattcaaggaaatacccattatattccttacttccaaggacgacgcgaaaagcgaaatggaaggcctgaacataggcgccgttgattatatacgcaaaccctttgtcgcaccgcttttgctcaggcgcatacagacgcatcttgccctgattgaacatcagcttgaggcgcagaaggcttctcaggcaaaaggcgaatttttgtcccacatgagccatgaaatacgcactccgttaaacgccataatcggcatgataaacatcgccgtaaacacggacgatatagaaaaaataaaatactgccttcagagggcgggcagcgcgtctaagcaccttttgaatatcatcaacgacattcttgacatgtcaaagattgaggcgcacaaattcgagctttcttacagcgaatttaattttgaaaaaatgctgatggacattatcaacgtaacaaacgtccgcgccgaggaaaaaaacctgaacttcgcggttatcttaaacacaaatgttccgtctttaataatcagcgacgagctgagattttctcaggttattatgaacctgcttaacaacgcgatcaaattcacccccgaaaacggcaaggttgttttgagagttgaaaagatagacgagacaggcgatgaaattaccttaaaaacggaaattgccgacagcggcataggaatgacggaggaacagcagaaaaaactctttacatcttacgttcaggccgacagcagcattacaaaaaatttcggcggcaccgggcttggccttgttatttccaaacaaattgtggaacttatgcacggagagatatggattgagtcaaaacccaacaaaggctcaaaatttatatttacgacaaaagtacaaaagggacttggaaaatcggaagtgcagttgtccgcaaagataaacagggacgaactgaagattctcgcggtagacgattccgaagaaacaagaatgtattttgcccacgttatggatgcgttccacctgccgtgcgatatcgcgtgcagcggaaaagaagctctggaaatgatggaaaagaccccggacaagccttacaacctgttctttgtcgactggcaaatgccggacatggacggtattgagttaacaaaaaaaatcaaggagcttacaggcgacaaatcgtttgtaattatgctgtccatggccgattggaaaaccattgagaaagaagcgattgccgcgggcgtaagacaatttatcccaaaacccattttcccgtccgtgctgataaacgttatcaatgaatgtattgaaattaaaccgaaagacggttccggcagaccggacggaacaacagatgccgcgtttaattttaaggattattcaatattggtcgcggaagacgttgaaattaacagggaaattctctccacggttctggaagaaacggggatttcaattgattttgcgcagaacggctcaagcgcggtctccatgttccagatgcacccggacaaatacaaccttatattaatggacgttaacatgcccgaaatggacggatatgaggcgactcaggctatacgggcgctggaaatacagcaggcaaaagatatctgcattatagcgatgacagctaacgttttccgcgaagacatagaaaaatgccttgcggcgggaatgaacgatcatataggaaaaccgattgccccggaaacattacacgaaaaacttaacaagtatctcgcaaaaggaataagcgggtaa

SEQ ID NO: 72034 - protein, 653 aa, Unknown
  Obtained from environmental sample
  DOMAIN (136)...(201): His Kinase A (phosphoacceptor) domain
  misc_feature (1)..(653): Xaa is any amino acid
MTELKKIIVVDDNVENLTAXQNTLKEKYEVYPSLSALKMFDLLEHITPDLILLDVEMPEMNGYDAAKKLLGYEKFKEIPIIFLTSKDDAKSEMEGLNIGAVDYIRKPFVAPLLLRRIQTHLALIEHQLEAQKASQAKGEFLSHMSHEIRTPLNAIIGMINIAVNTDDIEKIKYCLQRAGSASKHLLNIINDILDMSKIEAHKFELSYSEFNFEKMLMDIINVTNVRAEEKNLNFAVILNTNVPSLIISDELRFSQVIMNLLNNAIKFTPENGKVVLRVEKIDETGDEITLKTEIADSGIGMTEEQQKKLFTSYVQADSSITKNFGGTGLGLVISKQIVELMHGEIWIESKPNKGSKFIFTTKVQKGLGKSEVQLSAKINRDELKILAVDDSEETRMYFAHVMDAFHLPCDIACSGKEALEMMEKTPDKPYNLFFVDWQMPDMDGIELTKKIKELTGDKSFVIMLSMADWKTIEKEAIAAGVRQFIPKPIFPSVLINVINECIEIKPKDGSGRPDGTTDAAFNFKDYSILVAEDVEINREILSTVLEETGISIDFAQNGSSAVSMFQMHPDKYNLILMDVNMPEMDGYEATQAIRALEIQQAKDICIIAMTANVFREDIEKCLAAGMNDHIGKPIAPETLHEKLNKYLAKGISG

SEQ ID NO: 72035 - DNA, 1227 bp, Unknown
  Obtained from environmental sample
  misc_feature (1)..(1227): n is a, c, g, or t
atggaagaaaagaaaaaaattatcgttgtagacgataatattgaaaatctgacagttcttaaagacactttaaaagaaaaatacgaagtatatacaattcccacggcggcaaaaatgttcgatttgctggaacatataatgccggacttaattttactggacgtggaaatgcctgatatgaacgggtatgaagccgcgaaaaaacttaaaagcgcggaaaaatacaaatccataccgtttatgtttttgactatcagggacgacataaaaagcgaaatggacggtttagaccttggcgccattgattacatccataagccgtttgtgagcccgctgctttttcaaaggataaatacaaatttttccctgatggattatcaaaaacttgaggttatttccaaagcgacagtaaccgccatgcagcatatcaaagaaggctttattcttgtagataccgaaaacaaatatatttcctccaattccgccgccgatacaatgtttcccggaattacaaaactcgagaaaggggatttaataacttccgcggaggattggcccgcgtttcttataattaatgaaggcaaccttgatttctcaactgaaggtgaaaatgtcaaacatttcaaggccggtataagccctgtctttgataaaaataatacccgtatagcgatgatcgttctggtttcggacgttaccgaacatgtaaattttgttaaagaactggaaaaagccgcctatacggacagtcttacgggtctttataacaggaagcatttttcggaacttgcggtggcggaagttcaaagggcggccagacttggtcaattattatatatggcaatgctggattttgattttttcaaaagcataaacgataactacggccataccgcgggggatttggttttgaaaacaacctcggaagttatccataaaagcattcgttcctacgatctgctttgccgttacgggggcgaggaatttgtcctgctttttgccgtcaggaatgaagccgaagcttccgttgtggcggaaagaatcagaaaaggcatagaaaattgcgttattaaatacgaagaacacatattaaaaattacatgcagcctgggcatggctaaattcctgggcaacgataacctggaaaccgccataaagaaagccgacgaagccctttacgccgcgaaaaaagcgggacgtaatcaggtaaaaatatatgagtcgtaa

SEQ ID NO: 72036 - protein, 408 aa, Unknown
  Obtained from environmental sample
  DOMAIN (5)...(118): Response regulator receiver domain
  misc_feature (1)..(408): Xaa is any amino acid
MEEKKKIIVVDDNIENLTVLKDTLKEKYEVYTIPTAAKMFDLLEHIMPDLILLDVEMPDMNGYEAAKKLKSAEKYKSIPFMFLTIRDDIKSEMDGLDLGAIDYIHKPFVSPLLFQRINTNFSLMDYQKLEVISKATVTAMQHIKEGFILVDTENKYISSNSAADTMFPGITKLEKGDLITSAEDWPAFLIINEGNLDFSTEGENVKHFKAGISPVFDKNNTRIAMIVLVSDVTEHVNFVKELEKAAYTDSLTGLYNRKHFSELAVAEVQRAARLGQLLYMAMLDFDFFKSINDNYGHTAGDLVLKTTSEVIHKSIRSYDLLCRYGGEEFVLLFAVRNEAEASVVAERIRKGIENCVIKYEEHILKITCSLGMAKFLGNDNLETAIKKADEALYAAKKAGRNQVKIYES

SEQ ID NO: 72037 - DNA, 2046 bp, Unknown
  Obtained from environmental sample
  misc_feature (1)..(2046): n is a, c, g, or t
atgtcaatacgtatcagggctttttttattataattattaccaatttgctgattatcctgttcagcgtttttttaggcgttacatacactagaaagaacatggaaaaaacaatagaagcggacatgatggtagtggccgatattgccgatcattttgtcagctccgaactggaactgctgagattacaggctttagacgccgccgggcatatagcaagagaaccgtcaaacctgtccgatattttggaaaaaacagaacctttattcccgcaatttttgggaatgtcggtcttgaattacacagccctcgcggcctcggcgggaaattcgcccgcccccgcggaaattcttgaaaacaaatatatcaaacgcgcgtttttgggagatactgcctttacttccacttatccaaccgataacggcgttgttttttatctggcggttcctgtccctgaattgcggggacacattctggttgtaacaattcccggtctgtatttcaacgaacgggtttccacatttaccgtctggaaaacggggcatatttttattgatgattccgagggaacggtgcttgccaatatccgcgaagaatggatacagactcgcgcgaattttatccgcatgggggaaaccgacagccgctacgcggaaattggcagcgtgataaaactggcgtcgctgggtaatgtaggcataggctatttctcgatctccggcatcccgcggatgtgcgcttacaggcctataagcggctctaaagagggatggttccttggaataatagcgccgcttccggaaagcccggtaaaaaaccttgacagagggtttttagcggtcgggcttgtcgcgtttatattcagcctcctgggggcaattatagcctcttattttattaagaaaccttttgaagaaacagccaggttaaaagaagaagcggagtcccatttaagatccaaaaccgatttccttgccaatatgagccatgaaatccgcacgccgcttaatgttataatcggccttactgacctgatattggaagaagacactctcgaaaaaacagtcaccgaaaacctgataaaaattaacaacgccggcgatacgctcttaagcattgtaaacgacattctggacttctccaaaattgagtcgggcaagctgacgctgtcgccggttgaatatcatatgtccagcgtgttaaacgacattgtcaccctggttattacccgtcttggggaaaaaccggtaatattcagccttaatatccccgacgaattgcccgccaaactgttcggcgacgatctgcgggttaaacagatattaacaaacctgctcagcaattccataaaatacacgcacaggggaagcattgaattaaaagtaaactgtacgcgcgaaggcgacgccgtatggatgcatattaccgttaccgacacaggcataggcatacacgaggacgacattaaaaagctgttccttgattatttccaggccgacgccaaagccaaccgcaatattgagggtacggggcttgggctgcctattaccaaaaaacttgtagatatgatggacggggagatcaccgcggaaagcgaatacggcaaaggcacggcgttccgcctgcgtatcaagcagggctttgttgaggatacgcccctgggagcggagacagcggaaaaactgcgcagttttcgttacatcgacgacaagcgtaccgccgccaaaaggctggtgcggctcaatttaagctacgccaaagtgctggtggtagacgacatgcagaccaatctggacgtggcggcggggcttttgcgcatttataacatgcatgtcgattgtttaagcagcggggaggaagctgtaaacaggatatacagcgaaaatcccgtttacgacgctatatttatggatcacatgatgccgagaatggacggcattgaaaccacggacaagatccgcgcgctgggcagggaatacgcgaaaaaaatacccattatcgcccttaccgccaacgcgatacacggaacggaacagatgtttttttga

SEQ ID NO: 72038 - protein, 681 aa, Unknown
  Obtained from environmental sample
  SIGNAL (1)...(26)
  DOMAIN (585)...(681): Response regulator receiver domain
  misc_feature (1)..(681): Xaa is any amino acid
MSIRIRAFFIIIITNLLIILFSVFLGVTYTRKNMEKTIEADMMVVADIADHFVSSELELLRLQALDAAGHIAREPSNLSDILEKTEPLFPQFLGMSVLNYTALAASAGNSPAPAEILENKYIKRAFLGDTAFTSTYPTDNGVVFYLAVPVPELRGHILVVTIPGLYFNERVSTFTVWKTGHIFIDDSEGTVLANIREEWIQTRANFIRMGETDSRYAEIGSVIKLASLGNVGIGYFSISGIPRMCAYRPISGSKEGWFLGIIAPLPESPVKNLDRGFLAVGLVAFIFSLLGAIIASYFIKKPFEETARLKEEAESHLRSKTDFLANMSHEIRTPLNVIIGLTDLILEEDTLEKTVTENLIKINNAGDTLLSIVNDILDFSKIESGKLTLSPVEYHMSSVLNDIVTLVITRLGEKPVIFSLNIPDELPAKLFGDDLRVKQILTNLLSNSIKYTHRGSIELKVNCTREGDAVWMHITVTDTGIGIHEDDIKKLFLDYFQADAKANRNIEGTGLGLPITKKLVDMMDGEITAESEYGKGTAFRLRIKQGFVEDTPLGAETAEKLRSFRYIDDKRTAAKRLVRLNLSYAKVLVVDDMQTNLDVAAGLLRIYNMHVDCLSSGEEAVNRIYSENPVYDAIFMDHMMPRMDGIETTDKIRALGREYAKKIPIIALTANAIHGTEQMFF

SEQ ID NO: 72039 - DNA, 843 bp, Unknown
  Obtained from environmental sample
  misc_feature (1)..(843): n is a, c, g, or t
ttgaaaccacggacaagatccgcgcgctgggcagggaatacgcgaaaaaaatacccattatcgcccttaccgccaacgcgatacacggaacggaacagatgtttttttgacacggttttccaggactttatatccaaacctatcgacataatggaactggataccgttataagaaaatggatacgcaacgaagaaaaggagaaagaactgggaaccaacgtgtttattacgcctgatgtttctcccgaagatgaaaaaacagcgaacctggaaataatcatacccggagtggataccgaaaaaggactttccctttacggctatgacaagaaaatttatctgacgcttcttcgttcttatgttcccaacacgcttgaaaacctgaaaaaactgaaaacggtttcaaaagcgacattgtccgattatgttatcagagtacacggtttaaaaggcaccagcgcaggtattggagcggaagaaatacgggcaaaagccctgaagctggaaaatttagccagagcggagaatctggacgaggttctggcgctgaacgacaatcttattaaaaacgctgaaattgttgtgaataacataaaagagtggctggcaggctacgatcttcacaacaaaaaaccgcttcttaaaaaacccgacaggaaaattctggcgcgcctaaggcaatgctgtgaaaatttcgatatggcgggcattgacaaagccatgacggaactggaaagctgcaactacgaagaaggcgccgagatggttgcgtggttaagggaaaaaatcaacatatcggaaatagacgaagccgcgatgcagcttgcaaaaatacttgtctga

SEQ ID NO: 72040 - protein, 280 aa, Unknown
  Obtained from environmental sample
  DOMAIN (115)...(190): Hpt domain
  misc_feature (1)..(280): Xaa is any amino acid
MKPRTRSARWAGNTRKKYPLSPLPPTRYTERNRCFFDTVFQDFISKPIDIMELDTVIRKWIRNEEKEKELGTNVFITPDVSPEDEKTANLEIIIPGVDTEKGLSLYGYDKKIYLTLLRSYVPNTLENLKKLKTVSKATLSDYVIRVHGLKGTSAGIGAEEIRAKALKLENLARAENLDEVLALNDNLIKNAEIVVNNIKEWLAGYDLHNKKPLLKKPDRKILARLRQCCENFDMAGIDKAMTELESCNYEEGAEMVAWLREKINISEIDEAAMQLAKILV

SEQ ID NO: 72041 - DNA, 1827 bp, Unknown
  Obtained from environmental sample
  misc_feature (1)..(1827): n is a, c, g, or t
ttgacacggaaccagtacggcaattatttaaacgacgtcaaaacggcaattaaaaacgcgaaagaatgggagggcacggcttacgaccccgaactgaaaacaaacatggtaatggcgatagccaatattcccatagggacttccccgacaacatggtcggtaatgctcggttcaaccgaaacctacatcctgagagatgtaaactcattaagatcgtttgtcattattttggcgtcgatagcccttgtggtagcggtggtaattatctactttgtccttggcaacactaccgcgccaatcgtcaaggtatcaaacaccctcaaagacatctccgaaggcgaaggtgatttaacgaagagcattgaagtccattccaaagacgaggtaggcgaccttgccgtatacttcaataaaacaatcggaaaaatcaaagaccttgtgcttgttattaaaaagcaggccggcgtgttgtcagatatcggctccgccctgtccagcaacatgaccgaaaccgccgcggcgatcaaccaaatcaccgccaacattcagagcatcaaaggccgcgtcataagccagagcgccagcgttaccgaaacaaacgccaccatggaacaagttatagccaacatcaacaaactcaacggtcatgtggaaaaccagagcagaaatgtttcccaggcatcatccgccattgaggaaatggtagccaatatcaattccgtcaccagcacgctggtcaacaacacagccaacgtaaaaaccttaaaggaagcgtccgaagtgggaaagaccggattacaggaagtagcggctgacattcaggaaatatcccgcgagtccgaagggctgttggaaattaactcggtaatggacaatatcgccagccagacaaatttattaagcatgaacgcggcaattgaagcggcccacgcgggagaagccggcaaaggttttgcggtagtcgcggacgaaatacgcaagctggcggaatcatcaagcgagcagtcaaaaacaacggcggggatgttaaaaaaaataaagtcttcaattgacagtattaccagttcttccaacgaagttcttgcccgttttgaagccatagactcgggagtaaaaacagtatctgaacatgaagaagttatacgtaacgcgatggaagaacaggaagcgggcggaaaacaaatacttgacgcggtaggacgccttaaagacataaccgtggaggttcataaaggcgccgaaggaatggcaagatccggcgatgaaatgatcaagagaacccataattttattaaggtaagcaaacaggtagtcgaaggcatgaacaggatggcggatgtagacgtaaaagaaataaagaccgcgattcaccatgttgatgaaatgagcgtggaaaacaataagaatttcaccgatcttaaagaagaaacggaaaaattcaagattgaaaccggcaaagaaaaaaagaaagtgctggtaatagatgataataaaacggatcttgttacggctaaaagtatgctggatagtaattatgatgttgttaccgccgattcgggaaccgccgccttaaaattgttccatacaggctttgtcccgaatgccattttacttgaccttataatgccgggcatgagcggctgggatactttcgagagaataaaaaagataggctctgttcataatgtcgccataatcatttattccgcgtcctcggatcccgatgacaatgaacgcgccaggaaaatgggggcggtagattttgtcaagaagcccgctgtcatggatgggttattgagtgtaatcagaagggcaatcgggatctga

SEQ ID NO: 72042 - protein, 608 aa, Unknown
  Obtained from environmental sample
  DOMAIN (218)...(483): Methyl-accepting chemotaxis protein (MCP) signaling domain
  misc_feature (1)..(608): Xaa is any amino acid
MTRNQYGNYLNDVKTAIKNAKEWEGTAYDPELKTNMVMAIANIPIGTSPTTWSVMLGSTETYILRDVNSLRSFVIILASIALVVAVVIIYFVLGNTTAPIVKVSNTLKDISEGEGDLTKSIEVHSKDEVGDLAVYFNKTIGKIKDLVLVIKKQAGVLSDIGSALSSNMTETAAAINQITANIQSIKGRVISQSASVTETNATMEQVIANINKLNGHVENQSRNVSQASSAIEEMVANINSVTSTLVNNTANVKTLKEASEVGKTGLQEVAADIQEISRESEGLLEINSVMDNIASQTNLLSMNAAIEAAHAGEAGKGFAVVADEIRKLAESSSEQSKTTAGMLKKIKSSIDSITSSSNEVLARFEAIDSGVKTVSEHEEVIRNAMEEQEAGGKQILDAVGRLKDITVEVHKGAEGMARSGDEMIKRTHNFIKVSKQVVEGMNRMADVDVKEIKTAIHHVDEMSVENNKNFTDLKEETEKFKIETGKEKKKVLVIDDNKTDLVTAKSMLDSNYDVVTADSGTAALKLFHTGFVPNAILLDLIMPGMSGWDTFERIKKIGSVHNVAIIIYSASSDPDDNERARKMGAVDFVKKPAVMDGLLSVIRRAIGI

SEQ ID NO: 72043 - DNA, 396 bp, Unknown
  Obtained from environmental sample
  misc_feature (1)..(396): n is a, c, g, or t
atgtctttaaggcgtcctaccgcgtcaagtatttgttttccgcccgcttcctgttcttccatcgcgttacgtataacttcttcatgttcagatactgtttttactcccgagtctatggcttcaaaacgggcaagaacttcgttggaagaactggtaatactgtcaattgaagactttattttttttaacatccccgccgttgtttttgactgctcgcttgatgattccgccagcttgcgtatttcgtccgcgactaccgcaaaacctttgccggcttctcccgcgtgggccgcttcaattgccgcgttcatgcttaataaatttgtctggctggcgatattgtccattaccgagttaatttccaacagcccttcggactcgcgggatatttcctga

SEQ ID NO: 72044 - protein, 131 aa, Unknown
  Obtained from environmental sample
  SIGNAL (1)...(24)
  misc_feature (1)..(131): Xaa is any amino acid
MSLRRPTASSICFPPASCSSIALRITSSCSDTVFTPESMASKRARTSLEELVILSIEDFIFFNIPAVVFDCSLDDSASLRISSATTAKPLPASPAWAASIAAFMLNKFVWLAILSITELISNSPSDSRDIS

SEQ ID NO: 72045 - DNA, 666 bp, Unknown
  Obtained from environmental sample
  misc_feature (1)..(666): n is a, c, g, or t
gtgggcaagcagagcgacgtagacgtcgccgtatgccccccctacatcagcctgtccgccgtggcggaggccgtaaaagggtcaaacgtgaagctcggcgcccaagacgtccactgggaggccaagggcgcgttcaccggcaaggtgagctgcgccatgctcaagtcggtcggggcggcctacgtcattatcggccactccgagcagcgccagtacttcggcgagaccgacgaaacggtcaacaagaagacgaaagcggccttagccgccggtttgctccccatagtatgcgtgggcgagacgctcgacgagcgtaaaggcggcaagatggacgcggtgatagaccgccagacccgcggcgcctttgccgggatcgacgcggcggacgcggccaaatgcaccatagcctacgaacccgtgtgggccataggcaccggcgagacggccacgccgcagcaggccaacgaggcgcatatatttataaggaatatattgacgcagctgtacggcaaggagacctccgacggtatgcgtattcagtacggcggcagcatgaagccggacaacgcgaaagagcttttggcccagagcgacgtggacggcggcctcataggcggcgcggcgctcaaggcggcggacttcgcggggattgtccagcccaagtga

SEQ ID NO: 72046 - protein, 221 aa, Unknown
  Obtained from environmental sample
  DOMAIN (2)...(218): Triosephosphate isomerase
  misc_feature (1)..(221): Xaa is any amino acid
MGKQSDVDVAVCPPYISLSAVAEAVKGSNVKLGAQDVHWEAKGAFTGKVSCAMLKSVGAAYVIIGHSEQRQYFGETDETVNKKTKAALAAGLLPIVCVGETLDERKGGKMDAVIDRQTRGAFAGIDAADAAKCTIAYEPVWAIGTGETATPQQANEAHIFIRNILTQLYGKETSDGMRIQYGGSMKPDNAKELLAQSDVDGGLIGGAALKAADFAGIVQPK

SEQ ID NO: 72047 - DNA, 387 bp, Unknown
  Obtained from environmental sample
  misc_feature (1)..(387): n is a, c, g, or t
atgcttttcgcgattttgttggtgttgtttctgattgtgtgcgtgttaatctgtttgctcatcctcattcagtccgacaagggcggcggtttgtccggcgcgatcggcggtttgagcggcgccaacagctttttgggtactcaggacacggctaacgtgctcacaaagggcacatacgtattcggcgcggtgtttttggtgctgtgcgtccttatgacgctctttgagccgggcggagggggcgttaagtccggtttgcagaagagggcggagaaggtgcagacggtcactccggtgcccgcctccgcgttcggggtggacgggatcgcagacgacgccggctcggcggcgccgagcgcgccgagcgaggacgcgcctgcggagtag

SEQ ID NO: 72048 - protein, 128 aa, Unknown
  Obtained from environmental sample
  SIGNAL (1)...(28)
  DOMAIN (3)...(77): Preprotein translocase SecG subunit
  misc_feature (1)..(128): Xaa is any amino acid
MLFAILLVLFLIVCVLICLLILIQSDKGGGLSGAIGGLSGANSFLGTQDTANVLTKGTYVFGAVFLVLCVLMTLFEPGGGGVKSGLQKRAEKVQTVTPVPASAFGVDGIADDAGSAAPSAPSEDAPAE

SEQ ID NO: 72049 - DNA, 666 bp, Unknown
  Obtained from environmental sample
  misc_feature (1)..(666): n is a, c, g, or t
ttgcgtgaacaaaaatcgttgattatgaacgatctgtatcaatacgatataaaagaagcggctcgtttaaaccgacaggccaaaatagccggcatagacgaagccggccgcggcccccttgccggaccggtcgtcgccgccgttgttatattggatttgaacaaccgtcccatagacggggtgaacgactctaagaagctgaccgccgccaagcgggatacgctgttcgatttgataaccgataatgccgaggcgtacggcgtcggcatcgccgaccaaggggagatagacgggatcaatatcctgcaggcgacctttctagcgatgaggcgggcgcttgaatgtgttgacggacgctatggcctgctcttggtcgacgggaaccaatacatagccggcgtcccccgcgagcgccagaagacgattgtcggcggcgacgcgctgagcgcctctatcgcagccgcctccatagtcgctaaggtcacgcgggataggattatggacgggtgccacgagcgctacccgcagtacgatttcgcgaaacacaagggttacgggacaaaacgtcatgtggagatgattaaattgcacgggctttgcgagatacataggaagagcttttgcaagaagatcgtcgcggcgcagacggagctgtttggggagtga

SEQ ID NO: 72050 - protein, 221 aa, Unknown
  Obtained from environmental sample
  DOMAIN (30)...(210): Ribonuclease HII
  misc_feature (1)..(221): Xaa is any amino acid
MREQKSLIMNDLYQYDIKEAARLNRQAKIAGIDEAGRGPLAGPVVAAVVILDLNNRPIDGVNDSKKLTAAKRDTLFDLITDNAEAYGVGIADQGEIDGINILQATFLAMRRALECVDGRYGLLLVDGNQYIAGVPRERQKTIVGGDALSASIAAASIVAKVTRDRIMDGCHERYPQYDFAKHKGYGTKRHVEMIKLHGLCEIHRKSFCKKIVAAQTELFGE

SEQ ID NO: 72051 - DNA, 1317 bp, Unknown
  Obtained from environmental sample
  misc_feature (1)..(1317): n is a, c, g, or t
atggcagagatcaaaccgttccgcggctaccgcttcaccctcggtaagccggaagatcttggcttgtactgcgctccgccctacgacatgctcgacgacgagatggtcgacgccttgtacggtaagcacccgaacaacgtcgtcagaatcacgcagaacaagcgtgtggcggcggacaccgccaacaaggacaggcacgtaagggcgggggagtttctgaacaaatggataagcgattccattatgacccgcgacggcgccgactccatctacatatatagacagcaattcagcgctcccggcgaggacggaaagcccgtcgcccgcgagcgcatcggcgtttgctcccttgtcaaattagtaggccttgacgaggggattatcctgccgcacgagtacacgctctccggccccaagcaggaccgctacgagcttatggagacgacgctcgcgaacaccgggcagatattcgggcttgccgcggacgacgacgggaagctctacgaactgatccgtttggtcatgtcgtcgtcgccgctggtgggttactttacggacgagaacgaggtcacgcactcgctctacagatgttacgatgccggtcttatcgatcaagcgaaagagctgatgaagacccgtaccatcctgatagccgacggccaccaccgttacgagacggcgttgcggttctatcgggatatgggggacgaggcctactcgcatgtgatgatgactaatgtgtctatggccgatcccggtctcatcatacgcccgttccaccgtttggtcaggaagaccgatcagggcaggagcgtcggaagcatgttggacgaactggccaagtatttcgacgtgaagcgcatagacaaagcttcagcggacggggtgtacaaggctctgtctgcgaagggcggcgcggagatagtctattgggattgcgcctcgggggatatttacgatttgcggcttagcggcggcggggagaaatttttggcgggggtgatgccggagcagtctgacaattggaagcgcctcgacgtttccaagataaattgcataatcataaacggtatcctatcgctgccgctagacggtcaagtcttgcacgacatagtgcactacgcgaacgacgccgctctcggcgccgagaagctcgcggaggccgccgccggctactactacggcggcttcttcattcgggcggtctcgataggcacggtgagcgatacggtaaagggcggggagcggatgccgcagaagtcgactaacttttatcctaagctgtactcggggcttgtgcttaacaagatgcgatga

SEQ ID NO: 72052 - protein, 438 aa, Unknown
  Obtained from environmental sample
  DOMAIN (3)...(437): Protein of unknown function (DUF1015)
  misc_feature (1)..(438): Xaa is any amino acid
MAEIKPFRGYRFTLGKPEDLGLYCAPPYDMLDDEMVDALYGKHPNNVVRITQNKRVAADTANKDRHVRAGEFLNKWISDSIMTRDGADSIYIYRQQFSAPGEDGKPVARERIGVCSLVKLVGLDEGIILPHEYTLSGPKQDRYELMETTLANTGQIFGLAADDDGKLYELIRLVMSSSPLVGYFTDENEVTHSLYRCYDAGLIDQAKELMKTRTILIADGHHRYETALRFYRDMGDEAYSHVMMTNVSMADPGLIIRPFHRLVRKTDQGRSVGSMLDELAKYFDVKRIDKASADGVYKALSAKGGAEIVYWDCASGDIYDLRLSGGGEKFLAGVMPEQSDNWKRLDVSKINCIIINGILSLPLDGQVLHDIVHYANDAALGAEKLAEAAAGYYYGGFFIRAVSIGTVSDTVKGGERMPQKSTNFYPKLYSGLVLNKMR

SEQ ID NO: 72053 - DNA, 1062 bp, Unknown
  Obtained from environmental sample
  misc_feature (1)..(1062): n is a, c, g, or t
atgaaattactaaagtacgttatcggtctattgttggcggtcctcggtctgtacgtgttttttcacggatccggcggcggcggcgagtctgtttatagtgcgcttgggggggagatttcccgttccagcccggtcgtcgtcgctgtttgcgccgggctttcgttgttttctatgtggttgcgggcgttgcgtttgcgcgtgctgctgccggacaccctgccgctccctccgctggagattgcgacctccgcgcttgaagccgccggcgtccgtccagctcctcacaagggcgggctcttttctgtcaccatcgtctcggctatgctgaacaacctcctgcccatccgcgccggagaggctgcccgcgccgccctcctctggaagcgcaacggctttcccgtcacggtctgcataggttcgctcctcatagagcgcgccctcgacatcatcgcctatctttcgtttctcttcgttccgcctatagtatcgccggcaattatgtctaagctgaaagacatccatcccgccgttatggtggcgatatggctctccgtagccgcgtttgccgcgctggtcggactgtttttcctgtatgcgctgatacctagaatattcagaggcgccgccgcgcggattgggaggcgcctgcctgctaaaatcaacgccgcggctagtagaatcgcggcggagatcgagtccaacctgtactggacggcgacgcccggtaaggtcgcctacgtggcggcgcttacctacgcgaccgcgctctgctactcatccatgctctttattttagtatccgacattacgctatccggctacatggacagcctattcgcccaagctttcgccgcgttcggcgccgccatcccgctggcccccggaagcgtgggaacgctgcacgccgtgttgctgcaggggatgacgataaccggttgtccgacgccgaaagcacgggccgtcatagtggtgtaccacgcggtgcagtacgtggtgattaccggtgtggggctgctgtgtatgctaaggttgaagtctaaggataaaagccggaagttctga

SEQ ID NO: 72054 - protein, 353 aa, Unknown
  Obtained from environmental sample
  SIGNAL (1)...(26)
  DOMAIN (109)...(350): Uncharacterised protein family (UPF0104)
  misc_feature (1)..(353): Xaa is any amino acid
MKLLKYVIGLLLAVLGLYVFFHGSGGGGESVYSALGGEISRSSPVVVAVCAGLSLFSMWLRALRLRVLLPDTLPLPPLEIATSALEAAGVRPAPHKGGLFSVTIVSAMLNNLLPIRAGEAARAALLWKRNGFPVTVCIGSLLIERALDIIAYLSFLFVPPIVSPAIMSKLKDIHPAVMVAIWLSVAAFAALVGLFFLYALIPRIFRGAAARIGRRLPAKINAAASRIAAEIESNLYWTATPGKVAYVAALTYATALCYSSMLFILVSDITLSGYMDSLFAQAFAAFGAAIPLAPGSVGTLHAVLLQGMTITGCPTPKARAVIVVYHAVQYVVITGVGLLCMLRLKSKDKSRKF

SEQ ID NO: 72055 - DNA, 789 bp, Unknown
  Obtained from environmental sample
  misc_feature (1)..(789): n is a, c, g, or t
atgaaaataacgtttttgggtaccggcacgtcgcatggcgtgccgcctatcgattgcatgatgacgggttatgccaagtgtcccaagggcgtgtgccgcaaagcgcggaccgacccgcgccacagccggacgcggacgtcggtgttgctcgaaaaggggggaaagacgctgattgccgacgtctccgcggatttccgccagcaggcgttgcgcaacaacatccgccgaattgatgctgttgcgctatcccacggccacatcgaccacttcggcggtttgcccgacatccgctcctacaccgacgcggcggacgagcccatagaggtatacggttcaaacgaaacgctggacacggtaaggcaggctttcccgtacatgttcgaggcaagaaccggaaggggcaaaggcgtaccgcgccttaagatgattaatttagcggatacccaaattatcgtgggcttcaaggtaacgcccgtgcccgtagagcacggcaccttgaaagagtgtttgggccttcgtatcgatgatatcggctacgtaccggacgtaaaacgaatgagcccccagagcgaggagttgctgaaagggctaaacgtattaatcctaaactgtctaagggacgaacgcgagcacccgacgcacatgttgctatcccaaagtatggacctagctagacgcctatcccccaagcgctgctactttatacacatgacgcacgacatagattacgaaacagacggaaaacgtatagataactggatggaattctcatacgctcggccaatctga

SEQ ID NO: 72056 - protein, 262 aa, Unknown
  Obtained from environmental sample
  DOMAIN (44)...(236): Metallo-beta-lactamase superfamily
  misc_feature (1)..(262): Xaa is any amino acid
MKITFLGTGTSHGVPPIDCMMTGYAKCPKGVCRKARTDPRHSRTRTSVLLEKGGKTLIADVSADFRQQALRNNIRRIDAVALSHGHIDHFGGLPDIRSYTDAADEPIEVYGSNETLDTVRQAFPYMFEARTGRGKGVPRLKMINLADTQIIVGFKVTPVPVEHGTLKECLGLRIDDIGYVPDVKRMSPQSEELLKGLNVLILNCLRDEREHPTHMLLSQSMDLARRLSPKRCYFIHMTHDIDYETDGKRIDNWMEFSYARPI

SEQ ID NO: 72057 - DNA, 1683 bp, Unknown
  Obtained from environmental sample
  misc_feature (1)..(1683): n is a, c, g, or t
gtgcggtacggcgggggcggcggggtatatgtgaacgccggcggaatcttcaccaaaaccggggggactatcacaggctatgccagtgatgcggtgaacggcaatgtggtaaagaacggttccggtgttgtgcagagcaacaggggccatgcggtgtatgtggcttcggatccggtcaggtacagggaaactacagcgggaccggagattaatcttgattcgagcttgaacagcggaaccaatcaaacccccacagccgacgattataactttggcagcctgacgcagaccgctggcagcgttaccgccgtaaccataacgccgaaatcggggaaatctacaggggcgcgaaccatttattacgcggggacaggcggcacaacttacgccaaaagtacaacgctcccaacgacggtcggcgcttacgcggtaacctttgacgtagcggctgtgacaggctggaacgcggcaacgagtttaagcgccggaacgctcacgattattgacggaaatacctccggcgcttttaccagcattgccgcaatgactgcatggttatccgcccagcctgccaataccgccgccgccgcttacaccgttaagttgaatgttgccgatctgccaagtagtatttcaaacgatgtattctcaggcaaatatgtcagtcttgatctttccggcagtaccttcaccagcattgggagtactttttttaacaactgtaccagccttaccggcataaccataggaaacggcgttaccagcattgagaatacggcttttacctatagtaccaaccttaccgtaataaatgttgatactgcaaataccgcatatagttcccagggcggcgtagtgtatgacaaaaacaaaaccactttacttacatacccggcgggaaaaacaggcaattttaccatccccaacagcgttgaaagcatttggtattccgcttttgcctattgctccattaccagcgtaaccatagggaacggcgttaccgacattgcgtatgatgcttttttcccttgctacaaccttactgcgatgaatgttaataccgctaataccatgtatagctctgaagacggcgtactgtataataaaaacaaaaccactttacttacatacccggcgggaaaaacagcaaaaacttttaccataccaaacagcgttaccaccattgaatataatgcttttgcctattgcgacagccttaacgacgtaaccataccggacagcgttaccagcattgaatattttgcttttcaatattgtacaggtcttaccagcgtaactatacccaatagcgttaccaccattggggaaagagcttttcaatattgttccagccttaccagcataaccataccggacaacgttaccagaattgggagtcaagcttttttagattgctgcagtcttacaagtataaccatacccaacagcgttcaaaaaatttgggcagacgcttttgatcgttgcaccagtcttaccagcgtaacatttcaaggcacgattgccgcggataatcttacctccatgagtgatattggtatagactatcatatgcaacccaaaacattctatggcgacttgcaagaaaaatatcttgcaggaggcattggaacatataccacaaccgcaccagttaacgataattcagtatggacgaaacaataa

SEQ ID NO: 72058 - protein, 560 aa, Unknown
  Obtained from environmental sample
  misc_feature (1)..(560): Xaa is any amino acid
MRYGGGGGVYVNAGGIFTKTGGTITGYASDAVNGNVVKNGSGVVQSNRGHAVYVASDPVRYRETTAGPEINLDSSLNSGTNQTPTADDYNFGSLTQTAGSVTAVTITPKSGKSTGARTIYYAGTGGTTYAKSTTLPTTVGAYAVTFDVAAVTGWNAATSLSAGTLTIIDGNTSGAFTSIAAMTAWLSAQPANTAAAAYTVKLNVADLPSSISNDVFSGKYVSLDLSGSTFTSIGSTFFNNCTSLTGITIGNGVTSIENTAFTYSTNLTVINVDTANTAYSSQGGVVYDKNKTTLLTYPAGKTGNFTIPNSVESIWYSAFAYCSITSVTIGNGVTDIAYDAFFPCYNLTAMNVNTANTMYSSEDGVLYNKNKTTLLTYPAGKTAKTFTIPNSVTTIEYNAFAYCDSLNDVTIPDSVTSIEYFAFQYCTGLTSVTIPNSVTTIGERAFQYCSSLTSITIPDNVTRIGSQAFLDCCSLTSITIPNSVQKIWADAFDRCTSLTSVTFQGTIAADNLTSMSDIGIDYHMQPKTFYGDLQEKYLAGGIGTYTTTAPVNDNSVWTKQ

SEQ ID NO: 72059 - DNA, 633 bp, Unknown
  Obtained from environmental sample
  misc_feature (1)..(633): n is a, c, g, or t
atgggttttgccccgtntattatgcagttcgcgttcagcctngtcggtattttgcagaatgccgtaattattaaatacggcggcgacgaggcgtttaccgcaatgacaattaccttcagcatgtttattgttatcattatgccgctcatgggaataggtcagggcgcgcagccgattatcggatataattacggcgcgaaacaatacgaccgcgtaaaaagatgctacaagctggcacttctttcctgcaccgcaattcttttcgccggttttctccttgcgcaattggcccccgggttttgtttttcgctgttcagcaaagataccggttctctgcgcgatcttggaatactgactatacggattataaccagtttggctcccattataggactgcagatgatgagcggtcagctttttcaggcgatagggaaacctgttcaggctgccgtattaagtctttcacgccaaattttattttttattccaatgcttttatttttgcccgttctgtttgaaaagatcggccttcgtcccattttcggcgtctattgcacttttccccttgctgatttttgttctgcgtttatatcggggatatttgtttataggcagtttaaaaagtggagataa

SEQ ID NO: 72060 - protein, 210 aa, Unknown
  Obtained from environmental sample
  DOMAIN (4)...(167): MatE
  misc_feature (1)..(210): Xaa is any amino acid
MGFAPXIMQFAFSLVGILQNAVIIKYGGDEAFTAMTITFSMFIVIIMPLMGIGQGAQPIIGYNYGAKQYDRVKRCYKLALLSCTAILFAGFLLAQLAPGFCFSLFSKDTGSLRDLGILTIRIITSLAPIIGLQMMSGQLFQAIGKPVQAAVLSLSRQILFFIPMLLFLPVLFEKIGLRPIFGVYCTFPLADFCSAFISGIFVYRQFKKWR

SEQ ID NO: 72061 - DNA, 831 bp, Unknown
  Obtained from environmental sample
  misc_feature (1)..(831): n is a, c, g, or t
gtgggagtagggaattttactttgattgaatccatatcggccacagaccgtatagggaaagaacctatcggccgcctgttacttaatttttccattccggcaataatcggaatgctggtaaacgctatttataatattgttgaccgtatctatatagggcaaggcgtagacgcgctgggtatagccggcgtcggcctcgttatgcctgtgatgatgattatacaatccgtctccatgcttgtaggcataggcgcgaattcgctcttttccatacgtttgggccagggccgctccgatgaagttgaaaaaataatgggaaacgcgttcactcttctctttcttcttcccggcatttgcataaccgtgtgctttattttcatggatcccattctgcgcggcataatgaaagcggaaggcgaaatatataaatacgccgacagttacctgcgcgttattctttacggcgcgatattcgcggcgatgagtcccggccttacccattttatccgttctgacggacatcctaaaacttctatgcttgttcagattgtaggcgcgctgaccaatatcatccttgatccgattttcatttttgtgtttaagatgggcgtcgcgggcgcggcatgggctacgattatatcgcagtttgtgtcgttcgtttttgttatgggatatttttcctcaagatggacaaggctgcgcttccgtgtcaaacacatgaagttaaacgctaaaataagcgggcgctatccttgccatgggttttgccccgtntattatgcagttcgcgttcagcctngtcggtattttgcagaatgccgtaattattaa

SEQ ID NO: 72062 - protein, 276 aa, Unknown
  Obtained from environmental sample
  DOMAIN (33)...(195): MatE
  misc_feature (1)..(276): Xaa is any amino acid
MGVGNFTLIESISATDRIGKEPIGRLLLNFSIPAIIGMLVNAIYNIVDRIYIGQGVDALGIAGVGLVMPVMMIIQSVSMLVGIGANSLFSIRLGQGRSDEVEKIMGNAFTLLFLLPGICITVCFIFMDPILRGIMKAEGEIYKYADSYLRVILYGAIFAAMSPGLTHFIRSDGHPKTSMLVQIVGALTNIILDPIFIFVFKMGVAGAAWATIISQFVSFVFVMGYFSSRWTRLRFRVKHMKLNAKISGRYPCHGFCPVYYAVRVQPXRYFAECRNY

SEQ ID NO: 72063 - DNA, 1698 bp, Unknown
  Obtained from environmental sample
  misc_feature (1)..(1698): n is a, c, g, or t
atggaccaaattttaattttagattttggaagccagaccactcaattaatcggacggcgcatccgcgatctcggcgtatacacggaaattattcccggcgatacgccgcttgaacttcaaccgagtctgaccactgacaagtggtcaggcgaaggttcccctcttgtgtcagctattacaaaaaatgttaaaggaataattttatccggctctcccgaatccgtttacgacaagggagccgcccccgataaaaaagtctacgactgcggtcttcccctgcttggaatttgttacggcctgcacaggatgacgcacgacctcggcggcaaagttgagcctttgccggagaaggaatacgggagaattgaagttaagataagggaagagggaaaaaagcagagagcaatgagcaatgagcaaagggaagagggaatagagcagggaacaggggggaatgttgtttcagggtttttgaaggggtttaaggatacgtttacggcttggatgagtcatggggatactttgactcagcttgcgcccggttttaaggaatacggttccagcgcgacaggttatccggctgttgtggcgcatgaggagaagccgtggttcgggcttcagtttcatcccgaggttacacattgcgaaggcggggacgatatgcttggggcgtttgtgtttaacgtttgcgggtgcggcaaagggtggagcatggagcgttatattgaagaattgaataagacgcttaaggaacgcgcgggagagaatcctgttttgcttttgatttcgggcggcgttgactctactgtcgcgggagcggcgctgttaaaaactttgaagagcgaacaggtgcatttgatgtatatggataccgggcttatgcggaagaatgagacggcggctgtccgcgctaatctggaaaaacttggggcgaaaaatttgcacataattatgtgcgaggaagaattcttgaccgcgcttaaaggcaaagcggagccggaagaaaagcgcaggataatcggcgatttgtttatcacgatacaggagagggcagtcgcccgcttgaaattgccggaaagttatttattagcgcagggaacgctgtacaccgatttaattgagagcggcaagggcgtgggcaagaaagcccatgtgataaaaagccaccacaatgtcgcaagcccgcttgtggacgcgaagcgcgaagcgggaaaaattatcgagccgctggatcgtttgtacaaagacgaagtgcgcaaactggggcgcattatcggcgttgacgaagaaattgtaaggcgccatccgtttccggggccgggtcttgccgtgcgcatacttggggaagtaacaagagataagtgcgacattctgcgcgaagcggacgctatttatatagaagaactaaaaacccgccgcggtccgtccgggaaaagcctgtacgacgaaatctggcaggcattcgctatccttctgccgatccgctccgtcggcgtggcgggcgacgttcgcaaatacggctgggttctcgcgttacgcgccatcacaagctccgacggcatgaccgcggacgtctacccgttcgaaacccgcgatcttctggaaatatcgacgcgcataaccaactcggtaaaggagattggacgcgtaacctacgacatttccagcaagcccccggctacgattgagtgggagtag

SEQ ID NO: 72064 - protein, 565 aa, Unknown
  Obtained from environmental sample
  DOMAIN (241)...(475): NAD synthase
  misc_feature (1)..(565): Xaa is any amino acid
MDQILILDFGSQTTQLIGRRIRDLGVYTEIIPGDTPLELQPSLTTDKWSGEGSPLVSAITKNVKGIILSGSPESVYDKGAAPDKKVYDCGLPLLGICYGLHRMTHDLGGKVEPLPEKEYGRIEVKIREEGKKQRAMSNEQREEGIEQGTGGNVVSGFLKGFKDTFTAWMSHGDTLTQLAPGFKEYGSSATGYPAVVAHEEKPWFGLQFHPEVTHCEGGDDMLGAFVFNVCGCGKGWSMERYIEELNKTLKERAGENPVLLLISGGVDSTVAGAALLKTLKSEQVHLMYMDTGLMRKNETAAVRANLEKLGAKNLHIIMCEEEFLTALKGKAEPEEKRRIIGDLFITIQERAVARLKLPESYLLAQGTLYTDLIESGKGVGKKAHVIKSHHNVASPLVDAKREAGKIIEPLDRLYKDEVRKLGRIIGVDEEIVRRHPFPGPGLAVRILGEVTRDKCDILREADAIYIEELKTRRGPSGKSLYDEIWQAFAILLPIRSVGVAGDVRKYGWVLALRAITSSDGMTADVYPFETRDLLEISTRITNSVKEIGRVTYDISSKPPATIEWE

SEQ ID NO: 72065 - DNA, 1227 bp, Unknown
  Obtained from environmental sample
  misc_feature (1)..(1227): n is a, c, g, or t
atgaaagtcgtagttatcggcgcccaatggggcgatgagggaaaaggaaaaatcgttgactatctggcgaacgaagcgcagataatcgtccgctacgccggcggggcaaacgccgggcacacaattgtcacgggcggcgagcaatacgccctgcacttgataccatcaggagttctttatcccgagaaaatttcaatcatgggcgccgccatggttatcgatcccaaggcgttattcgacgagattaaaatgctggaagaccgcggcatagacacaaagggcaggctttttatttcggaccgcgcccatatcgttcttcccaaatacattcagatagacaaagagcgcgacgccgcgcggaaaaaacctataggcactaccggccgcggcatagggatcacatattcaatgaagagcgaaagggacagcatccgtattgccgaccttaactggaaagaaaaaatggacgagcttgacaaagccgaccgtgattttctcgcgccttacattgacaggcttcttgaaatgtcggtcgatttaagcacataccttaatcaccgaaaaaattcgcaggtgctttttgaaggcgctcagggaactcttctcgatcttgatctgggaacttatccatacgtgtccagcggaatgtcatgcgctgccggcgcggcggttggcggctgtataggaccgcgctccatcgacaaagtgctcggcgttttcaaagcctattccacccgcgtcggaaacggtcccctcccctcggaatttgatcccgcgtccgaagacgaactttgccgctttgtccgcgagacaggccgcgagtacggcgtaacaaccggaaggccgcgccgctgcggctacctcgaccttgtttccctgcgctacgcctgtcttaccaactcgattgacagccttgttatgacccacctcgacgtatacgacacttttgaggaaatcaaagcgtgcatcgcctaccgcataggcgataaaatcgtggaaaactttcccgcctctattgaagaccttaattcggcgaaacccgttctgcggtctttccccggctggaaaaaatctcttgcgagcatgcaaacctacgagaaactccccatcgcagcggtggaatatataaactttattgaacatttctgcgaaaccccggttgatattgtttctgtcggctacgaccgcaaagccacgataatacgcaaaagcccctgggtacgttaa

SEQ ID NO: 72066 - protein, 408 aa, Unknown
  Obtained from environmental sample
  DOMAIN (2)...(401): Adenylosuccinate synthetase
  misc_feature (1)..(408): Xaa is any amino acid
MKVVVIGAQWGDEGKGKIVDYLANEAQIIVRYAGGANAGHTIVTGGEQYALHLIPSGVLYPEKISIMGAAMVIDPKALFDEIKMLEDRGIDTKGRLFISDRAHIVLPKYIQIDKERDAARKKPIGTTGRGIGITYSMKSERDSIRIADLNWKEKMDELDKADRDFLAPYIDRLLEMSVDLSTYLNHRKNSQVLFEGAQGTLLDLDLGTYPYVSSGMSCAAGAAVGGCIGPRSIDKVLGVFKAYSTRVGNGPLPSEFDPASEDELCRFVRETGREYGVTTGRPRRCGYLDLVSLRYACLTNSIDSLVMTHLDVYDTFEEIKACIAYRIGDKIVENFPASIEDLNSAKPVLRSFPGWKKSLASMQTYEKLPIAAVEYINFIEHFCETPVDIVSVGYDRKATIIRKSPWVR

SEQ ID NO: 72067 - DNA, 903 bp, Unknown
  Obtained from environmental sample
  misc_feature (1)..(903): n is a, c, g, or t
gtggatttttcgctgtatccggcggtcggcggcgagaccggctacgaggttcccaatccgatgacctactactcgcccggttggaagcggaaacgggagacgacggacgcgtattgggagagaaagacgcgcggactgatgatgttcgtaaaagacgccgtggaggcggccgctaagggcggcgattcgcctttcaggggtttgtatagggacggtgaggggaggctacgcgaaacggcctcaggccgcaaggcggcgattctcatactccacgccggcgcctcctacatgacggacggcgggttggacggcggcgccgccgccgactctccgtcggatatgatcgacgcgtttatcaatcgcgaatacttcaagtactacaaagacacgctcaaacttgacagcgcgggaattaaagtcaccggcgccgaaggtaaggatttgacgatagacgaggttatgatgtgcgcggagacctcgaatcaggacgggctcaactggggtatacagggtattctcgtcaaccaattggcgagacagctgggtattccggacttgttttctacatcgagcggcgtatcggccataggcgcattttgcataatggacttcgcggggtactcggcggggcaggggtttataccgccgtatccgagcgcttgggtgcgggcctttatggggtgggacaagccgtacgttgcaggcgccggcgagaaatacggcgttagggcattaacgtccgtcattgataaggataatgaggatgagactgggcggacgattgggaacgatactacgatactgctgataccgctgaacaacagcgaatactaccttgttgaaaccggcagaggaatttgtcgggagataaatcggtttttaagtatgacgagggatcgataa

SEQ ID NO: 72068 - protein, 300 aa, Unknown
  Obtained from environmental sample
  misc_feature (1)..(300): Xaa is any amino acid
MDFSLYPAVGGETGYEVPNPMTYYSPGWKRKRETTDAYWERKTRGLMMFVKDAVEAAAKGGDSPFRGLYRDGEGRLRETASGRKAAILILHAGASYMTDGGLDGGAAADSPSDMIDAFINREYFKYYKDTLKLDSAGIKVTGAEGKDLTIDEVMMCAETSNQDGLNWGIQGILVNQLARQLGIPDLFSTSSGVSAIGAFCIMDFAGYSAGQGFIPPYPSAWVRAFMGWDKPYVAGAGEKYGVRALTSVIDKDNEDETGRTIGNDTTILLIPLNNSEYYLVETGRGICREINRFLSMTRDR

SEQ ID NO: 72069 - DNA, 3321 bp, Unknown
  Obtained from environmental sample
  misc_feature (1)..(3321): n is a, c, g, or t
gtgaataaaacgaaagcaattatcgtcctattaatagctattctaataggcgtaagcaccaacaacgtccacgccgcgaaaaagcacaacgcctacagccaaaaacactacaccaccgagtccgcgcacttccgcatccactatcaccgcggcctcgaccatctcgttccacgcgtggccaacaagcttgagcagctgcgccaaatttacgccgagacctaccacatctctctgcccggcaagaccgacgtcgtcctctacgagagcgagattcccgacgctttcgcctactcaaatttcaatttcctatacgttggcatccacgactacgagtttaacttgcgcggcagttcggactggtttgacgacgtgctggcgcacgagtacgcccacgttgtttcgatatggacgggattgaagtttccgcccgtcatatcggaaatccaagtaggctacttcacgcatcccaactcaacgtcgcgttttgaggggctccacgttttcccgtcggagaatatgccgatatggtttttggaaggtatagcgcaatatgagagcagccgccgcggggcggacagctgggactcgcaccgcgacatgatactgcgtacgctgacgcttagcgataaattgctctcgtggccgcacatgcaggtatttgccggtaagggggacgattttgagaagagctacaaccacggtttttcgctcatcgcctacattgccgatacctacggttatgaaaaaatcgtgtctatactgcgtgagaacgcgcgcgtgggcaggctctcctttgacggatccgtcaaagcggtcttggggatatcggcgaaacagctttacagcgattggcaggagcagcttaagcgtagatacaacgcgcagatcaaggctgtggggagtcaagtctacggacggaagataaataaagacgggtttgacaacagctatcccaaattctcgccggacgggaagaagatttactttttatcaaacgatgagaacgattactctttcctagacctatattcgtacaacctctccgatacggttgaagagaaggaaaaaatacgctatgagatgccggtaagcagcgtctacgatatccacaacgcttccggaagaatcgcctttgtgtcgatgcgtgggcggaaatcgtttcaggagactaggttgggcgggcagaggacgtttgatttgtttgttgacgagctgccgccggataaaccgaaatttttcggaaagaagacggagaagcaggtgacgacgggtaagagcgtttttgccgcggcgttctcgcctaagggcgatcagcttgtttgcgccgtgcgaaagtttgaccgtttctttctcgtgataacggatacgtcgggctcggacgtgcgcgtcgtgtacccgagcgtagatatcgcgagtgagttgtttagagcggttgagttgcctaagagctcggatacggcgggtttcagcacgatattctcgcttgcctggtcgcctaacggcaaggatattgccgttgattacatagacggcgataggagaaagatcggtatctacgacacgctgcaacgaagtttctccgtattcggcgacggtttggagtacgatagacgcaacccgtcatttaacaaggacggctctacgctctactttttctccgacgaaacgggaatattcaatgtgtaccggtatacgtttaagtccggaaggttggagcggttgaccaacgtctccggcggcgcttttcatccggcggtctccgaggacggtaaaaaacttacctataccggctatgacagaaacgggtacggcatctacctaatcgatacactgaaggcgttgcggacgtccacggtcgccgtcgccgacgcgataaccgagcgggcggggaaggaaccgcggcactactcaacgccgctatcaaatagagttccatattcgcgaatgcctcggcaactgctgattgtcccgacgcttctcgcggagcagcttgtgaccgccaacgacgacgaaaataagggcgttacgcacgttaaaggcggcgtggtggcaaacttcttggatccgcttgcatggagcgacgtggggaacgaattcggcgcgtacctattggttgacttgaagagaatttttgaattcatagattttgacaaaggcctcatcagcccgcgcgccggctacgacgccggcgttttcggcacgtcgaaggctctgccggtaactatggagggcgaggtgatggtgcgcggtatcgccggagaggattggttctacgaggagtctgaagatactacgatggtgctgccctataggattcagttgacaaacgcgatgcttggcgcgtcgcaccccattgtcgacggactctacggacgtctcttcctgggccttgaccgctacgacgtcgcccttgacttggcggaagcgtacaatgagggcgtctttacctacaatttgagcaagggttatagggccggagcgatggcgtggttcagcgctcgcggcagaaactctcgctccaatatctcacccaccggtatcgccggaaagttgcagtacaacctttggcggcagtactcgctcaaagaggagaacagcttcacggtggagtcgaatatgcttaaggagtcgtatgacgattacctcttccatttggtgggcggacgcctaatgctcggcatgaattcgccgatttattcgaagcacgatctgcattttgatattgctagttcgtttttgcagacggtgggcggcggcgacataccgtcattttacctcccatcagcgcaagttcccgggtatacatatttttacaaagacaagagggcgaaagtggagttcggcgataccacgtgggtgaggtacgatacggtgcttgttaccggaaaagcggtcttgtcgggtcagttttcgtatagattccctctgtggccggggtctatagataaaaagcttggctttttgtacttcgatatgctatacggcgctctgaatttctccgccggagcgggttttgacgatcccggaaagatatgggattggaatagaaaggattggctcttctcctacggcgcggaagcgcgtttggaggcgctgtcattcaataattatccgttaagcgtaagcttcaggtgggactacggcgcggataaggcggtcaaagaaacgtttgttgacaatagggaagtaacgcttggcggccacagattcgcgttctttataggttttgactttgacggttgggggatgataccggtaaccgattacttcagcccgtcgaggatgagggctgcgccgacgttgagactggggggacagtga

SEQ ID NO: 72070 - protein, 1106 aa, Unknown
  Obtained from environmental sample
  SIGNAL (1)...(25)
  DOMAIN (305)...(344): WD40-like Beta Propeller Repeat
  misc_feature (1)..(1106): Xaa is any amino acid
MNKTKAIIVLLIAILIGVSTNNVHAAKKHNAYSQKHYTTESAHFRIHYHRGLDHLVPRVANKLEQLRQIYAETYHISLPGKTDVVLYESEIPDAFAYSNFNFLYVGIHDYEFNLRGSSDWFDDVLAHEYAHVVSIWTGLKFPPVISEIQVGYFTHPNSTSRFEGLHVFPSENMPIWFLEGIAQYESSRRGADSWDSHRDMILRTLTLSDKLLSWPHMQVFAGKGDDFEKSYNHGFSLIAYIADTYGYEKIVSILRENARVGRLSFDGSVKAVLGISAKQLYSDWQEQLKRRYNAQIKAVGSQVYGRKINKDGFDNSYPKFSPDGKKIYFLSNDENDYSFLDLYSYNLSDTVEEKEKIRYEMPVSSVYDIHNASGRIAFVSMRGRKSFQETRLGGQRTFDLFVDELPPDKPKFFGKKTEKQVTTGKSVFAAAFSPKGDQLVCAVRKFDRFFLVITDTSGSDVRVVYPSVDIASELFRAVELPKSSDTAGFSTIFSLAWSPNGKDIAVDYIDGDRRKIGIYDTLQRSFSVFGDGLEYDRRNPSFNKDGSTLYFFSDETGIFNVYRYTFKSGRLERLTNVSGGAFHPAVSEDGKKLTYTGYDRNGYGIYLIDTLKALRTSTVAVADAITERAGKEPRHYSTPLSNRVPYSRMPRQLLIVPTLLAEQLVTANDDENKGVTHVKGGVVANFLDPLAWSDVGNEFGAYLLVDLKRIFEFIDFDKGLISPRAGYDAGVFGTSKALPVTMEGEVMVRGIAGEDWFYEESEDTTMVLPYRIQLTNAMLGASHPIVDGLYGRLFLGLDRYDVALDLAEAYNEGVFTYNLSKGYRAGAMAWFSARGRNSRSNISPTGIAGKLQYNLWRQYSLKEENSFTVESNMLKESYDDYLFHLVGGRLMLGMNSPIYSKHDLHFDIASSFLQTVGGGDIPSFYLPSAQVPGYTYFYKDKRAKVEFGDTTWVRYDTVLVTGKAVLSGQFSYRFPLWPGSIDKKLGFLYFDMLYGALNFSAGAGFDDPGKIWDWNRKDWLFSYGAEARLEALSFNNYPLSVSFRWDYGADKAVKETFVDNREVTLGGHRFAFFIGFDFDGWGMIPVTDYFSPSRMRAAPTLRLGGQ

SEQ ID NO: 72071 - DNA, 609 bp, Unknown
  Obtained from environmental sample
  misc_feature (1)..(609): n is a, c, g, or t
gtgtgcttgggaaaagaacagaatttaatagcgctgcatggacacgaaagtaaaggattaaatatggtagaagaactttcaaaacaagaaattgaccagcttataaccgtgataaatgccacgcctgctgtcatggaaacaaaacgctctaacaaattttccgcagaacagctgcaggctgtttcatacatacacgatgtctttgcaaatttaacaacttgcaatctttccgcctatatgcggagcatgtgtcaagtttatgtttcatcggttgatgaatttacctacgaagaatatctccgcatagcgttgtttgcgccatcaactttggcggttgtaaatatgaacccgttaaaagggagcgcaattcttggaattaatccggaaataaaatttgcgattattgacaggctttgcggcggaagcggagacggaacaaaattccggaataaattaaccaagattgaaacatctataatgaataacgttatcgtccatatgttaggtaatctgcgtgaagcatggagtcaggtattagacatacatcctagagtggaaacgattgatactgatctcatttccttccatactatttcccctaatgaatag

SEQ ID NO: 72072 - protein, 202 aa, Unknown
  Obtained from environmental sample
  DOMAIN (45)...(202): Flagellar motor switch protein FliM
  misc_feature (1)..(202): Xaa is any amino acid
MCLGKEQNLIALHGHESKGLNMVEELSKQEIDQLITVINATPAVMETKRSNKFSAEQLQAVSYIHDVFANLTTCNLSAYMRSMCQVYVSSVDEFTYEEYLRIALFAPSTLAVVNMNPLKGSAILGINPEIKFAIIDRLCGGSGDGTKFRNKLTKIETSIMNNVIVHMLGNLREAWSQVLDIHPRVETIDTDLISFHTISPNE

SEQ ID NO: 72073 - DNA, 795 bp, Unknown
  Obtained from environmental sample
  misc_feature (1)..(795): n is a, c, g, or t
atggaaataaaagacgatttcagtctattaagaaaaatcccgaatgttctgcgagcgaggggcttccgtctttatttatccaacggcaaacgtttagtcgatctttggctaaacggcggggcggcagtcttgggtcacactccgccgaacattttacgtgaactaaaaaacaccgcaagccgcggcttatattcgcccctcccccacttcaccgaatcccgttacctaaaagccctatccaaaattttcccaaacaaagtctttcgcctctacgccgccccgccgcaagagttatccgtacttttcaacaacggaaacgccaaactttggcgacctttcaccaaccctgcgtctccattcgctgtaacagaaaactctcctatccttatccccgtactccccggcattcaactctggcgcggcggtctgccgcttggcttgtgcgtagcagccgctgaatctgaaaaccaacttgcaaatctgccgcagagcgacattctcccccccgtactgcttgcaacggcggcgcgcggaatccacgacctgctcgccgcgccgaatagagcagcccctaaattacagcgcgtcgaaaaagttttaaaaaataaccgctggcagcggcgcggcatttatcttgaattgagagaaaaagcggaaacagaaaactggtctgctctatttcaaaaatttttggaagcgggatttttattgccgcccgccccgtcctttccgcttatccttcccggcgaactatctgacggggaagaagcgaaacttgcggctgtgttgggttga

SEQ ID NO: 72074 - protein, 264 aa, Unknown
  Obtained from environmental sample
  misc_feature (1)..(264): Xaa is any amino acid
MEIKDDFSLLRKIPNVLRARGFRLYLSNGKRLVDLWLNGGAAVLGHTPPNILRELKNTASRGLYSPLPHFTESRYLKALSKIFPNKVFRLYAAPPQELSVLFNNGNAKLWRPFTNPASPFAVTENSPILIPVLPGIQLWRGGLPLGLCVAAAESENQLANLPQSDILPPVLLATAARGIHDLLAAPNRAAPKLQRVEKVLKNNRWQRRGIYLELREKAETENWSALFQKFLEAGFLLPPAPSFPLILPGELSDGEEAKLAAVLG

SEQ ID NO: 72075 - DNA, 2358 bp, Unknown
  Obtained from environmental sample
  misc_feature (1)..(2358): n is a, c, g, or t
atgcgcgaagccgactatcctccctatcttgccccgctcaacgacgaacaacgccgcgccgttctgcatacggggaagcctctgctgatactggcgggcgcgggttcgggcaaaacaagggttatcaccacaaagatagcgtggttaatcagggaacagggaatggacccgcgttcaattttggcggtgacatttacaaacaaagcggcaagagaaatggcggaacgagcaaggcagattgaccagcgcgcgggggacgcaatgctgcggacttttcactcctttggcgcgtggttcttgcggcgcaacggaagtcttatcggtcttgattcggggtttaccatttacgacgacgatgatgtcgtatcgcttctttcctctgttttggaaaacattcccaaacccgatggaaaacattacgcgcacaacatttccagagcgaaagattattttctctcccccgacgatcccgaacttgcgattatcgatcacaacaaaaaattccgcgacatttacaagcgatacgaagagcgtatggcgcagattggcaatgtcgatttcggcgacttgataaaaaaacctgtggagattttacgcagtcagccggaagtggcgcggcgttttcatgagcgctttcaggtaatcatggtggacgagtatcaggacgcaaacgtggcgcagttcagactgttaaaagaattgtgcggtcccgatacctacgtttgcgtggtcggcgacgatgaccagtccatttaccgttttcgaggcgcggaagtaaaaaatattcttgagtttcccgatcgtttttcaggcgcggacattatccgccttgagcaaaattaccgctcgacatcttctattttgaaagttgcgtcttctgttgtcgattacaaccgcggacgcttaggaaaaactctccgcgccgaaaaaggagacggacctgcgcccgcgcttgtctatcttcacgaccaaaacgaggaagcgtctttttgcgccgataaaatcaccgcttccgtaaaaaagaaagaaacagcgtggtcggattgggctatcctttaccgcaccaatgcgcaatcggcagggtttgaaactgtttttatgcgcaagagtatcccctatcgagttgtcggttctttaagattttatgaacgtgaagaaataaaagactctctcgctcttttggctttccttgtaaatccccgtgatgaagtcgctttccgccgtgttgtaaacaaacccacaagaggcgtaggagcggcgacagtcgataagctaacggaagcttgcgccgaacacaacggcgacttgcttgagacaagccgcgcgatggactgttccgcaaaagcgcgtaaaggtttgaatgagtttatcaaagtaattgaagaggcaaaaaatttattgtctcattctgtacacacatacgaagaagacgaagacagcgaacttgtatcgggcgataatctttcgcttctggttacaaaaataattaacgattcaggtattgccgagtatcataaaacgcaagatgaaatagcgggcatttcaaaaacaggcaacttgctggagcttgtaaacgccgccggtgaatatcaaaacacccgtgaaggactgctcgaatttttggaagacatcgaacttgaccgttcaatggaagacaacgcaaacgcaaataaatccggcgacttgcaaaacgccgtaacgcttattacttttcacaacaccaaaggtttggaattcaaacgtgtaataatgacagggcttgaacagggtatctttccaagagaagacaaaaaagacgatgaacttgaagaagagcgcaggcttttttatgtgggagccacccgcgccatggacgaactatatttgacaacctgcgccgagcggcgaatgtacggaagaaccgcacctgcgcagccatcgctgtttttgcgcgagatagacagaagctgtctgcaaataaaagaacttccgccgacgcaaggcactgcgccgcaatacgcaggcaaaagatcattcatcgggagaaattttaatccgcttaatccgcaaaacctgcgtgcaagcagtaccggcaggggaacaagtatcggcgcaagcagcggcgcaaaaagcaaagcaaatgcagaacttgaacctcaaccgagcctgaagggcgaaggttcccctcttgaagaacgagcaggctggcgaataggacagcgtttgtttcacgaggatcacggttacggcgcagttgtgggaataaaggacagcgaggacggacccgtcgttcatgttcgttttgattcagggttggacaagagatttttaagcgacattcagggcagagcttatgaaaaagtaggagaggaatattaa

SEQ ID NO: 72076 - protein, 785 aa, Unknown
  Obtained from environmental sample
  DOMAIN (13)...(482): UvrD/REP helicase
  misc_feature (1)..(785): Xaa is any amino acid
MREADYPPYLAPLNDEQRRAVLHTGKPLLILAGAGSGKTRVITTKIAWLIREQGMDPRSILAVTFTNKAAREMAERARQIDQRAGDAMLRTFHSFGAWFLRRNGSLIGLDSGFTIYDDDDVVSLLSSVLENIPKPDGKHYAHNISRAKDYFLSPDDPELAIIDHNKKFRDIYKRYEERMAQIGNVDFGDLIKKPVEILRSQPEVARRFHERFQVIMVDEYQDANVAQFRLLKELCGPDTYVCVVGDDDQSIYRFRGAEVKNILEFPDRFSGADIIRLEQNYRSTSSILKVASSVVDYNRGRLGKTLRAEKGDGPAPALVYLHDQNEEASFCADKITASVKKKETAWSDWAILYRTNAQSAGFETVFMRKSIPYRVVGSLRFYEREEIKDSLALLAFLVNPRDEVAFRRVVNKPTRGVGAATVDKLTEACAEHNGDLLETSRAMDCSAKARKGLNEFIKVIEEAKNLLSHSVHTYEEDEDSELVSGDNLSLLVTKIINDSGIAEYHKTQDEIAGISKTGNLLELVNAAGEYQNTREGLLEFLEDIELDRSMEDNANANKSGDLQNAVTLITFHNTKGLEFKRVIMTGLEQGIFPREDKKDDELEEERRLFYVGATRAMDELYLTTCAERRMYGRTAPAQPSLFLREIDRSCLQIKELPPTQGTAPQYAGKRSFIGRNFNPLNPQNLRASSTGRGTSIGASSGAKSKANAELEPQPSLKGEGSPLEERAGWRIGQRLFHEDHGYGAVVGIKDSEDGPVVHVRFDSGLDKRFLSDIQGRAYEKVGEEY

SEQ ID NO: 72077 - DNA, 5934 bp, Unknown
  Obtained from environmental sample
  misc_feature (1)..(5934): n is a, c, g, or t
ttggtcgggagcgatgtttcggctaccatcaagatctacgggcgcaacggtaaagtaacggtaagctccaagggcgtaaacgttcttaggaacccgactaactcgacggacataacgaatacggcgatttacgtcgtgggcgcgaagcttgagcagacggccacgtcgggaagcggcacggcgggcgcagtggtggtctcggcggggggcgaggtctctaacgcgaatataacgttgaagaacacggacgtggtcggcgcgaccgctacggcggccctgatcggccaggtcgccagcgctacggggcagatctacatcgagggcggcgcctacgcgtccgccaccggtacgacgggcaacgctctgcaggctgtcggttctattacgatcaaaggtacgaaaatctcggcgagcgcgtcaagcagcaatccgggcggctacgtcgttaagtccgatacgggcacggtgaaggtgctcggcggccccgccgggaaagattcggcgatcgtcgtgtggacgggaagcgccactgtcggcggagtcaaagccccccgcatcgtggtgaaggctgacaacgcccgcaaagccgaggttcgcttgcagggcggcgcgggccgggccgtctatgtgacgacggtcggaatgaacacggctcaggggaatctttcccgcgtgccgactacgaacgaagaagatctcgcgggcgtggtgctgtctgtgataggcagctccaacggttccgcgttcgtcagggccgcgacgggcaaggcggtcgtggttgagaatcttgtttatatcgaaggaagctccgaccctgtggcggccagcctcgcgcaggtcaggctgcaggacgcggttatcacgaggtccggcacgccggctgtgggtcaggacaacttggttgacataaccggcgcgaacgtgcacgtgggcgggacgaacctgaatctgtccctcataagcgtgaacggcggtctcgttcccacaaccgcgacgctgggcattgggctcttcgccaccgccaacaaagtgctcgaaacaggcgagcctagcgtcggcggcaacgtgtgggtgtacggcggcagcataatcggcggcaacggcgcgatcgacgcgttgcaggtcaccgttcagaacgtcgtcacgacggttcccacgagcattcagtcggccagcggcgtgacgatcaaatcgaagggcgccgttttggttgacaacccgaataccaaggtgataaacgtgagcggggccttgaacaactccgttatttacagcacgaacgcgggcatcacggtcgccaacgtcgactcggtgtgggcgaagacgttcgcgacggctctgctggctacgaccgacaagcagaagatcaaggtcggcgccggcgtgatccgctcggccaacggtccggcgatagtcgcccgcggcgacgtggagctcgactcgcagtatgtggccagcggcaactgggttacgacctggcctctggtgacgaacgacaagggcgagcagaaggtcatagcgcacagggacgttttggtctcctccggctcgaccaacgccgccgcgacgtacaacagcgccattaccgtcgagggcaagaacgacgtgacggtcaagatagccaaggttgaggcgaccggagtcaccggttacgcgtcggccatcaagaactctgacggcgacgtctacatcgtcggcgacctgaaccgcactcttacgtcggtagtgtccgcgtcgggttccgcgatagtcgtcagcaagggcgaagtcgtggttaccggcggcgaggttaaggccgaaggccgcctcgctccgcaggccaacgctttcgtcgccgcgattcacgtgacggacggcggcgtgaacgtcggcgagacgtatacggctccctctgtggacaataacggcagaaccagaagcgtcctgacctctgacggctacgcgatggcgatctacgcgacaggcgccgccggcacggacgtgcacgtcggcacgtacgcggtgataaacgtcaagggcaccaacgcgaactacggcggaatcaagacgacgcacaacatcggcgttatctacgccgcccagctgaccgtgagcacggcgctgtccaagtctttcgcgatcgacgcgctcaacggcgacgtcacgatcaatgagggcgagtacggcacatacatatattctaaggaaggcaacgcggtcacgaccgccggcggcaacatctacatctacggcggcgagataaccggcgacaagggtatcttgatttactccaagaagaacgccatcaccggccgcgccggagacgtgaaggtgtacgggacggccacgtacgagggcaagaaggggatttacaataagaacggcaccgcgatccgcggcgacgactccgtgtacgtatacggcggcaccgaatattccgtttggatccacaccgacacggacacggccatagcgaccggtacggcgacggccgccggattggtctggctcgaggacggtatagtgcaggcgagcggccagcacggcaagtccaagcccgtcgcagtcgcttcgagaaacgttgaggtgcacggcaacgcgatagtgctggccaacgagccgcgctcttccaccgataacaacgagcgttacatcgacgcgaacgccaccggcatcctcatcaaaaccggcggcggcaagggcaggctctatatcaacaccggtacggacagcgccagggtcgaagcctacggcgccgacaccgccatcgtcaacagagatcccgacgtgacggttgaaatcggaaagcgcagcattgaaggcacggagatcaaggctgacggccacggcaaggtaatcgccggcaacaacggcgtcgccatcaagtcctggggccccatcaccctcagcggcgaggagatcccctccgaagatcagcgcgaagactctacgtactccgtttgggtcaaggccggcaacggtccgaaagcctgcgctatcctgatgcccgttcttaccggcgtcaagaagaaagacatgaacatattcaacacgttcgttgaggcgggttccgacggcgcgttcggtatcaactgcgataccaacacgacggtcgaggttctgcacagcgtggtcttggtacgtcacggcagcaccggcatcaaggccagcggcggcgtgcgcgtcaggggcggctatgttgaagttctcgccacaaacgacaactggacgggcacggcgataacgggccgcgagatccgcatcgacggccgcgacgaggacgtcgatgaggacatcaagagcgaagtccactcgaaagacgtcgcggtgtacgacggtaaggaaggcgccgtcgtcgaagttacgggtatcgtgcacatcagcggcgaggtcaagacgcacatgaacatcggttccagcgttctgggcaggaaggccacgctctccatcggttccgagtcgagcatcggcaagtcccgcgatctgtggaagctcaacactttctcagaagtcacggagaaccttgtcgaggtcggcaagaccctgttcgtgcccgccggcgtccgcgtcagcgtagccgacaacggcagcaggcttgaagccggcgtgtccgacacggttaagatcgaaggcaccgtcacgacggtcggccagcaggccgccgccgagttcatcagcaacggcaaggtcataatcaaggacggcggcaacgtcaagttcaacgccgccaacccgaactcgttcaagaacgacgccgaaggcaaggtcgtgctctccatcggctcgaaactgaacgacagcatcctcgttcacgacaccggcgcgttcatgcagcgcaagtacacgttcctcaagtgggccgacaccctcagcggcgtcgaaaacagcgaacgcgggcccggcaaggtcatcgtgccgcccctctacgccatcctctacgggaaccagagcgtgttcatcgaccaggacgaggaccgcgagacggtctccggttccgagagccgcgactactggagcgccgacgcgaaacgcaccgactcagtctacacttcgaagctcgtcaagttcccgcttgacaagcgctacaagagctacgttatcgacgtggacgacgaggacaagcccaaaggcgacctctccgtcaccggtcttgacatcatccgcgtagacaccgccgacggcctgaccacggcgctgttcaccgaggccggcacgttcacaaggcacgccgttctgacgaacgaagcgggcgagggctggaaagattacacccacactatcgcacgtgtgtcgctcaagcagatcaaagagtggcagatggacggcagcgcccagaacttcttcgacggctatctcaacaatatcgacgagcgcgtgcttgaccgcgccgacagcgtcgtgatcgtatgggacgacgtggtcgacgttaagtacaccggcagcaccgcgaagctcctcgacggcatcaagggcgcgaggttcaccgcgtcgcagtacgtgtacggcggcgacatcgacaatcccggcaagccgatctacttcaagggcctcggcgtgcaccagttctggtacaagggcgtggacggcacgtcctatcctctgacttcgacggtccccgtcaaggtcggaacgtacgaaatctgggcgtcgttcgcgctcggcatgaactttgaagccgtgcccgccgagcccgtctcgctggtctacatcggcaagatcaacgtcgtgcccggcgaccttacgtctgtgttcggcgttaaggacaacgagtacattatcaacgtccgcctggaaggcagaagggcttactccgaagtaacggtgacgctgcccggcctgctcaggtacggcgcgaagtacgacagcgataacctagaacccaacggctccagcaccggcgccgccggtctgggcggcaaccccgccgttctgaaagccgacagcgtcctgtcgttcaggatcgtcaagaacagcgtggacagcgccgactacaaccagttcatccagttcgacctcggcatcgtcaacaccgccgatcccggcaacttcgatgaggccgaaagcccgacaatcgtcgtccgcgtagacttcgtgacccccgacgagctcaagaaagccaagcccgtctacatcaacgtcgactacgtgaacgagagactcacaggtcttctcgccgacacgaggtacactatcaacggcgccgcgcagaaagacagcataacgtcgcttgatatctctgaatcctggataggcgaaacgatcaaagtcgtggccctccccggcgctctgaacagctacgactatccgagcgacaccgccaatatagcgatcggcatccgccccgcagttacggacgctctgagagccgtagtaggcgacagctcctccggcctcagagcccccgacggccgcctgaacggcaccacggttgcgatggagtacaaacacgccgactcggcccagtggaagcccgcgaccgccgttgtaacgaccggccttgtcgccggcacgtacaacgtccgcctggccgccaccaagacctccttcgccagcgcctctgtcgacgtggtggtcaacgcgaagaagggcgacgccatcctcgagtccgaccgcgaactcccgagcgtagttacgacggagcaagcggcgatcaagccggtcgcgaagctggcggccgcgttcaccgccggcccgagccccgtgtccaagaacgccggcaagatcgcgttcttctccacgaagccggtcaagagcggcgctctgtacatcttcgacgcgacaggcaagtcgctagccaaggtgaaagcctccggcagcggcgaaatcgccagctggaacctgaaagacaagagcggcagtgtggttgctgaaggctcttacgtcgtgaaaggctcgctgacgggcaaggacgggaagaaggacaaggtctcgttcgtgttcagcgtcgtgaagtaa

SEQ ID NO: 72078 - protein, 1977 aa, Unknown
  Obtained from environmental sample
  misc_feature (1)..(1977): Xaa is any amino acid
MVGSDVSATIKIYGRNGKVTVSSKGVNVLRNPTNSTDITNTAIYVVGAKLEQTATSGSGTAGAVVVSAGGEVSNANITLKNTDVVGATATAALIGQVASATGQIYIEGGAYASATGTTGNALQAVGSITIKGTKISASASSSNPGGYVVKSDTGTVKVLGGPAGKDSAIVVWTGSATVGGVKAPRIVVKADNARKAEVRLQGGAGRAVYVTTVGMNTAQGNLSRVPTTNEEDLAGVVLSVIGSSNGSAFVRAATGKAVVVENLVYIEGSSDPVAASLAQVRLQDAVITRSGTPAVGQDNLVDITGANVHVGGTNLNLSLISVNGGLVPTTATLGIGLFATANKVLETGEPSVGGNVWVYGGSIIGGNGAIDALQVTVQNVVTTVPTSIQSASGVTIKSKGAVLVDNPNTKVINVSGALNNSVIYSTNAGITVANVDSVWAKTFATALLATTDKQKIKVGAGVIRSANGPAIVARGDVELDSQYVASGNWVTTWPLVTNDKGEQKVIAHRDVLVSSGSTNAAATYNSAITVEGKNDVTVKIAKVEATGVTGYASAIKNSDGDVYIVGDLNRTLTSVVSASGSAIVVSKGEVVVTGGEVKAEGRLAPQANAFVAAIHVTDGGVNVGETYTAPSVDNNGRTRSVLTSDGYAMAIYATGAAGTDVHVGTYAVINVKGTNANYGGIKTTHNIGVIYAAQLTVSTALSKSFAIDALNGDVTINEGEYGTYIYSKEGNAVTTAGGNIYIYGGEITGDKGILIYSKKNAITGRAGDVKVYGTATYEGKKGIYNKNGTAIRGDDSVYVYGGTEYSVWIHTDTDTAIATGTATAAGLVWLEDGIVQASGQHGKSKPVAVASRNVEVHGNAIVLANEPRSSTDNNERYIDANATGILIKTGGGKGRLYINTGTDSARVEAYGADTAIVNRDPDVTVEIGKRSIEGTEIKADGHGKVIAGNNGVAIKSWGPITLSGEEIPSEDQREDSTYSVWVKAGNGPKACAILMPVLTGVKKKDMNIFNTFVEAGSDGAFGINCDTNTTVEVLHSVVLVRHGSTGIKASGGVRVRGGYVEVLATNDNWTGTAITGREIRIDGRDEDVDEDIKSEVHSKDVAVYDGKEGAVVEVTGIVHISGEVKTHMNIGSSVLGRKATLSIGSESSIGKSRDLWKLNTFSEVTENLVEVGKTLFVPAGVRVSVADNGSRLEAGVSDTVKIEGTVTTVGQQAAAEFISNGKVIIKDGGNVKFNAANPNSFKNDAEGKVVLSIGSKLNDSILVHDTGAFMQRKYTFLKWADTLSGVENSERGPGKVIVPPLYAILYGNQSVFIDQDEDRETVSGSESRDYWSADAKRTDSVYTSKLVKFPLDKRYKSYVIDVDDEDKPKGDLSVTGLDIIRVDTADGLTTALFTEAGTFTRHAVLTNEAGEGWKDYTHTIARVSLKQIKEWQMDGSAQNFFDGYLNNIDERVLDRADSVVIVWDDVVDVKYTGSTAKLLDGIKGARFTASQYVYGGDIDNPGKPIYFKGLGVHQFWYKGVDGTSYPLTSTVPVKVGTYEIWASFALGMNFEAVPAEPVSLVYIGKINVVPGDLTSVFGVKDNEYIINVRLEGRRAYSEVTVTLPGLLRYGAKYDSDNLEPNGSSTGAAGLGGNPAVLKADSVLSFRIVKNSVDSADYNQFIQFDLGIVNTADPGNFDEAESPTIVVRVDFVTPDELKKAKPVYINVDYVNERLTGLLADTRYTINGAAQKDSITSLDISESWIGETIKVVALPGALNSYDYPSDTANIAIGIRPAVTDALRAVVGDSSSGLRAPDGRLNGTTVAMEYKHADSAQWKPATAVVTTGLVAGTYNVRLAATKTSFASASVDVVVNAKKGDAILESDRELPSVVTTEQAAIKPVAKLAAAFTAGPSPVSKNAGKIAFFSTKPVKSGALYIFDATGKSLAKVKASGSGEIASWNLKDKSGSVVAEGSYVVKGSLTGKDGKKDKVSFVFSVVK

SEQ ID NO: 72079 - DNA, 2964 bp, Unknown
  Obtained from environmental sample
  misc_feature (1)..(2964): n is a, c, g, or t
gtgcgtcttgacctcgccgctgatgtgcacgatacccgtaacttcgacgacggcgccttccttaccgtcgtacaccgcgacgtctttcgagtggacttcgctcttgatgtcctcatcgacgtcctcgtcgcggccgtcgatgcggatctcgcggcccgttatcgccgtgcccgtccagttgtcgtttgtggcgagaacttcaacatagccgcccctgacgcgcacgccgccgctggccttgatgccggtgctgccgtgacgtaccaagaccacgctgtgcagaacctcgaccgtcgtgttggtatcgcagttgataccgaacgcgccgtcggaacccgcctcaacgaacgtgttgaatatgttcatgtctttcttcttgacgccggtaagaacgggcatcaggatagcgcaggctttcggaccgttgccggccttgacccaaacggagtacgtagagtcttcgcgctgatcttcggaggggatctcctcgccgctgagggtgatggggccccaggacttgatggcgacgccgttgttgccggcgattaccttgccgtggccgtcagccttgatctccgtgccttcaatgctgcgctttccgatttcaaccgtcacgtcgggatctctgttgacgatggcggtgtcggcgccgtaggcttcgaccctggcgctgtccgtaccggtgttgatatagagcctgcccttgccgccgccggttttgatgaggatgccggtggcgttcgcgtcgatgtaacgctcgttgttatcggtggaagagcgcggctcgttggccagcactatcgcgttgccgtgcacctcaacgtttctcgaagcgactgcgacgggcttggacttgccgtgctggccgctcgcctgcactataccgtcctcgagccagaccaatccggcggccgtcgccgtaccggtcgctatggccgtgtccgtgtcggtgtggatccaaacggaatattcggtgccgccgtatacgtacacggagtcgtcgccgcggatcgcggtgccgttcttattgtaaatccccttcttgccctcgtacgtggccgtcccgtacaccttcacgtctccggcgcggccggtgatggcgttcttcttggagtaaatcaagatacccttgtcgccggttatctcgccgccgtagatgtagatgttgccgccggcggtcgtgaccgcgttgccttccttagaatatatgtatgtgccgtactcgccctcattgatcgtgacgtcgccgttgagcgcgtcgatcgcgaaagacttggacagcgccgtgctcacggtcagctgggcggcgtagataacgccgatgttgtgcgtcgtcttgattccgccgtagttcgcgttggtgcccttgacgtttatcaccgcgtacgtgccgacgtgcacgtccgtgccggcggcgcctgtcgcgtagatcgccatcgcgtagccgtcagaggtcaggacgcttctggttctgccgttattgtccacagagggagccgtatacgtctcgccgacgttcacgccgccgtccgtcacgtgaatcgcggcgacgaaagcgttggcctgcggagcgaggcggccttcggccttaacctcgccgccggtaaccacgacttcgcccttgctgacgactatcgcggaacccgacgcggacactaccgacgtaagagtgcggttcaggtcgccgacgatgtagacgtcgccgtcagagttcttgatggccgacgcgtaaccggtgactccggtcgcctcaaccttggctatcttgaccgtcacgtcgttcttgccctcgacggtaatggcgctgttgtacgtcgcggcggcgttggtcgagccggaggagaccaaaacgtccctgtgcgctatgaccttctgctcgcccttgtcgttcgtcaccagaggccaggtcgtaacccagttgccgctggccacatactgcgagtcgagctccacgtcgccgcgggcgactatcgccggaccgttggccgagcggatcacgccggcgccgaccttgatcttctgcttgtcggtcgtagccagcagagccgtcgcgaacgtcttcgcccacaccgagtcgacgttggcgaccgtgatgcccgcgttcgtgctgtaaataacggagttgttcaaggccccgctcacgtttatcaccttggtattcgggttgtcaaccaaaacggcgcccttcgatttgatcgtcacgccgctggccgactgaatgctcgtgggaaccgtcgtgacgacgttctgaacggtgacctgcaacgcgtcgatcgcgccgttgccgccgattatgctgccgccgtacacccacacgttgccgccgacgctaggctcgcctgtttcgagcactttgttggcggtggcgaagagcccaatgcccagcgtcgcggttgtgggaacgagaccgccgttcacgcttatgagggacagattcaggttcgtcccgcccacgtgcacgttcgcgccggttatgtcaaccaagttgtcctgacccacagccggcgtgccggacctcgtgataaccgcgtcctgcagcctgacctgcgcgaggctggccgccacagggtcggagcttccttcgatataaacaagattctcaaccacgaccgccttgcccgtcgcggccctgacgaacgcggaaccgttggagctgcctatcacagacagcaccacgcccgcgagatcttcttcgttcgtagtcggcacgcgggaaagattcccctgagccgtgttcattccgaccgtcgtcacatagacggcccggcccgcgccgccctgcaagcgaacctcggctttgcgggcgttgtcagccttcaccacgatgcggggggctttgactccgccgacagtggcgcttcccgtccacacgacgatcgccgaatctttcccggcggggccgccgagcaccttcaccgtgcccgtatcggacttaacgacgtagccgcccggattgctgcttga

SEQ ID NO: 72080 - protein, 987 aa, Unknown
  Obtained from environmental sample
  misc_feature (1)..(987): Xaa is any amino acid
MRLDLAADVHDTRNFDDGAFLTVVHRDVFRVDFALDVLIDVLVAAVDADLAARYRRARPVVVCGENFNIAAPDAHAAAGLDAGAAVTYQDHAVQNLDRRVGIAVDTERAVGTRLNERVEYVHVFLLDAGKNGHQDSAGFRTVAGLDPNGVRRVFALIFGGDLLAAEGDGAPGLDGDAVVAGDYLAVAVSLDLRAFNAALSDFNRHVGISVDDGGVGAVGFDPGAVRTGVDIEPALAAAGFDEDAGGVRVDVTLVVIGGRARLVGQHYRVAVHLNVSRSDCDGLGLAVLAARLHYTVLEPDQSGGRRRTGRYGRVRVGVDPNGIFGAAVYVHGVVAADRGAVLIVNPLLALVRGRPVHLHVSGAAGDGVLLGVNQDTLVAGYLAAVDVDVAAGGRDRVAFLRIYVCAVLALIDRDVAVERVDRERLGQRRAHGQLGGVDNADVVRRLDSAVVRVGALDVYHRVRADVHVRAGGACRVDRHRVAVRGQDASGSAVIVHRGSRIRLADVHAAVRHVNRGDESVGLRSEAAFGLNLAAGNHDFALADDYRGTRRGHYRRKSAVQVADDVDVAVRVLDGRRVTGDSGRLNLGYLDRHVVLALDGNGAVVRRGGVGRAGGDQNVPVRYDLLLALVVRHQRPGRNPVAAGHILRVELHVAAGDYRRTVGRADHAGADLDLLLVGRSQQSRRERLRPHRVDVGDRDARVRAVNNGVVQGPAHVYHLGIRVVNQNGALRFDRHAAGRLNARGNRRDDVLNGDLQRVDRAVAADYAAAVHPHVAADARLACFEHFVGGGEEPNAQRRGCGNETAVHAYEGQIQVRPAHVHVRAGYVNQVVLTHSRRAGPRDNRVLQPDLREAGRHRVGASFDINKILNHDRLARRGPDERGTVGAAYHRQHHAREIFFVRSRHAGKIPLSRVHSDRRHIDGPARAALQANLGFAGVVSLHHDAGGFDSADSGASRPHDDRRIFPGGAAEHLHRARIGLNDVAARIAA

SEQ ID NO: 72081 - DNA, 1245 bp, Unknown
  Obtained from environmental sample
  misc_feature (1)..(1245): n is a, c, g, or t
ttgcttcgtcgcttcgctcctcgcaatgacggtcattgcgagcgtagcgaagcaatccagaaagttcgataccgtgcaatatttaattggcatttcaataataggcatgtaacacacaaaggagaccgtatgcccgtcaaaacgaccatcaaaaggagtgtcaaaaagaagcgttccgcgaccgctgtcaaggccgccgcgaagcgtcccggtaagaagtccgtagagcgcgagttggtctcgttcgatttcgccatcaaatacctattgcgcggcaagcgcgactacgtagtcctaaacggctttctgtccgaacttctcggcaaaaaggtcgaggttaagtctatagaagacgtagagaacattaaggacgacaaagacgacaagaccaaccgcgtagacctgaaagcgcggataaacggcggcgaaatcgcgatattcgaaatccagttttttcaagagtttgacttcttcgcgagggcgcttttcggcgtcagtagcgcgatagtggatcaggttgaggcgggtaatttctacagcataaaaaaaatctactcaataaacatagcgtattttaacctgagcgccaagcgcgaatacctattttccggcaatataaacaattttcaaggcgtccactacaaagatgaacaaatcccgtttgcgcggactctcgctccgacgtcaaagaaaatggttgacattcatcctgaatattaccttatcttgccaagaatgttcgacgagcagatgcgcggactgttcgacgaatgggtatacgtccttaaaagatccgccgtccgcgatgacttcaaagccgccggaataaaggaggccaaaaccaagttagactacctgcgcatgacgcccgaacagaaaaatgcatacaaacggtacatggaaaaacgccgaagcgccgacagcgcaatccaaacagcggagggcaaaggcgaacttagaggcatacggaaaggcagacgggaaggcctacagaaaggcctacagaaaggcctacagaaaggcagacaggaaggcagacaggaaggcctacagaaaggcctacagaaaggcctacagaaaggcctacagaaaggcagacaggaaggcctacagaaaggtcaggagttggaatgcgccaaacacgtcaaaagtatgtacaaatcgggctttacggtcaaacagatagtaaaaggcctcaaactttccgaaaccgcggtcaaacggattttaggcggaaaaacctag

SEQ ID NO: 72082 - protein, 414 aa, Unknown
  Obtained from environmental sample
  misc_feature (1)..(414): Xaa is any amino acid
MLRRFAPRNDGHCERSEAIQKVRYRAIFNWHFNNRHVTHKGDRMPVKTTIKRSVKKKRSATAVKAAAKRPGKKSVERELVSFDFAIKYLLRGKRDYVVLNGFLSELLGKKVEVKSIEDVENIKDDKDDKTNRVDLKARINGGEIAIFEIQFFQEFDFFARALFGVSSAIVDQVEAGNFYSIKKIYSINIAYFNLSAKREYLFSGNINNFQGVHYKDEQIPFARTLAPTSKKMVDIHPEYYLILPRMFDEQMRGLFDEWVYVLKRSAVRDDFKAAGIKEAKTKLDYLRMTPEQKNAYKRYMEKRRSADSAIQTAEGKGELRGIRKGRREGLQKGLQKGLQKGRQEGRQEGLQKGLQKGLQKGLQKGRQEGLQKGQELECAKHVKSMYKSGFTVKQIVKGLKLSETAVKRILGGKT

SEQ ID NO: 72083 - DNA, 657 bp, Unknown
  Obtained from environmental sample
  misc_feature (1)..(657): n is a, c, g, or t
ttgtataaatggtcattaatagctantaaagaagtagatgacattctcattcatgggggagagacattgttgcacccagaattgattgagatcatggaagttgcaagaaaatattttccctacggagagataataatcattacaaacggaatccttttgaacaaacagtctgatgagttctggaacgcttgcagggcaaatagaatcgatatcaaaataacgcgttatcctattaaccttgattttgaatccttaaaaataaaagcggaaaatgaagcagtatcattgggatgttggggggtggagaaaacggctttaaagaatatgtggaaacgtccgtttgatttaaatggcacacaagatttggagcattcttggaaatactgccatgaggtcaataattgtaattgtatagaaaatgggaagatgtacccttgtattacaatctattatgtgaggcactttaacaaatactttggcactaatatggtggtttctgaagatgatgtattggatttggatagtgtcagtaatttagatgaaattttgactttcttatccacgccgaagccgttttgcagatattgcaaaaggaaagatataacattcggattaaagtgggaagtttctaaaaaagagatatctgagtgggtataa

SEQ ID NO: 72084 - protein, 218 aa, Unknown
  Obtained from environmental sample
  misc_feature (1)..(218): Xaa is any amino acid
MYKWSLIAXKEVDDILIHGGETLLHPELIEIMEVARKYFPYGEIIIITNGILLNKQSDEFWNACRANRIDIKITRYPINLDFESLKIKAENEAVSLGCWGVEKTALKNMWKRPFDLNGTQDLEHSWKYCHEVNNCNCIENGKMYPCITIYYVRHFNKYFGTNMVVSEDDVLDLDSVSNLDEILTFLSTPKPFCRYCKRKDITFGLKWEVSKKEISEWV

SEQ ID NO: 72085 - DNA, 1938 bp, Unknown
  Obtained from environmental sample
  misc_feature (1)..(1938): n is a, c, g, or t
atggataaggatactttgtcaaaagtaagcgacggcgcttccgcggctatgctcgaaaaaagccgcgccgattgcgtcgacacttgttttgctcgcgcggaaactcaacagacgcagtgcggtcttggcagaagcggcgtttgctgtcgtatttgccacatgggtccgtgcagaattacgcctaagtcgcccaaaggaatttgcggcgcgacagccgacacaattgccgcgagaaattttctccgtgaggttgttggcggaacaagcgcgcactcggatcacgggcggcatttggtgttgcagcttagagatgtagcgcagggaaaagcgcccggctatcaaattaaagatgaaaaagctctgcgccgagccgcaaaactttacgatgtgcaggaagagggcagaagcgctgaggaagtcgcgctggaactttcaaatgtattccttaacgaattttcagaacaggaaggttttttaaaaactttaaaattagcgcctaaaaaaagacagggtatctgggaagctaccggcattaaaccgaacggaatagatcgaatggtagttgaggcgatgcacagaacaacaatgggtgttgatcacgattacctcaacttgctccaccacgcttttcgggtgtctctcgcggacggctggggcggctcaagagtagcgtcgatttgttccgatatactttttggaactccgtccccggtaaaaagcgccgcgaatatcggcgtgttaaaaaaagatacggtaaatattttaattcacggacacgaacccgctctttctgaaatacttacgaccgttgttgctgatccgcagattgtcgagtacgcgaaggcggctggagcgaaggggatcactttagccggtatctgctgtaccgccaatgaaattttaatccgccacggcgttccgcttgccggaaattttttacagcaggaattggcgatagtaaccggcgctgtcgagatgatgataatagacgtacagtgctgtatgccgagtcttcccgatgtcgcgaaaaattatcacacggaaattatttccaccgccgacattgccaaaactatcggcgcaagccatgtcagcgtagggcatgacggcgatcctgtaaaacacgcgaaagagcttgtaaaacgcgccgtcgataattttaaaaacagagattcgtcaaaagtaaatattcccgcggacaatgaaaaccttgtcgcgggtttttccgtagacgcgataaaatatatgcttggcggtcgataccgcgcttctttccgtccgttgaatgacgcaatcatagcgaacagaattctgggtgtagtgggaattgtcggctgtaataacacaaagcaaaaaactgacgattatacaaatacgctaaccctcgaacttgttaaacgaaatatactcgtgcttcaaacaggctgttcggctatcggaagcgcgaaggctggtctgttgaaaccggaagtcgcgttaaagtatgcgggcgcggggcttagggaagtttgcgagactgtaggcattccgcctatactgcacatgggaagctgcgtggataactcaagaattcttgaagccgcggcggaagttgtttttgagggcggacttggagacgaccttggcggtcttcccgccgtcggcgttgcgcctgagtggatgagcgagaaggcggtcgccattggctgttactttgtcgcaagcggcgtcgatgtagtgcttggaaatccgttttatgtttccggttcggaagccgtgagcaattaccttcacaacgaagtcaggaaagaatacggagcaagtttccatcttattgaagacccaatagaggcggcggatcgtattgtagaaataatcaatcaggcaagagacgcgcttggaataaacaaaaaagctgaacgcaaactcttcgatatgaaagacaggagggcaatgtaa

SEQ ID NO: 72086 - protein, 645 aa, Unknown
  Obtained from environmental sample
  DOMAIN (47)...(612): Prismane/CO dehydrogenase family
  misc_feature (1)..(645): Xaa is any amino acid
MDKDTLSKVSDGASAAMLEKSRADCVDTCFARAETQQTQCGLGRSGVCCRICHMGPCRITPKSPKGICGATADTIAARNFLREVVGGTSAHSDHGRHLVLQLRDVAQGKAPGYQIKDEKALRRAAKLYDVQEEGRSAEEVALELSNVFLNEFSEQEGFLKTLKLAPKKRQGIWEATGIKPNGIDRMVVEAMHRTTMGVDHDYLNLLHHAFRVSLADGWGGSRVASICSDILFGTPSPVKSAANIGVLKKDTVNILIHGHEPALSEILTTVVADPQIVEYAKAAGAKGITLAGICCTANEILIRHGVPLAGNFLQQELAIVTGAVEMMIIDVQCCMPSLPDVAKNYHTEIISTADIAKTIGASHVSVGHDGDPVKHAKELVKRAVDNFKNRDSSKVNIPADNENLVAGFSVDAIKYMLGGRYRASFRPLNDAIIANRILGVVGIVGCNNTKQKTDDYTNTLTLELVKRNILVLQTGCSAIGSAKAGLLKPEVALKYAGAGLREVCETVGIPPILHMGSCVDNSRILEAAAEVVFEGGLGDDLGGLPAVGVAPEWMSEKAVAIGCYFVASGVDVVLGNPFYVSGSEAVSNYLHNEVRKEYGASFHLIEDPIEAADRIVEIINQARDALGINKKAERKLFDMKDRRAM

SEQ ID NO: 72087 - DNA, 3465 bp, Unknown
  Obtained from environmental sample
  misc_feature (1)..(3465): n is a, c, g, or t
atgtcaaaacttatttgcaccggcgcgattgacggcgcggttgcgtttgttgcccaggctgtcaacaagttagatgaagcgataaaacaaaaaggtttggattgtcccgtaggttttcccgataccaattattttttgcctgtcatttattcttttacaggcagacaaatgaaaactcttgccgatctacgcagtattctggaagaagcaaaatcgcttttgcccgcgcgccccgccgaaaatgtttggctgccgtatcttggcagcgcgcttgacgcaggagtcgccgctcttttcgcgtgcgaagtaatcgaagcatgcaagtatcttatcggtcccaatcctgttgacggtatttggcttggagcggctaacgatgtaattatgcgcgagcgcggaattgagtttgtagacggaactgcgcccggttttgccgcgattacgggagccgcgcccgataacgccacggctgtaaaaatcgctaaggaattacagcagaaaaatctttatgtgtttatgggcggctgtacaaacggcgtgcagtttgccgagcagttagccgccgaaggcgtacaacttggctgggaaacccgccttgtgccttttggtcgggatgtttcctcgttgatttacgcgcttggtttcgccaaccgcgccgcgctttccttcggcggagtaaagccgggcgattatgaggcaaacttaaagtataacaagaacagaattttcgcttttgtcattgcgttaggtgaagtaacaaacgacaagtacgcggcggcggcgggggcaattaattacggcttccccgttattgcggataccgatattcctgaaattctaccgacgggcgtatgcacttacgagcatgtagtttcaaaagtaccgcacgataaaatcgtagaaaaagcccttgaagtacggggctgtaaaataaaaatagttaacgtgccgatacctgtcgcttacggtcccgcgtttgagggagagagaatccgcaaagaagacactcatgttgaattcggcggaaacaaaacccttgcttttgaatttgttacaagcgcggattatgactcgattagcgacggcgaaatcaaagttatcggtcccgacattgacactgtggaaccgggcggaagactgccgctcggcatttgggtggaagtagccggcagaaaaatgcagcctgattttgaaccgatattggagaggcagattcaccacatggtcaacggcgcggaaggaatctggcacatgggacagagagatattgtatggacgcgcgtttccaaaacaggttttgaaaggggcataagacttaaacactacggagaaattttacacgccaaattgttagcggattatcccgcgatagtagacaaagtgcgcgtaacgcttgttacagatcaagccgaagtggaaaaaaggcttgccatggcgcggaaagtttacgatgaccgcaaccgcagactggaagccatgactgatgaatcagttgatactttttattcctgtctgctttgccagagcttcgctcccaatcatgtgtgcgttatcacgccggagcggcttggtctttgcggagcgtacaactggctggacggcaaagcggcttacgagattgacgaaacaggtcccaaccaaccgcttgttaaaggcgactgccttgattccgtaaagggaatatggtcgggagtaaatgaatatgtttacacaaacagccacaagtcgatagaatctttttgcgcttactcaatcatggacagacccatgacaagctgcggttgttttgaagttatctgcgcttatgtgccggagtgcaacggcgtaatggctgttaaccgcgagtatcttggcgatactcccgttggaatgactttctccacgctggcaggctctgtcggcggaggtcagcagactcccggtttctttggctgcggaaaagtgttcctgacaagccgaaaattcctctctgcggaaggcggtttcgcgagagtcgtatggatgcccaaagaactaaaagatgttttgcgtaacgatttgataaaacgttttgacgagcaaaaacttcccggatttatcgaccaaattgctgatgagacaaatgctgtgagcgccgaagatgtgcggaagttcatggaaaaagttaaacaccccgcgttgaaaatggacgatatgtcgcgctttgcccaaagcgaacaagccgaggaagccgccgcgaaaactgacgcggggaaaaaagacgcgtcaggcgaatcacagtccgcaaaaaaggaagaagcggggagtgttccggcgaatatcgatcttgccgctatcacagaaaaaataaaagccgatgtaacaaaagaggttattacaggcataatcgacattttaagcgagcgttttttgggcaaagctccgtcagcgtcaagctcagaagttaaaacggaatccgccgattcctccggtaagccgaaaatatcggcgtcggatcgtgtttccaaaattaaaagttttgatattcccgttgacagcgtaagctgttccacatattcggttaaacttgggaatttaaaatcggagggcggcacgcgcggcaaaacttatatgataggcggcgctgattgtatgccgttccatttctgggaaggtaaaatgccgaacaagccgttagtcgccatggaagtttccgacagcgtaagcgaaaagtacccggaaattcttcgcaaggcttacggagacgttttaagcaatcccgcgcaaatggcgaaactttgcgtggaaaaatacggagcggaactaatcaatgtaaaacttgaaggcactcaccctgagcgcaataactacagcggcaagcagagcgtcgatcttgtaaaatcaattcttgaagctgtcgacgtgccgctgattgtcacaggcaccagccactacgataaaaacaacgaggtaatgaaggcaatcgcccaaaactgcgaaggagagaatctgatttttaactgggtagagcaggataattacagaactatcgcgggggcggcaatggcttatggtcacactcttgtagcgcaagccccaatcgacgttaatatcagcaaacagttaaatattctgttaaccaacatgggtttggctgccgacaaaataatcatcgacccaatgacaagtacaatcggttacggtattgaatatacttattccgtaatggagcgtattcgcctaacgggtcttggcggagataatatgctcttaagtcccatgattgtctctatcgggcaggagtgcgccaagataaaagaatttaaagcgcctgaatcgagcttccccgactggggtgatctggcaaaacgcgcggcttattgggaaatcgccgcggcgacgacgctgttatacgcgggagccgacatattgattctttatacgccggaagcggtaacgacaataaagaagaccatcaacagtttgatggatagggagggtaaataa

SEQ ID NO: 72088 - protein, 1154 aa, Unknown
  Obtained from environmental sample
  SIGNAL (1)...(20)
  DOMAIN (846)...(1152): CO dehydrogenase/acetyl-CoA synthase delta subunit
  misc_feature (1)..(1154): Xaa is any amino acid
MSKLICTGAIDGAVAFVAQAVNKLDEAIKQKGLDCPVGFPDTNYFLPVIYSFTGRQMKTLADLRSILEEAKSLLPARPAENVWLPYLGSALDAGVAALFACEVIEACKYLIGPNPVDGIWLGAANDVIMRERGIEFVDGTAPGFAAITGAAPDNATAVKIAKELQQKNLYVFMGGCTNGVQFAEQLAAEGVQLGWETRLVPFGRDVSSLIYALGFANRAALSFGGVKPGDYEANLKYNKNRIFAFVIALGEVTNDKYAAAAGAINYGFPVIADTDIPEILPTGVCTYEHVVSKVPHDKIVEKALEVRGCKIKIVNVPIPVAYGPAFEGERIRKEDTHVEFGGNKTLAFEFVTSADYDSISDGEIKVIGPDIDTVEPGGRLPLGIWVEVAGRKMQPDFEPILERQIHHMVNGAEGIWHMGQRDIVWTRVSKTGFERGIRLKHYGEILHAKLLADYPAIVDKVRVTLVTDQAEVEKRLAMARKVYDDRNRRLEAMTDESVDTFYSCLLCQSFAPNHVCVITPERLGLCGAYNWLDGKAAYEIDETGPNQPLVKGDCLDSVKGIWSGVNEYVYTNSHKSIESFCAYSIMDRPMTSCGCFEVICAYVPECNGVMAVNREYLGDTPVGMTFSTLAGSVGGGQQTPGFFGCGKVFLTSRKFLSAEGGFARVVWMPKELKDVLRNDLIKRFDEQKLPGFIDQIADETNAVSAEDVRKFMEKVKHPALKMDDMSRFAQSEQAEEAAAKTDAGKKDASGESQSAKKEEAGSVPANIDLAAITEKIKADVTKEVITGIIDILSERFLGKAPSASSSEVKTESADSSGKPKISASDRVSKIKSFDIPVDSVSCSTYSVKLGNLKSEGGTRGKTYMIGGADCMPFHFWEGKMPNKPLVAMEVSDSVSEKYPEILRKAYGDVLSNPAQMAKLCVEKYGAELINVKLEGTHPERNNYSGKQSVDLVKSILEAVDVPLIVTGTSHYDKNNEVMKAIAQNCEGENLIFNWVEQDNYRTIAGAAMAYGHTLVAQAPIDVNISKQLNILLTNMGLAADKIIIDPMTSTIGYGIEYTYSVMERIRLTGLGGDNMLLSPMIVSIGQECAKIKEFKAPESSFPDWGDLAKRAAYWEIAAATTLLYAGADILILYTPEAVTTIKKTINSLMDREGK

SEQ ID NO: 72089 - DNA, 1146 bp, Unknown
  Obtained from environmental sample
  misc_feature (1)..(1146): n is a, c, g, or t
atgtcaagcacattcggaaactacctccgcgtaacgactttcggagaatcgcacggccattccatcggcgccgtagtcgacggccttcccgcagacatcccgcttacggaggattgcatacaaacgcagcttaaccgtcgccgtcccggtcagagcgctattaccacgcaacgcggcgaagttgacgcggtacggatactgtcgggtattgaggatggatggacgcttggaacgcccatagccctagtcgtcgccaacagcgataggcgtcccagcgactacgattcaataaagggcattccgcggccttcgcacgcggactatacctacaaggcaaagtacggcgtgtgcgcgtcgagcggcggcggccgggcgagcgccagggagaccgtcgggcgcgtagctgccggagcggtagccgaggtttttctgcgtgagcgtttcggcgtggagatagtggcgtttgtctcatcggttggcgggataagcgcctcaaccccgatgctagacggtgtcgacaacgcggtcagcagcgccatcagccgaaatagcatagagtgcatagacctgaacacgctgacacgcgacatggtcgacgcctacccggtgcgctgtccggctcccgagagcgccaaagcgatggaagcggcgatcctgaacgtaatggaggacggcgactcgatcggcggcacggtgacctgcgtatgccgcaacgtgccggctggctggggcgagcctgtcttccaaaagttggaggcaatgctgggtatggcaatgctctcaatccccgccgccaagggtttcgagataggctccggcttcgccggcgcggcaatgcgcggatctgagcacaatgacgtctttatcaaaaaacaaaacggcttaggcacgttgacaaacaggagcggcggcgtacaaggcggtatatcaaacggcgaacccatctacttcaaaacagccttcaaacccaccgcgacgataggcagccaccaaaccaccgccgactatgagggaaacgacgcgatactaaaacccgccggacgccacgacccgtgtgtcgtcccccgagccgttcccatagtggaatcaatggcggctatagttttagcagacatggcattagcgcaaaatgcgcgtagatgttga

SEQ ID NO: 72090 - protein, 381 aa, Unknown
  Obtained from environmental sample
  DOMAIN (9)...(377): Chorismate synthase
  misc_feature (1)..(381): Xaa is any amino acid
MSSTFGNYLRVTTFGESHGHSIGAVVDGLPADIPLTEDCIQTQLNRRRPGQSAITTQRGEVDAVRILSGIEDGWTLGTPIALVVANSDRRPSDYDSIKGIPRPSHADYTYKAKYGVCASSGGGRASARETVGRVAAGAVAEVFLRERFGVEIVAFVSSVGGISASTPMLDGVDNAVSSAISRNSIECIDLNTLTRDMVDAYPVRCPAPESAKAMEAAILNVMEDGDSIGGTVTCVCRNVPAGWGEPVFQKLEAMLGMAMLSIPAAKGFEIGSGFAGAAMRGSEHNDVFIKKQNGLGTLTNRSGGVQGGISNGEPIYFKTAFKPTATIGSHQTTADYEGNDAILKPAGRHDPCVVPRAVPIVESMAAIVLADMALAQNARRC

SEQ ID NO: 72091 - DNA, 345 bp, Unknown
  Obtained from environmental sample
  misc_feature (1)..(345): n is a, c, g, or t
atgggttcgccgtttgatataccgccttgtacgccgccgctcctgtttgtcaacgtgcctaagccgttttgttttttgataaagacgtcattgtgctcagatccgcgcattgccgcgccggcgaagccggagcctatctcgaaacccttggcggcggggattgagagcattgccatacccagcattgcctccaacttttggaagacaggctcgccccagccagccggcacgttgcggcatacgcaggtcaccgtgccgccgatcgagtcgccgtcctccattacgttcaggatcgccgcttccatcgctttggcgctctcgggagccggacagcgcaccgggtag

SEQ ID NO: 72092 - protein, 114 aa, Unknown
  Obtained from environmental sample
  misc_feature (1)..(114): Xaa is any amino acid
MGSPFDIPPCTPPLLFVNVPKPFCFLIKTSLCSDPRIAAPAKPEPISKPLAAGIESIAIPSIASNFWKTGSPQPAGTLRHTQVTVPPIESPSSITFRIAASIALALSGAGQRTG

SEQ ID NO: 72093 - DNA, 645 bp, Unknown
  Obtained from environmental sample
  misc_feature (1)..(645): n is a, c, g, or t
gtgggaacaactgccggacaaggtgatgtttctggagcatttggcgatgaaggcgggggcgggacgggacgattggaagagggcggatgtttgggtttatcgcgcggtgcattttgcggagggcggggagtgaacattgtccttataggttttgcctcatgcggcaaatcggtcacggccgccgcgatttgcggacgggccgctatgcggcatatcgacctcgaccgcgtggtcgaggagcgctacgagaaaagaacgggggcgcgtctccccgtgcggcagattttcggcgaaatcggggcgggcggtttcacggcgcttgaaaacgacgctctcaaatcgctctcagagatgcgcgactcggtgttgtcgaccggcggacgcacgcctatggacgcggcgaatcgggtgtgccttaaatcaataggcgaaatcgtctacctcaagtgcggcgtaaacacggttatgggcaggatgaagagcaaaggagcgccgctctcgatgggaaatacgcccgaggcaatcaaagaggaactagagaagcgcgatcccgtatacgcggcgttagcggatgtagtgattgataatgaatcgttgacgccggatgaagccgccgcggaggtattgaaacgtttatctttgtga

SEQ ID NO: 72094 - protein, 214 aa, Unknown
  Obtained from environmental sample
  DOMAIN (52)...(213): Shikimate kinase
  misc_feature (1)..(214): Xaa is any amino acid
MGTTAGQGDVSGAFGDEGGGGTGRLEEGGCLGLSRGAFCGGRGVNIVLIGFASCGKSVTAAAICGRAAMRHIDLDRVVEERYEKRTGARLPVRQIFGEIGAGGFTALENDALKSLSEMRDSVLSTGGRTPMDAANRVCLKSIGEIVYLKCGVNTVMGRMKSKGAPLSMGNTPEAIKEELEKRDPVYAALADVVIDNESLTPDEAAAEVLKRLSL

SEQ ID NO: 72095 - DNA, 540 bp, Unknown
  Obtained from environmental sample
  misc_feature (1)..(540): n is a, c, g, or t
atgttgaaattggcgagagagacgctgacatcggcggtgcgtgacggggcgcaaccgtcgccgtccaaacccaagccggagttgtcaagactggcgcagaattacggatgctttgtaacgctgaattctcacgggcagcttcgggggtgtatagggaacatcgaaccgatcaagcctctctacaagggcgtcgccgacaacgcgataaacgccgccttccacgacccgcgcttcccgagggtgaaggcggcggaactcggtgatataaatattgaggtgtcggtgctgaccaagccggcgccgctaggcgccaagtcgccggatgagatactgaagaaattaataccgtttgagcacggggtaatattgaaaatggggtcgcgtcagtcaacctttctgccgcaagtgtgggaacaactgccggacaaggtgatgtttctggagcatttggcgatgaaggcgggggcgggacgggacgattggaagagggcggatgtttgggtttatcgcgcggtgcattttgcggagggcggggagtga

SEQ ID NO: 72096 - protein, 179 aa, Unknown
  Obtained from environmental sample
  DOMAIN (3)...(178): AMMECR1
  misc_feature (1)..(179): Xaa is any amino acid
MLKLARETLTSAVRDGAQPSPSKPKPELSRLAQNYGCFVTLNSHGQLRGCIGNIEPIKPLYKGVADNAINAAFHDPRFPRVKAAELGDINIEVSVLTKPAPLGAKSPDEILKKLIPFEHGVILKMGSRQSTFLPQVWEQLPDKVMFLEHLAMKAGAGRDDWKRADVWVYRAVHFAEGGE

SEQ ID NO: 72097 - DNA, 864 bp, Unknown
  Obtained from environmental sample
  misc_feature (1)..(864): n is a, c, g, or t
atggccgttgatgaaaaaatcagaaaggctgcggtggcgggtcggttctacccggcttcgcccaaggaattgcgggacgatgttgagaaataccttgccgccgccgcgccgtcggctccgtcttcaacgccgtccgtaaacatactgatagcgccccacgccggttacgtcttctccgccgcggtggccgccggcgtgtacgcccgcgtatctcgtgccgtgcggaccgcgatcctcatcggcccctcccaccacaagcgctttgacggcgtgcacgtcacggacgctcaatactacgagacgccgctgggtaaggtagaagtcaatcgggagatcaacgcaaaattaagcaagcacccgctctgcctgcgggcttcgggggcggaggatagcgagcattgcttggaagtgcagctcccgttcctgcaagtgatattaggcgccggcaaattcacaatcgtcccgttgctcacgggcaacgtcggcgcgaaggcagtcgccgagatgttgctgctgtttattgatgatacgacaatgatcgtggcctcaagcgacctctcccactaccagccgcagagcgacgcccgcgacatcgacgacgcgacgatctccaccgtcgtctccggcaacaccgagggcttcatggaggcctgcggcgatacggcgatccgggtcgccatggagatagccgcgaagcgcggccttaccgcggagcttatcgacgcgaggacctcctacgagaccgcgccggagtacggcgacccgcatagagtggtggggtacgcggcaatcgcctttgtaagagcggcgcggcggatagcggggcggaagatttcagcaaacaagagaaagagtatatgttga

SEQ ID NO: 72098 - protein, 287 aa, Unknown
  Obtained from environmental sample
  DOMAIN (9)...(265): Protein of unknown function DUF52
  misc_feature (1)..(287): Xaa is any amino acid
MAVDEKIRKAAVAGRFYPASPKELRDDVEKYLAAAAPSAPSSTPSVNILIAPHAGYVFSAAVAAGVYARVSRAVRTAILIGPSHHKRFDGVHVTDAQYYETPLGKVEVNREINAKLSKHPLCLRASGAEDSEHCLEVQLPFLQVILGAGKFTIVPLLTGNVGAKAVAEMLLLFIDDTTMIVASSDLSHYQPQSDARDIDDATISTVVSGNTEGFMEACGDTAIRVAMEIAAKRGLTAELIDARTSYETAPEYGDPHRVVGYAAIAFVRAARRIAGRKISANKRKSIC

SEQ ID NO: 72099 - DNA, 624 bp, Unknown
  Obtained from environmental sample
  misc_feature (1)..(624): n is a, c, g, or t
ttggacggagaatccacttatatgtcttgcgggaataggcgtatcggcatactcggcggggtctttgacccggtgcattgcgggcatcttgccgttgcgcttttggccaaggagcatttcgggctaagcgaggtggtatttgtgccgagcggcgcgccgccgcacaagccggcggtggtcgtttctccggaagatcgtttgaatatgctcaagttggcgcttacgggcgtggatgggtgcggcgtctgggacggggagttgcgccgtagcgggtactcctacaccatcgatactttaactgaattgggcgagcggtatgccggcgcgaagttttattttatcataggcacggacaacctgccggagatcgccaaatggcgttcgtataaggagataatagcacgggtaacgttctgcgtggccttccgtccgggttacgaactaggtcgtcccgaggcgctcgccgcggcggatatacaggattttccggggcctatgtggggttcaagttccacaatgttgcgcgagtatttgagcaaggggcactcgtgcggattcatgataccggacgccgtccttgggtatatacgggatagggggctgtatggatattcaaacgggtaa

SEQ ID NO: 72100 - protein, 207 aa, Unknown
  Obtained from environmental sample
  DOMAIN (17)...(177): Cytidylyltransferase
  misc_feature (1)..(207): Xaa is any amino acid
MDGESTYMSCGNRRIGILGGVFDPVHCGHLAVALLAKEHFGLSEVVFVPSGAPPHKPAVVVSPEDRLNMLKLALTGVDGCGVWDGELRRSGYSYTIDTLTELGERYAGAKFYFIIGTDNLPEIAKWRSYKEIIARVTFCVAFRPGYELGRPEALAAADIQDFPGPMWGSSSTMLREYLSKGHSCGFMIPDAVLGYIRDRGLYGYSNG

SEQ ID NO: 72101 - DNA, 462 bp, Unknown
  Obtained from environmental sample
  misc_feature (1)..(462): n is a, c, g, or t
gtggaggaggcgcatttcaggatcgcccacatgcgctacatgcggtcgctgccctctttccgcgaccaaacggagaccaaggaggccatgcgcctcttcaacgattacgtagacctctatccaaagggggtctatgccgacagcgccaagatcctctacacgcagtcgctcgacaagttggcggagaaggagttcaacaacgcgctcttctaccgcaagcagagggagcacaacgccgcgttaatctactatagggcggtgctctccgagtatcctgattccaagttcgcgccggaggccgtcgtggggatggcggagatgctcgtgacgttgcaacgcacgcgggaggcggcggaggcggtgggggagctggacgttacggcttttgacgaggggcttagggtgcggattgaggctatcaggcagaaggttggcggggcggttgataaggataacggttaa

SEQ ID NO: 72102 - protein, 153 aa, Unknown
  Obtained from environmental sample
  misc_feature (1)..(153): Xaa is any amino acid
MEEAHFRIAHMRYMRSLPSFRDQTETKEAMRLFNDYVDLYPKGVYADSAKILYTQSLDKLAEKEFNNALFYRKQREHNAALIYYRAVLSEYPDSKFAPEAVVGMAEMLVTLQRTREAAEAVGELDVTAFDEGLRVRIEAIRQKVGGAVDKDNG

SEQ ID NO: 72103 - DNA, 390 bp, Unknown
  Obtained from environmental sample
  misc_feature (1)..(390): n is a, c, g, or t
atggagaatttgaatattatgtcgaagaaaactattcttgtaattgatgatgatgaacctacctctatcttgacagaaggcatattggaagatgattataacgttatcattgccaagtccggcgaggcggctttgaatttgtttataaagaagaaggtttctctcgatttggttttgctggatttgtatatgcccggaatgagcggctggaatacccttatcaaattacaaaagttatgcaaagcgcgcaatattccgatagtgatgtacacatcatcggaagacgagggagatatagaaaaagcgaacgcatttggcgcggttggatacatacataagccgagcaatagaaacacattgctaaaggaagtggcaaggttagtaaattga

SEQ ID NO: 72104 - protein, 129 aa, Unknown
  Obtained from environmental sample
  DOMAIN (10)...(125): Response regulator receiver domain
  misc_feature (1)..(129): Xaa is any amino acid
MENLNIMSKKTILVIDDDEPTSILTEGILEDDYNVIIAKSGEAALNLFIKKKVSLDLVLLDLYMPGMSGWNTLIKLQKLCKARNIPIVMYTSSEDEGDIEKANAFGAVGYIHKPSNRNTLLKEVARLVN

SEQ ID NO: 72105 - DNA, 381 bp, Unknown
  Obtained from environmental sample
  misc_feature (1)..(381): n is a, c, g, or t
atgacaactctatacgccgtatccgccgccgtaaacggcagggtcgccaatacgtgcaatttaagcgaagactacataggctacgccacagaatacggcgatgccgccggggacttcagccccctatcccaactaacggttaccgaagtaaaattagtcgcaagagaattagcgctccctgaaaagtttatcgaaaaagtccccgaagacgggctttcaggtttaagcgatgaggaaaatatcggctttacttacgccgttttggacaagtatatccgagaaggcgtttgcgaagatgcggcgataaaagaaaaaatagataaaatgcataaattgaatttgcataaattggaattgatgcctcattttgaaaataagtaa

SEQ ID NO: 72106 - protein, 126 aa, Unknown
  Obtained from environmental sample
  DOMAIN (3)...(120): NAD synthase
  misc_feature (1)..(126): Xaa is any amino acid
MTTLYAVSAAVNGRVANTCNLSEDYIGYATEYGDAAGDFSPLSQLTVTEVKLVARELALPEKFIEKVPEDGLSGLSDEENIGFTYAVLDKYIREGVCEDAAIKEKIDKMHKLNLHKLELMPHFENK

SEQ ID NO: 72107 - DNA, 1896 bp, Unknown
  Obtained from environmental sample
  misc_feature (1)..(1896): n is a, c, g, or t
atgaaagatttattattgccgtctgttttcagcgatggaatggtcttacagcgcgatagtaacttccctatttggagcagaaaaaaaataaccgtaatatttttgggaaaaacatacgaagcaaaatccgcagacggcaaatggctcgtaacgcttgatcctgtctctgcgggcggtccctttgaaatggaaataaaaagcgatgatgaatccgttataataaaagacatttattcaggcgacatttggctctgctcagggcaaagcaacatggaaatgatgatggatcgccttcgcgatgatttcggcgaagagtgggaattaaaagagtttcctattatcaggcattttaagtctcctcaaggatgggatttttcttctccatgcgaagaaatttcaggcggcagttgggtaaaaccgtccaaagagacgctttccggtattaccgcaaccccttggttcttcgcgaaaaacatgtacgaaaaataccgcatccctatcggaataattaataccgcgtggggcggcactccgattgaatcatggatgagccgcgacgccctcgcggactttccgcaaaaaatcgctcttggcgaacaatacgccgacgcaaaaaaacgcgaggaaattacaagtaaatcggcgtccgctattgcggaatgggaaaaaaatgtagcgcacgaagatatcgggctcgccgaagattggaaaaatcaagcaacggacatttcttcttgggacgacattaccctgcccggcaattttacgggcgctgggcttgaaaaattttgcggcgcgttatggcttgcaaaagattttgaagcgggagaagattttgccaccaaagaaattaaagtgtggctcggcactatcgtagactccgatacggtttttgttaacggcgttcaaataggaaacaccggataccgttatccgccgcgaaaatatgttccaaagggattggtcaaaaaaggaaagaaccgtatcgtaataagagttatatgcaataacggcgaaggcagtataacaaccgataaacctttccgtatttttacggacagcgaatctgtggaactcaccggaacatggaaatacaaaataggaacaaaagcgcctacccgccctgaagaatttttctttcagcgatttccgatgggaaattttaacgcaatggtctacccttttcttaaattgcccgttaaaggagttatctggtatcagggagaatcaaacgattcttcccccaacgattacaaaaaacttttcccgcttatgattgacgattggcgtaaaaaaaacaacaacgaaaagttgccgtttatttttgtccaactgccgatttggaaagaggcgtcagataacaatgaagcgcacggctgggcgataatccgcgaagcgcaggcggacgcgatggctgtaccgaatacgggtatggcttgcgctctggaactcggcgaatggaatgacttgcaccccattaacaaaaaagacgtaggttaccgccttttccttgcggcggacaaaacgctgttcgccgctgacaatacttcgccgggaccgacagtatcacgctttgaacgtcaacaggataaaattaacatattttttaataattgcggcgcgggtttaaaagccgttaataaaccttcttcgcctaacgtaccctgccccgactgcgagaaaaatcccgacaccgcttacgtcagcgttatcggcgaagacgctaatgttcgtttaccggcaaaaattgaaagcgcaaacgcaatcagtattgatatatccggtataaaaaatccaaaaaggatattgtacgcatgggcggataatccgcgcgacagacagttgttcaacagcgacggtttgcccgctctgcctttcaaaatcgagataaaataa

SEQ ID NO: 72108 - protein, 631 aa, Unknown
  Obtained from environmental sample
  DOMAIN (149)...(434): Domain of unknown function (DUF303)
  misc_feature (1)..(631): Xaa is any amino acid
MKDLLLPSVFSDGMVLQRDSNFPIWSRKKITVIFLGKTYEAKSADGKWLVTLDPVSAGGPFEMEIKSDDESVIIKDIYSGDIWLCSGQSNMEMMMDRLRDDFGEEWELKEFPIIRHFKSPQGWDFSSPCEEISGGSWVKPSKETLSGITATPWFFAKNMYEKYRIPIGIINTAWGGTPIESWMSRDALADFPQKIALGEQYADAKKREEITSKSASAIAEWEKNVAHEDIGLAEDWKNQATDISSWDDITLPGNFTGAGLEKFCGALWLAKDFEAGEDFATKEIKVWLGTIVDSDTVFVNGVQIGNTGYRYPPRKYVPKGLVKKGKNRIVIRVICNNGEGSITTDKPFRIFTDSESVELTGTWKYKIGTKAPTRPEEFFFQRFPMGNFNAMVYPFLKLPVKGVIWYQGESNDSSPNDYKKLFPLMIDDWRKKNNNEKLPFIFVQLPIWKEASDNNEAHGWAIIREAQADAMAVPNTGMACALELGEWNDLHPINKKDVGYRLFLAADKTLFAADNTSPGPTVSRFERQQDKINIFFNNCGAGLKAVNKPSSPNVPCPDCEKNPDTAYVSVIGEDANVRLPAKIESANAISIDISGIKNPKRILYAWADNPRDRQLFNSDGLPALPFKIEIK

SEQ ID NO: 72109 - DNA, 1590 bp, Unknown
  Obtained from environmental sample
  misc_feature (1)..(1590): n is a, c, g, or t
atggattttaagtatcataacccgatattaagcggattttatcccgacccctcaatttgccgcgccggaaacgatttttatcttgtcaattcaacgtttgcgtatttccccggcataccgatttttcacagcaaagatttaacaaactggaaacagataggcagcgcgatagatcgacccggacagttatgtttcgacggacatgacatttcacagggactgttcgctccgacaatccgcgagaacaaaggcgttttttacattctttgtactctcataaacacaggcggcaattttatcattaccgcgaaagacccaaagggaccgtggtcagacccgatatggcttccggaagcggacggtatcgacccttctattttctttgacgacaacggtaaagtttggtacatcggcactcatcccgcgcccgaaggcgaggcgtattcgggtaactatgaaatttttattcatgaaattgacatggaaaaacttgcctgcggtaaaaatccgctaacgggttcaagcatcggcttgtggcggggcgctcttcgaggagcgatttggcccgaaggaccgcacatttacaaaatcgccggctggtattatttactgcacgccgagggcggaacgggtcttgatcacgctgtttgtatagcgcgggcaaaagaaatacaaggaccgtgggaaggcaaaaggagcaatcctgtcgtcacgcacaggcatcttggaaagagggcgaaaattattaacgtgggacacgccgatttggttgacgacgctaacggaaactggtatatggtcttacttgcgtcccgtcagtttgagggcgtatgtccgctgggacgcgaaacttttatcgttccgattatctgggaaaacgagtggacctacatcgctaccgaatccggtcttattgaggaaggagtaccgcagaaggatattgcggataacaaaaacagcgacccgcttgattcctgcgattattttaacggggactcgcttccgctccactggctaatcctgcgaatgcctgttgatgaaaaaaacgccgcgttcagtttgacggaaagaaaagactctttgcgtctttttacaacggcggctacaatgcgcggaaaagaacatcccgctttcgccggaagaaggatcaggcataaagattggtcgttcagcgttttaattgaatttactcccaaaaaagaaaatgaggcggcaggattgataattctgcaaagcgaggattatcagtaccgtttggaaaaatatctttcacctaacggaaactgtatgctccgtttgataaaagcggcaggcaaagaggatgaaattatcacttctgcggaatgtcccaaggacgcagtatcgctcacgttagccgccgtcaataaagatatgaaactttcttttttttacggaaaagacaaagactctcttaaatgcttaaaagacaatatggacgctaggatactcagtacggaatacgcgggcggttttgtcggctcattggcgggaatattcgctacgggcaacggacacaattcaggcaattacgccgatgtaatattcgcagattacaaggggttagcatga

SEQ ID NO: 72110 - protein, 529 aa, Unknown
  Obtained from environmental sample
  DOMAIN (5)...(296): Glycosyl hydrolases family 43
  misc_feature (1)..(529): Xaa is any amino acid
MDFKYHNPILSGFYPDPSICRAGNDFYLVNSTFAYFPGIPIFHSKDLTNWKQIGSAIDRPGQLCFDGHDISQGLFAPTIRENKGVFYILCTLINTGGNFIITAKDPKGPWSDPIWLPEADGIDPSIFFDDNGKVWYIGTHPAPEGEAYSGNYEIFIHEIDMEKLACGKNPLTGSSIGLWRGALRGAIWPEGPHIYKIAGWYYLLHAEGGTGLDHAVCIARAKEIQGPWEGKRSNPVVTHRHLGKRAKIINVGHADLVDDANGNWYMVLLASRQFEGVCPLGRETFIVPIIWENEWTYIATESGLIEEGVPQKDIADNKNSDPLDSCDYFNGDSLPLHWLILRMPVDEKNAAFSLTERKDSLRLFTTAATMRGKEHPAFAGRRIRHKDWSFSVLIEFTPKKENEAAGLIILQSEDYQYRLEKYLSPNGNCMLRLIKAAGKEDEIITSAECPKDAVSLTLAAVNKDMKLSFFYGKDKDSLKCLKDNMDARILSTEYAGGFVGSLAGIFATGNGHNSGNYADVIFADYKGLA

SEQ ID NO: 72111 - DNA, 753 bp, Unknown
  Obtained from environmental sample
  misc_feature (1)..(753): n is a, c, g, or t
atgataaacgttccgttttcacgcggttttaatttttccaaatggtttgaagcgcgcgcttttaaggatattgattttaataaattcagcgaacaggattttatcgatgtaaaaagtctggacgctgatgttatccgccttcccgtcgcttttcataattttattcttgacgaaaaaactcatacccttgaacctgaattgttaaaataccttgacaccgttgccgattgggcgcaaaaacatcaaatttatcttattattgataatcattcgtttcatcctgttaatccgacagacgacaatatcgataaaatacttattcccgtatgggaacagattgcccgttattttaaggatcgcggtaaatatgtgttatacgaagtattaaacgaacctcacggcattaccgacgagcgttggggtaaaatccaacagaagacggtagaagcgatacgaaagattgataaagagcatccggttatcgtgggcggaacaaattataattcaatcgagaaattatttaaaattcctaagtataccgataaaaatttaatttacacttttcatttttacgatccccatatttttacacatcagggcgcgacatggaataagccgtcgcttgacccgctatccaatcttccgtttcccgcgcctgaaaattttaacccgcaaatccatgaaacatttaaggggacgtgggtggaggaatttttaaanattataaacaggattctaaatttgaaaaattaa

SEQ ID NO: 72112 - protein, 250 aa, Unknown
  Obtained from environmental sample
  DOMAIN (13)...(250): Cellulase (glycosyl hydrolase family 5)
  misc_feature (1)..(250): Xaa is any amino acid
MINVPFSRGFNFSKWFEARAFKDIDFNKFSEQDFIDVKSLDADVIRLPVAFHNFILDEKTHTLEPELLKYLDTVADWAQKHQIYLIIDNHSFHPVNPTDDNIDKILIPVWEQIARYFKDRGKYVLYEVLNEPHGITDERWGKIQQKTVEAIRKIDKEHPVIVGGTNYNSIEKLFKIPKYTDKNLIYTFHFYDPHIFTHQGATWNKPSLDPLSNLPFPAPENFNPQIHETFKGTWVEEFLXIINRILNLKN

SEQ ID NO: 72113 - DNA, 1227 bp, Unknown
  Obtained from environmental sample
  misc_feature (1)..(1227): n is a, c, g, or t
atggcggccgctgacctgagctttaactctataggcgatatttattacgaagaaggcgcctgggacaaggcggaaaagacctacgagacgctgtctgaaatagtcaatagggaacctgttccgggaatagacaaatttgaggtaaactaccgtttcgcgctttcggcaagcaaattaggcctgaccgaacaggcctacaggggattttgccagtcacgcgccttaagacaggacaattttgaggtaaactacaatctgggcaccctggaatttgagcgaaaaaactacgaaaaagccctgcagcttctccaggcggcgcacaaccagaacccggataaccccgcggtactccgctgcatgggccattcgttcttcaggcttaagaagcccaaagaggcgatgaacttcatccgcaaggcaatcgacctcgccccggatgacaaagaatccctttatactctggcggagtgttattacgaagccaaccaggtagaccaggccaccaagatattcagccacctccgcgccgacccggtaatgggtcccagcgcctgccttatatccggtaatatccacaacgagattcgcaggtcggacctcgcgatacaggactttgaaatggggctaaagcacgagaacataaggccggatattcttgttgagcttcgatactacctcgccgtttcctacatcaagataaacgagataagcaaagccatacccttgctccagctcattcaggcggacaacccatcgtacaaggacgtaaacgtactgataagcaagtaccaggaacttaacgccaacaagaacctacagattttccttatggcctcatccgctgattttgtcgcgctctgccgtaaaatagtaatgacctatttcgccagggcaaaagtaaaaatattgaatatttcggttcacaagaatgaatgggcggatattcacggggaagttaacacccccaagtggtcggatataattatgttcaggtttatacgcacccagggttccattggggaactcattgtgcgcgacttccattcccacctgaaagaggtgaaggccggcaaaggcgtctgcatgaccgtgggcgccttcagcgaagaggcaaagcgttataccgaagcccgtcttatcgatcttatcgagaaagagcgcctctcagcaatcatgaacaccgttgatgccaaggctgcggcattggcaaatgtaaaaaagaaatga

SEQ ID NO: 72114 - protein, 408 aa, Unknown
  Obtained from environmental sample
  DOMAIN (287)...(390): Restriction endonuclease
  misc_feature (1)..(408): Xaa is any amino acid
MAAADLSFNSIGDIYYEEGAWDKAEKTYETLSEIVNREPVPGIDKFEVNYRFALSASKLGLTEQAYRGFCQSRALRQDNFEVNYNLGTLEFERKNYEKALQLLQAAHNQNPDNPAVLRCMGHSFFRLKKPKEAMNFIRKAIDLAPDDKESLYTLAECYYEANQVDQATKIFSHLRADPVMGPSACLISGNIHNEIRRSDLAIQDFEMGLKHENIRPDILVELRYYLAVSYIKINEISKAIPLLQLIQADNPSYKDVNVLISKYQELNANKNLQIFLMASSADFVALCRKIVMTYFARAKVKILNISVHKNEWADIHGEVNTPKWSDIIMFRFIRTQGSIGELIVRDFHSHLKEVKAGKGVCMTVGAFSEEAKRYTEARLIDLIEKERLSAIMNTVDAKAAALANVKKK

SEQ ID NO: 72115 - DNA, 792 bp, Unknown
  Obtained from environmental sample
  misc_feature (1)..(792): n is a, c, g, or t
gtgcaaatactggcggaaaggcatcgcggggacgagtttctcatagcggtgcccttctcaaacaaatgggcgaaggaactggtcagggaagagcgaggccggatagagagggcggcgaacctgatcaaaacgtccggctcgccgtaccgcggggtaagccgccctgtcagccttttcgatctgcagctgaccgcgcatgttttgtataaccctgaatgcgccttgagcgaacgcaacgaactgtacagccatgtggcatggcttaaggatatggcggaatccgggaaaaagacttctgcatttcaacgggagatagagaaatatctgtcggtaagaaaaggcaaggcgctatgtgtacagatcagagaagacgtgatagaacaggaacttgaaatgtcaggatggcttgtcatcctggggaacgggaaattaacggcgcagaaggcgcatgacatctaccggaagaaagacgtggtggagaaagcgtttatgaaatacaaaaatcttcttgacctgcggaggctgcgtattcacagtgacgaaaataaattgtttgcggcgtttttagcattgacgcttgtttcgtacatacacaaggtaatgaaagaaaaagacctgtaccgcaagatgacgatggagaaaatgtttataaccttgtcgaaactgagaaaagtgacaataaacggttatgacattcttcgtccaactaccaaagaacagcgggatattttttccgctttttctatccctcggcctcttgtaggtcaaattttggagcgggaattaaggtaa

SEQ ID NO: 72116 - protein, 263 aa, Unknown
  Obtained from environmental sample
  misc_feature (1)..(263): Xaa is any amino acid
MQILAERHRGDEFLIAVPFSNKWAKELVREERGRIERAANLIKTSGSPYRGVSRPVSLFDLQLTAHVLYNPECALSERNELYSHVAWLKDMAESGKKTSAFQREIEKYLSVRKGKALCVQIREDVIEQELEMSGWLVILGNGKLTAQKAHDIYRKKDVVEKAFMKYKNLLDLRRLRIHSDENKLFAAFLALTLVSYIHKVMKEKDLYRKMTMEKMFITLSKLRKVTINGYDILRPTTKEQRDIFSAFSIPRPLVGQILERELR

SEQ ID NO: 72117 - DNA, 675 bp, Unknown
  Obtained from environmental sample
  misc_feature (1)..(675): n is a, c, g, or t
atggaggctgataccgtcgcgcattgcggcaactccttggacggaaacttcgtctggagcctcactatgaccgatattttcaccggatggacggaatgcagggcagtctggaacaagggcgcacggaacgtcgtagaacaaatccatgacattgaacggaacctgccttttaagctgctgggcttcgattgcgacaacggttccgaattcctcaaccatcacctcgtcaggtacttctccgacagacgggtgccggtctgcatgactcgatccagaccgtacagaaaaaacgacaacgctcacgttgaacagaaaaactggacgcatccgcgccatctgctcggttatgaccgaatcgacaacagctccatcgtcccggccataaacgacctctacgccaacgaatgggcactgctgcaaaaccacttctatccgtccgtgaaactgctctccaaaatcagaaacggcgcaaaatacataaaaatccacgacaaaccgacaaccccataccaacgcgtgttagcggcggacaaggttacacggcgtaataaaaaattacttataactttacacaataccctgaacccatttattttaaagaaaactatcgaaactaaattaaaagccatttttgaacaaatttcggtcagctctaatttgaaacgaagggtataa

SEQ ID NO: 72118 - protein, 224 aa, Unknown
  Obtained from environmental sample
  DOMAIN (2)...(174): Integrase core domain
  misc_feature (1)..(224): Xaa is any amino acid
MEADTVAHCGNSLDGNFVWSLTMTDIFTGWTECRAVWNKGARNVVEQIHDIERNLPFKLLGFDCDNGSEFLNHHLVRYFSDRRVPVCMTRSRPYRKNDNAHVEQKNWTHPRHLLGYDRIDNSSIVPAINDLYANEWALLQNHFYPSVKLLSKIRNGAKYIKIHDKPTTPYQRVLAADKVTRRNKKLLITLHNTLNPFILKKTIETKLKAIFEQISVSSNLKRRV

SEQ ID NO: 72119 - DNA, 1224 bp, Unknown
  Obtained from environmental sample
  misc_feature (1)..(1224): n is a, c, g, or t
atgaagccagccaatagtaaatttacaatattgcgtcaggtaatagcaaatattcctggatatttaatccccgccctgaccgcgaagcacggggtgacgaagttggcgcgcagcttttcggcgtttagccacgtggtttctatgatgttcgcccatctcagccacgccatgaatctcaacgacgtctgcgatacgctgcggctgcacagcggggcgctgtctacgatccgcaacgcgacgccgcccagccgcaacggcctatcccacgccaacaagatacgcagttcggaaatggccaaagagcttttttatgcggttttggggcatctgagaagcctttacccgaaattcgggcggacggacgccgcattcaaacttccccgccgcttgaagcgcgtgatcaatttagtggattccaccacgatacagctcttcgcgaactgcatggactgggctaaacaccgcagacggaaggcggcggctaaatgccatttgatgctcgacgcgcagacgttcttgccgaggtttgcggtggtaaaggccgccgatattgcggacgccgtcatcggacgcaggttatgcgacgcgctacgggccggcgagatcgtggtttttgacaaagcgtatgtggattacaagcatctgttcgaactgtcccaacgtggggtgctctgggtcacacgcccaaaggaaaacatggcgtaccgtatcgttaagaaattaaaggacgccaacaaatcaatcgttcttgacgccgaaatcgagctttcggggaaaaagagccaagacgattacccggcacgtttccgtttgatcgtcgccgacgtcgaaagagacgggcagagagtcaggatgaagtttataacggacgacttctcgctggcggcctcgaccatcgtcctattatacaagtctcggtgggacatagaactgttctttaaacagataaaacagaccttgaaactatcggactttttaggatacagcgaaaacgccgtccaatggcagatatggacggcgctattatgctatctgatcctgcgctttatcgcatttacaagtaaatggaaaggttctttcgcgagactgtttaccgttatccgtggaggactttggtccagagtcgagctgaacagcttgctctgttgctgcgggacagcacacgatcatacacggatgattatgatgcctcaacagctgtatttaccgctatttacaccataa

SEQ ID NO: 72120 - protein, 407 aa, Unknown
  Obtained from environmental sample
  DOMAIN (134)...(346): Transposase DDE domain
  misc_feature (1)..(407): Xaa is any amino acid
MKPANSKFTILRQVIANIPGYLIPALTAKHGVTKLARSFSAFSHVVSMMFAHLSHAMNLNDVCDTLRLHSGALSTIRNATPPSRNGLSHANKIRSSEMAKELFYAVLGHLRSLYPKFGRTDAAFKLPRRLKRVINLVDSTTIQLFANCMDWAKHRRRKAAAKCHLMLDAQTFLPRFAVVKAADIADAVIGRRLCDALRAGEIVVFDKAYVDYKHLFELSQRGVLWVTRPKENMAYRIVKKLKDANKSIVLDAEIELSGKKSQDDYPARFRLIVADVERDGQRVRMKFITDDFSLAASTIVLLYKSRWDIELFFKQIKQTLKLSDFLGYSENAVQWQIWTALLCYLILRFIAFTSKWKGSFARLFTVIRGGLWSRVELNSLLCCCGTAHDHTRMIMMPQQLYLPLFTP

SEQ ID NO: 72121 - DNA, 969 bp, Unknown
  Obtained from environmental sample
  misc_feature (1)..(969): n is a, c, g, or t
ttgtatatgatgaaaggcggagcggtaatgaaaacaaaacgaattttggtgaccggcggcgccggcttcctaggctcgcacctctgcgaaaaactcgtagggcaggggcacgacgttatatgtctggataactacttcaccggacgcaagaagaatgtggaacacctatttgaccgccacaacttcgaactcatgcgccacgacgtgaccttcccggtctacgtggaggtcgaccagatctataacctagcctgcccggcctcccccgtccactaccagtacaacgccgtgaagacgatcaagacctccgtaatgggcgcgatcaacgtcctaggcctggcgaaacgcgtaagggcgcgtgtgctgcaagcgtctacgtcggaggtctacggcgaccccaacgagcacccgcaaaaggagagctactggggcaacgttaaccccataggcgtacggtcgtgctacgacgaggggaagagggtggccgagacgttgttcttcgactaccaccgtatgaacaaagttgacataagggtaatgcgcatcttcaacacctacggtccgcgtatgcacccaaacgacggacgcgtggtatctaactttatcgtgcaagcgctgaaaggaaacgatataacaatctacggcgacggttcccagacacggtcgttctgctacgtggacgacctaattgacgggatgatacgcctgatgaatgccgacgatacgataggtcccgttaatataggtaatccgggcgagtttacgataaagcaattggccgaagaggtgataagccttacctgcagtaaatcaaaaatcatctatcaatcgctgccgtccgacgacccgaaacagagacagcctgatataacgctggccaaagagagattagggtgggagccgaaggtcgggttgaaggatgggcttgtcaagaccattgagtattttaggggggatttggagacgtga

SEQ ID NO: 72122 - protein, 322 aa, Unknown
  Obtained from environmental sample
  DOMAIN (16)...(256): 3-beta hydroxysteroid dehydrogenase/isomerase family
  misc_feature (1)..(322): Xaa is any amino acid
MYMMKGGAVMKTKRILVTGGAGFLGSHLCEKLVGQGHDVICLDNYFTGRKKNVEHLFDRHNFELMRHDVTFPVYVEVDQIYNLACPASPVHYQYNAVKTIKTSVMGAINVLGLAKRVRARVLQASTSEVYGDPNEHPQKESYWGNVNPIGVRSCYDEGKRVAETLFFDYHRMNKVDIRVMRIFNTYGPRMHPNDGRVVSNFIVQALKGNDITIYGDGSQTRSFCYVDDLIDGMIRLMNADDTIGPVNIGNPGEFTIKQLAEEVISLTCSKSKIIYQSLPSDDPKQRQPDITLAKERLGWEPKVGLKDGLVKTIEYFRGDLET

SEQ ID NO: 72123 - DNA, 1032 bp, Unknown
  Obtained from environmental sample
  misc_feature (1)..(1032): n is a, c, g, or t
ttgtttgacaatgggtttcgtaggggcggcgacctgccgcccgtttcgttttataaacagaaaacgttaattaacatgggcaaggacatagacagagacgacatgataatatgtactcttttcaacccggtaatagacgcctcctaccgcgtggacggctttgagctcggcacaacacgcttagacgtcgcgtcgcgcaccgtgcccgccggcaaggggctgaacgtggcgcgggtggtcaagacgctcggcgaggaggcggcggtcgccggactgattcctaagaacgacatgcgccgcttcgagactttcttggacgatcacgggataaaggcgttcctctacgaggctccgggcgttacgcgtgtgaacgtcaccctgcacgacgcccaggcgcagtgcgccacccacatcaacagcgcgtcgccggtgttgcccgtcagcctgcaggaggatttcatgcgctttctggccggacacgcggaggccggcgccagctggtgcttcagcgggagcctgcccagcggcttcgacgacgacgtatacgcccgcttgatacgcgatttcaaagagataggcgtcaactgcctcctcgacacccgcggcatggcgctcaaaaccggcgccagggccgccccgcagatcgtcacgccgaacctgacggagttggaggagttctttcaggaggagatcaaaggtgtgcaccacatagcgttatgcggcaagcggttcatagatatggacgtggagtacgtcttcataaccctgggtcaagacggcgtgatagctatccacgaagagcagtgcctcctctgctccccgccggatataaaaacggtcgataccgtcgggtgcggcgacgctttcgccgccggggtgctggtggcgcaaaaacgccggttcgcgttcgcggagatgtgcaggatggcggtagcgtgcgggtcgtcgaaaagcctgcacgaaggccccggcaccgtcactttggaagaggtttggcagttgatggaaagcgttgaaattacttgtatatga

SEQ ID NO: 72124 - protein, 343 aa, Unknown
  Obtained from environmental sample
  DOMAIN (39)...(331): pfkB family carbohydrate kinase
  misc_feature (1)..(343): Xaa is any amino acid
MFDNGFRRGGDLPPVSFYKQKTLINMGKDIDRDDMIICTLFNPVIDASYRVDGFELGTTRLDVASRTVPAGKGLNVARVVKTLGEEAAVAGLIPKNDMRRFETFLDDHGIKAFLYEAPGVTRVNVTLHDAQAQCATHINSASPVLPVSLQEDFMRFLAGHAEAGASWCFSGSLPSGFDDDVYARLIRDFKEIGVNCLLDTRGMALKTGARAAPQIVTPNLTELEEFFQEEIKGVHHIALCGKRFIDMDVEYVFITLGQDGVIAIHEEQCLLCSPPDIKTVDTVGCGDAFAAGVLVAQKRRFAFAEMCRMAVACGSSKSLHEGPGTVTLEEVWQLMESVEITCI

SEQ ID NO: 72125 - DNA, 1869 bp, Unknown
  Obtained from environmental sample
  misc_feature (1)..(1869): n is a, c, g, or t
atggacgccacaaacgacaacaacgattctttcaccttgcgggtgctgctagtcggcgaagctggcgagggggtgctgagcgccggcggcacgctcatgcaggccgcagccgctctgggcttctcctcggcggtgcacaagaacttcccgcccactatacgcggcggtaagtgcagcgcgcttgttaccgtctcagacggcgaatccgccgagcctttcggtttatacgtggatttcgtcttcgcgctcgacaaggcggcgcttgtagcactcggcgacagcggcatgaacagcgccagcagcggcaatcacgccaacgaaaccatcgattatgaagccatcataagcgcggttaactccggaaacgaaaaagcgggcggcgcgcaatcattcaaaatggattttgacctctgcagccatatacgtacccaccagcaactgaaatcaagtttcgtcttaggggtaatatcggcgatactgggcattccaaacgacctgatcttgggcataataaccgaaaaactcaaggcgaagaatttgaccgagcaaaacaaagagtcattcaggctcggctttgaatccgcggtatccggcatactgccgtccctgcaagcggccgataagcacatccggcgtctcaccccaccgcgcccgccctcggagaatcgcgtcattttggacgggaatctggcggtggcgttgggcgctatcagcgccggctgccgtatctacgcctcctaccctatcacccccgcgacgtcgataggctcctacatggcggagtacctgcccgccttcggggggttcgcgtaccagaccgaagacgaaatgtcggcaatcgggacggtggcgggcgcttggtttttcgacactcccgcaatgaccgccacgagcggcccgggattgtcgcttatgcaggagttcttgggctactgctcaatgacggagaccccggccgtcgtggtcaacgtgcagagggcggggccatccacgggcatgcccacgaagcacagccaggacgacatgatggcggcgatattcggcggtcacggagagggacagcggatcgttttggccgctgccaccatagatgagtgcttccacctaacgatagaagcgttcaacatggcgcggcgcttccgttgcccggttatactcctgacggacagcgcgcttgggaacctgcaggcgacatgcaagcggccggacccctccgttgatatcaacgggtatgccgtaaccgccaccccatcggcgcccagcgaaaacgcggcggccggtatggcgacccgccgcataaccggactggagcacgacatcaaagggatgccgagcagcaccacgaacaaccgcgtccggcaacagtacaagcgcttcagcaagatggataaagttgaggcatactacaactacatgcaaacgatcgacatcggcgacctcaagccgccgctgcctaagtcgcggtttgccgctagaatgatggacaacagccctccggccgacctatgcgtcatctcttggggtttcagcgcggcaatgacgcgtaaagcggtggcctcgctgcgaaggcaaggcctgaaaatcgcgtgcctctacccgcgtctcattttcccgtttataaacggacattacttggaactgcaaaacttttgcccgcgcatagccgtggtggagtcaaactacacgggacaattggcggcgctgatacggatacacaccgggatcaacactatctccgttaagaaatacaacggcgaaccgttcaccccggaggagattgaggcggaactccgcggcataatcgagatggagaagtttatatcggacctcaacaacacaaacaacgacggagcggcgaaaaatgggtga

SEQ ID NO: 72126 - protein, 622 aa, Unknown
  Obtained from environmental sample
  DOMAIN (234)...(457): Pyruvate flavodoxin/ferredoxin oxidoreductase, thiamine diP-binding domain
  misc_feature (1)..(622): Xaa is any amino acid
MDATNDNNDSFTLRVLLVGEAGEGVLSAGGTLMQAAAALGFSSAVHKNFPPTIRGGKCSALVTVSDGESAEPFGLYVDFVFALDKAALVALGDSGMNSASSGNHANETIDYEAIISAVNSGNEKAGGAQSFKMDFDLCSHIRTHQQLKSSFVLGVISAILGIPNDLILGIITEKLKAKNLTEQNKESFRLGFESAVSGILPSLQAADKHIRRLTPPRPPSENRVILDGNLAVALGAISAGCRIYASYPITPATSIGSYMAEYLPAFGGFAYQTEDEMSAIGTVAGAWFFDTPAMTATSGPGLSLMQEFLGYCSMTETPAVVVNVQRAGPSTGMPTKHSQDDMMAAIFGGHGEGQRIVLAAATIDECFHLTIEAFNMARRFRCPVILLTDSALGNLQATCKRPDPSVDINGYAVTATPSAPSENAAAGMATRRITGLEHDIKGMPSSTTNNRVRQQYKRFSKMDKVEAYYNYMQTIDIGDLKPPLPKSRFAARMMDNSPPADLCVISWGFSAAMTRKAVASLRRQGLKIACLYPRLIFPFINGHYLELQNFCPRIAVVESNYTGQLAALIRIHTGINTISVKKYNGEPFTPEEIEAELRGIIEMEKFISDLNNTNNDGAAKNG

SEQ ID NO: 72127 - DNA, 885 bp, Unknown
  Obtained from environmental sample
  misc_feature (1)..(885): n is a, c, g, or t
atgggtgacaatccgcaaaatcgttttttgaacgggcaaacgccctcgtggtgccccggatgcagctacttcaccgtgctctccgccctcactgagtgcttcgacgagcgcggcctcgccgaggacggggtatgcgtggtctccggaataggctgctcctcgcggctgcccctgtttctgagcacgcacggcatgcacaccctgcacggcaggccgctaccggccgccatcggcgcgaggctggcgcgcccggatatcccggtggtcgtggccaccggcgacggcgacctgctgtctatcggcgcggcgcacttcgtccacgccgcaaggaagaatttcgacatcaccgtaatctgcttagacaaccgcatgtacgctatgacgaaaaaccagtcctcccccacgtcgcccatcggatacgacgggtcgctaaccccgtacggcaagctcagcgtacctctcaacataaccgaactcgccatcagcagcggcgcgtccatggtttgcagaagtttcgcttacgataagacgcacgtgaagaatatgataagcgtggccatggaccaccacggcttctcgctagtggagataatagcgccatgccgcacattcggcgagcagcaaacggaaatcaccaaacgactgtacgacttacaggcgaacgggcatcaagtcgacgacagggaacgcgccatgggcttagcggcgcgggtctacgactcggataacgatgagagcgcgggcattccggtcggagtggtatggaaaagggacgatatgctttgctttgacgaccaagtcaagcgggtggtggcggaaagcaagggcagatactcgtcgttcggcgatattcttgacaaactgaagcctgataaaacgctctag

SEQ ID NO: 72128 - protein, 294 aa, Unknown
  Obtained from environmental sample
  DOMAIN (49)...(197): Thiamine pyrophosphate enzyme, C-terminal TPP binding domain
  misc_feature (1)..(294): Xaa is any amino acid
MGDNPQNRFLNGQTPSWCPGCSYFTVLSALTECFDERGLAEDGVCVVSGIGCSSRLPLFLSTHGMHTLHGRPLPAAIGARLARPDIPVVVATGDGDLLSIGAAHFVHAARKNFDITVICLDNRMYAMTKNQSSPTSPIGYDGSLTPYGKLSVPLNITELAISSGASMVCRSFAYDKTHVKNMISVAMDHHGFSLVEIIAPCRTFGEQQTEITKRLYDLQANGHQVDDRERAMGLAARVYDSDNDESAGIPVGVVWKRDDMLCFDDQVKRVVAESKGRYSSFGDILDKLKPDKTL

SEQ ID NO: 72129 - DNA, 435 bp, Unknown
  Obtained from environmental sample
  misc_feature (1)..(435): n is a, c, g, or t
atggacgcgccgctgctgatggcgagttcggttatgttgagaggtacgctgagcttgccgtacggggttagcgacccgtcgtatccgatgggcgacgtgggggaggactggtttttcgtcatagcgtacatgcggttgtctaagcagattacggtgatgtcgaaattcttccttgcggcgtggacgaagtgcgccgcgccgatagacagcaggtcgccgtcgccggtggccacgaccaccgggatatccgggcgcgccagcctcgcgccgatggcggccggtagcggcctgccgtgcagggtgtgcatgccgtgcgtgctcagaaacaggggcagccgcgaggagcagcctattccggagaccacgcataccccgtcctcggcgaggccgcgctcgtcgaagcactcagtgagggcggagagcacggtgaagtag

SEQ ID NO: 72130 - protein, 144 aa, Unknown
  Obtained from environmental sample
  misc_feature (1)..(144): Xaa is any amino acid
MDAPLLMASSVMLRGTLSLPYGVSDPSYPMGDVGEDWFFVIAYMRLSKQITVMSKFFLAAWTKCAAPIDSRSPSPVATTTGISGRASLAPMAAGSGLPCRVCMPCVLRNRGSREEQPIPETTHTPSSARPRSSKHSVRAESTVK

SEQ ID NO: 72131 - DNA, 534 bp, Unknown
  Obtained from environmental sample
  misc_feature (1)..(534): n is a, c, g, or t
gtgaagataaatgaatgtattctggacgacggaaatgattatccggtagacgggtctacgataggcgcgatgatcgcgtcgtccggaaaagagcatctttgggatgagcgggcgggcggtgttgatgccgtcgataccgtcgtcgtccactacatgagcgccgtggccgtcgcgccggacgacccgtacgatctaggcctgcttctgaaaatattctgtgatttcggcgtgagcagccactatttgattactcgcggcggggaaatctacagattagtccccgagggtaagaaggcctggcacgccggaccgagcgtcatgcctgagccggactgccgcgcgggcgtaaacgaattttccatagggatcgaacttgcggccacggagagttccggattcacggaggcccaatacgaggcgctttgcgggctgtgtattgatattgaggagcgtcgtcgcaaaaatggcttacgtgggtcacgatatgatagcgggggagcgggcggtcgctttaggactgcgcaaagagcctaa

SEQ ID NO: 72132 - protein, 177 aa, Unknown
  Obtained from environmental sample
  DOMAIN (34)...(175): N-acetylmuramoyl-L-alanine amidase
  misc_feature (1)..(177): Xaa is any amino acid
MKINECILDDGNDYPVDGSTIGAMIASSGKEHLWDERAGGVDAVDTVVVHYMSAVAVAPDDPYDLGLLLKIFCDFGVSSHYLITRGGEIYRLVPEGKKAWHAGPSVMPEPDCRAGVNEFSIGIELAATESSGFTEAQYEALCGLCIDIEERRRKNGLRGSRYDSGGAGGRFRTAQRA

SEQ ID NO: 72133 - DNA, 1140 bp, Unknown
  Obtained from environmental sample
  misc_feature (1)..(1140): n is a, c, g, or t
atggcgctcaattcaaaatcaaatatcgtaatcaccgtccccgacggactgtgcccgttcctgaagagcgaggtagagtccttgggtttgcccgtaacctctgtaacgcccacgagcctctcaaccgaaggcacgtccgccgaagcgatgctgctcaatttgcacatccgcaccggacaccacgtgctctttcagatagccgcgttccgctgccgcgacgcggacgagctttacaaggagctttctaagatactgtgggagacgatcatcccgtcggacgagtatctctccgtggtctcgaacgtccgcaacccgaccatccgcgacgcccgctttgccaacgtgcgctgcaaggacgcgatagtggaccgcattcaggctcgcaagggccgccgccccgactccggcccggagcagaacggggcggtcgtcagcctctattggcgcgacgatcgctgcacggtctacttagacacctccggcgagccgctgtctcggcgcggctaccgacgcatacccttaggcgccccgatgcaggagacgctcgcggcgggcgtcgtcatggcctcggaattgaaaaacggcgacagctttgtcaacnccatgtgcggcagcgggactatggccatagaagcggcgctggcgcttagcggcagggtgcccgggcttacaaggccaaacttcggcttcatgcacctcttggggttcgacctgagggcgtgggaggagatgaaaaccgcggcaaagggcaaggtgttgaaaaccgtacagtcgcagattatcgcctccgataataatgaaaaggccatagaagcggcccgcaaaaacgcggcgaccgcaggggtggagcggctgatacgctttgaggtatgcgactacgccgacacgcccgtaccgccgccccccggcgcggcgatactgaatccggcctacgggatgaggctgggggacgacaaggcgctcatagagacctaccgaggcataggcgccttcttcaagcagaagtgcaagggctatcggggaggggtattcacggcaaataccggtctggccgggcaggtcggtctgaaagccaagcggaagataccgtttgtcaacgggaagattgagtgcaggctctatgtgtatgacttgtattga

SEQ ID NO: 72134 - protein, 379 aa, Unknown
  Obtained from environmental sample
  DOMAIN (167)...(375): Putative RNA methylase family UPF0020
  misc_feature (1)..(379): Xaa is any amino acid
MALNSKSNIVITVPDGLCPFLKSEVESLGLPVTSVTPTSLSTEGTSAEAMLLNLHIRTGHHVLFQIAAFRCRDADELYKELSKILWETIIPSDEYLSVVSNVRNPTIRDARFANVRCKDAIVDRIQARKGRRPDSGPEQNGAVVSLYWRDDRCTVYLDTSGEPLSRRGYRRIPLGAPMQETLAAGVVMASELKNGDSFVNXMCGSGTMAIEAALALSGRVPGLTRPNFGFMHLLGFDLRAWEEMKTAAKGKVLKTVQSQIIASDNNEKAIEAARKNAATAGVERLIRFEVCDYADTPVPPPPGAAILNPAYGMRLGDDKALIETYRGIGAFFKQKCKGYRGGVFTANTGLAGQVGLKAKRKIPFVNGKIECRLYVYDLY

SEQ ID NO: 72135 - DNA, 834 bp, Unknown
  Obtained from environmental sample
  misc_feature (1)..(834): n is a, c, g, or t
atggcgattgatactctgaaagagatgttttcatacgcgtttcttgtccgcgccgtggtcgtgggtctgctcgtgtcgctatgcgccgcgttgctcggggtcagcctagtcttgaagcgatactcgatgatcggcgacggtctctcccacgtcggcttcggcgcgttggcaatcgccaccgcgctccacaccgcgccgcttgtcgtgtcgattcccatagttgtattggcggcgtttctgcttctgcgtataagcgaaaacagcaaaatcaaaggcgacgccgcgatagcgttgatatccacgagttcgctcgccgtaggcgtattggtagtatcgctcacaactggaatgaacacggatgtctgcaactatatgttcggcagtattcttgtaatgagtcataacgatgtaatactatctataatcctagcggcaatagtgttgacgatgttcgtcttcttctacaacaagatattcgccgtaacattcgacgagaatttcgccaaagccaccggagttaaaaccggtctgtacaatatgatgatcgctttcctcaccgcgattaccatcgtattggggatgaggatgatgggggcgctgttgatctccagtttgatcatctttccggcgctaacgtcaatgcggctatgcaagaaattcaaaagcgtaacgatatgctcggcgatagtatcggtaacctgcttttttacgggcgtggtaatatcatacgtaaaggcgacgccgacgggggcgagtgtggtgatagtaaacatcattgcgtttgtgattttctggtcgataaatattttaaaaaaacggaaaacggttcgttaa

SEQ ID NO: 72136 - protein, 277 aa, Unknown
  Obtained from environmental sample
  DOMAIN (11)...(267): ABC 3 transport family
  misc_feature (1)..(277): Xaa is any amino acid
MAIDTLKEMFSYAFLVRAVVVGLLVSLCAALLGVSLVLKRYSMIGDGLSHVGFGALAIATALHTAPLVVSIPIVVLAAFLLLRISENSKIKGDAAIALISTSSLAVGVLVVSLTTGMNTDVCNYMFGSILVMSHNDVILSIILAAIVLTMFVFFYNKIFAVTFDENFAKATGVKTGLYNMMIAFLTAITIVLGMRMMGALLISSLIIFPALTSMRLCKKFKSVTICSAIVSVTCFFTGVVISYVKATPTGASVVIVNIIAFVIFWSINILKKRKTVR

SEQ ID NO: 72137 - DNA, 711 bp, Unknown
  Obtained from environmental sample
  misc_feature (1)..(711): n is a, c, g, or t
atggcccttataacctgtcatgacgcttcatttgcctacgacggcgccgccgccgtaggcgccttgaacttcaccgtcagcggcggcgactacttgtgcgtcgtcggggagaacggctctggcaagagcacgcttgtcaagggcgttctcgggcttgtgtccccgtgcggcggcagcgttgtgacgggcgacgggctgaaacggaacgagattggctacctgccgcagcagacggcggttcagaaggatttccccgccggcgtctatgaggtcgtgctctcgggacggctcgcatcgcgggggatcctgcctttctattcgcacgccgacaaagcggccgccgatgagaacatccgtcgcttgaatatagaatcgttgcgtaaccgctgttaccgcgagttgtccggcgggcagcagcagcgaacgcttttggcgcgggctctttgcgccacgaaaaaattgttgctgctcgacgaaccggtagccgggctcgaccctatcgccacgcaggaactctaccgccttatcgcgtctgtcaacaaggacgggttgacggtgattatggtctcccacgacatccgcagcgccgtgacgtacgcgagccatattctgcatctgaataggacgcaggtatttttcggcgcgacggaggagtatctgcgcagcgacgtaggcaaatcttttgtaggggggcggcgcgatggcgattga

SEQ ID NO: 72138 - protein, 236 aa, Unknown
  Obtained from environmental sample
  DOMAIN (29)...(209): ABC transporter
  misc_feature (1)..(236): Xaa is any amino acid
MALITCHDASFAYDGAAAVGALNFTVSGGDYLCVVGENGSGKSTLVKGVLGLVSPCGGSVVTGDGLKRNEIGYLPQQTAVQKDFPAGVYEVVLSGRLASRGILPFYSHADKAAADENIRRLNIESLRNRCYRELSGGQQQRTLLARALCATKKLLLLDEPVAGLDPIATQELYRLIASVNKDGLTVIMVSHDIRSAVTYASHILHLNRTQVFFGATEEYLRSDVGKSFVGGRRDGD

SEQ ID NO: 72139 - DNA, 972 bp, Unknown
  Obtained from environmental sample
  misc_feature (1)..(972): n is a, c, g, or t
atgaaaaagtatataaatcatctactattaccaatcatcgcaaccgtactaatgttcatcggttgcggcaagagcaacaaaccaaccgacgcggttgccggcaatgccaaaatcagcattgtaacaaccatcttccccccctacgacttcgcccgagccatagcgggcggcaaagccgaactcataatgctcctcccgcccggctccgaatcgcactccttcgaaccgcgcccgcaggacatcatcaaaatccaaaagagcggcgtgttcatccacgtgggcggcgaatccgacgcatgggtgaaagacatcctcaagtcgatagactcgcctaagatgaaggtcataaccatgatggactgcgtggagaccgtagaggaggagatagtcgatggtatgcaatccgaagaggagaaggataaagagggcggcgaggacgggccggagtacgacgagcacgtttggacgtcgccgcgtaacgcgaaattgatagtgcaaaaaatttcggagacgctcatcgaggtcgatccgtcaaacgccgaaacatatcggcagagcacgtcggcgtacctctccgaactcgacgctttggacgcgaagtttaagggcgtggttgacagcgccgcccgtaagacgctcgtgttcggcgaccgcttcccgttccgctatttcgcggacgcctacgggctgaagtatttcgcggcgttccccgggtgcgcgaccgaaacggaagcgagcgcaaaaacagtcgcttttctgattgaaaaggtaaaaaaggagaagattccggtcgtcttctacattgagttttccaatgagaagatggcgcgcgccataggcgaggcgaccggcgcgaatgtgcgtttgcttcacgcctgccataacgtcactaaggcggactttgagtccggcaagacctacatgggtttcatgaccgccaacgtggacgcgttacgggaggcgttgaggtaa

SEQ ID NO: 72140 - protein, 323 aa, Unknown
  Obtained from environmental sample
  SIGNAL (1)...(26)
  DOMAIN (12)...(323): Periplasmic solute binding protein family
  misc_feature (1)..(323): Xaa is any amino acid
MKKYINHLLLPIIATVLMFIGCGKSNKPTDAVAGNAKISIVTTIFPPYDFARAIAGGKAELIMLLPPGSESHSFEPRPQDIIKIQKSGVFIHVGGESDAWVKDILKSIDSPKMKVITMMDCVETVEEEIVDGMQSEEEKDKEGGEDGPEYDEHVWTSPRNAKLIVQKISETLIEVDPSNAETYRQSTSAYLSELDALDAKFKGVVDSAARKTLVFGDRFPFRYFADAYGLKYFAAFPGCATETEASAKTVAFLIEKVKKEKIPVVFYIEFSNEKMARAIGEATGANVRLLHACHNVTKADFESGKTYMGFMTANVDALREALR

SEQ ID NO: 72141 - DNA, 1902 bp, Unknown
  Obtained from environmental sample
  misc_feature (1)..(1902): n is a, c, g, or t
gtgattgcgtttgaaagcgtctccaagcagtacggcgatacggtgctgtttgacggggcgacgttcggcataaacgaggggcaccgcacggcgctcattggccccaacggggccggcaagactaccttattgcggctgataatgggggtcgagcagcccgacggcgggtcgctcaatatgcccggggcgcttaccgttggctggttgccgcaggaggtggagacgctctccgaggcaacgccgcttgataccgtgctcgagccgttcaaacacctattgcgctacgaggagcgtttgggtgaggcggcggcggcgataagcggcggcgaccggcgtgcgcttgagaaactcgacgaacttgaacgcgagatgcacgcaaacgacgggttctcccttacttcccgggcggagatgattctcgacggcttgggcgtaccgcgagaatcctgggacaggccgctgcgggagctttcgggcggctttcgcatgagagcggtcttggggcggctgctcctccaaaacccgggcttcatgctgctcgacgaacccaccaaccacttggacatggactccctaatctggctggagcgttttctagcgtcttacaagggcgggatgcttatcgtcagccacgaccgcgacttcctcaaccggatgtgtacgcatacggccgacgtccgcaaccgtagcgtccgcgtctacaacggcaattacgacaaatacctcgtcgcgaaggcggaggaagccgccgccgcggagacgcgcaccaaaaacctcgagtccaagatcgccagcgcggaacgcttcgttgaacgcttcaaggctaaggcgaccaaggccgcccaagcgcagtccaaagccaagatggtggagagcttgaaagcggagctgcccataatagagtcggaacagaagacggtcagcttcaaatttacctgctcacgcgaatccggagtcgcgccgctatgcctaaaacgttgctccgccggatacggagacaaggttgtgctcaacaatatagacttggagatacatcgaggcgacaaagccgccatcgtcggccccaacggtgcgggaaaatcgacgctgttaaagctattggccggaacgattaagcccgttaacggggagatgatactggggcacaatgcggagctgcgctacttcgggcagcaccaactggaacaactcgacggcgaggcgacgctgtacgacacggtggcggcgcactcggcaagcagcgacagaaactacatacggaacgccctaggcgcctttttgttcagcggatcggccgttgacaaacaggtaaaagcgctgtctggaggagaaaaatcgcgattggcgctggccactatattagcgagccccgggaacgtcttattattggacgaaccgacgaaccacttagatatcgcgtcgatagagatgctgtcggaatcgatggcctcttacgccggaacgatactgttcgtctcccacgacgagtacttcatatcgcgcttagccacccgcataatagaggtaaggccaatgcgcctgagagattttcccggaaatttagcggattatagatattacgttgacaagctattcaaggaacaaggcgacgacgacacggcaagcaaaaagggcaaatccgcgccgccgggtatcattgacgagaaagaagtcagaatcagggagcgagaagagaggaaaaagagagagcgtgaggcgtcaaaactagaacaagagatcgcgaagaaagaggcgcaaatagcggaacaagaatcaatactgaacgacccgaataacgtgttgaactacgaactgctgcactcaacgtcggtggctatcggcgcgttaaagaaggatctggacggattgatggagagatgggtggaagcggggtcttgttga

SEQ ID NO: 72142 - protein, 633 aa, Unknown
  Obtained from environmental sample
  DOMAIN (336)...(515): RecF/RecN/SMC N terminal domain
  misc_feature (1)..(633): Xaa is any amino acid
MIAFESVSKQYGDTVLFDGATFGINEGHRTALIGPNGAGKTTLLRLIMGVEQPDGGSLNMPGALTVGWLPQEVETLSEATPLDTVLEPFKHLLRYEERLGEAAAAISGGDRRALEKLDELEREMHANDGFSLTSRAEMILDGLGVPRESWDRPLRELSGGFRMRAVLGRLLLQNPGFMLLDEPTNHLDMDSLIWLERFLASYKGGMLIVSHDRDFLNRMCTHTADVRNRSVRVYNGNYDKYLVAKAEEAAAAETRTKNLESKIASAERFVERFKAKATKAAQAQSKAKMVESLKAELPIIESEQKTVSFKFTCSRESGVAPLCLKRCSAGYGDKVVLNNIDLEIHRGDKAAIVGPNGAGKSTLLKLLAGTIKPVNGEMILGHNAELRYFGQHQLEQLDGEATLYDTVAAHSASSDRNYIRNALGAFLFSGSAVDKQVKALSGGEKSRLALATILASPGNVLLLDEPTNHLDIASIEMLSESMASYAGTILFVSHDEYFISRLATRIIEVRPMRLRDFPGNLADYRYYVDKLFKEQGDDDTASKKGKSAPPGIIDEKEVRIREREERKKREREASKLEQEIAKKEAQIAEQESILNDPNNVLNYELLHSTSVAIGALKKDLDGLMERWVEAGSC

SEQ ID NO: 72143 - DNA, 3318 bp, Unknown
  Obtained from environmental sample
  misc_feature (1)..(3318): n is a, c, g, or t
atgcgattcatttataaatacttattcttatcggcattagtattaatactaatcgtccccaccctacgcgccgaagacaccgtctctattttcgctccggccaccttctttctacacgaaaagcaaagcgtcaaatcaatagacagcctgtccgcccgattcacccaatccgccgacatcgattctctatcgacaaaatccaaaagtccgccatctaacggcgacgaccggagcaatctctccatctccggttacaagtccttcggcgtctccataggcgaattgggcgaagtcaacctagagcaaggactggaagcgttgatagagggcgagatacgcccgggcacaacgcttcgcgcgcaactcagcgatcagggttcgcagcttgaggggtctacccgtgagataagcgacattgacatgatgtttatcgagttgacaaataagagatttacagttaccgccggcgaccagttcgccaaatggccgctgggcggggtgctctccggtgaaaagaaaatcgtgggaatatcggcgtccgttacgcccgcagccgacgaacggctgacgctgaacgcctttgggtcgttttccggcgggaatcatacggtacagaccgtgagaggccgcgaaggggtgcaggggccctactacatgacgggaaacggcgaggccggcatcataacgccggtttccggaacggtgcgggtacgcttaggcgccaaggagatgatcgaggggatcgacgcggactacaccgtagactacgatatcggttcgataatgttcgggcctcgcgttctcatcggtcaagacgattttatacggatggagtacgagtacaagtcttttgactaccgccgcatcttcgccggcggcggagcgacgtttcacgccggagacagcgtactgtccgttgagggggttgtttggagcgaaagcgacgacaaagacagccccatcgagatgcagctcagcgagaacgacaaagagatactgaggaacagcggaaacaaaccggcctacctatcgtccacagcaagacccgtgcacccgttggacgtggctaagacgagcgtcttctatccgttgtataaaaaagcgtatgatgattcggcgtcagacagcgtactggtctacgccccctacgacccgctgaggccggaggacatttacggattccacaccgccctgttcacgccgataaaacgcggcgagacgggcgccgattacgttattgacacaaccgttgacagagggcagtttgtctacaaatacgtcggggcgggtcaaggcgatcacacggcgctcgctccggtcgccgcgccgaggagagagtcagcaacggagataatcgctagattgaagatgcggaacgttaaggcgtctctcaaccttgtcgggaaggaggttgacgaaaatctcttttctgagatcgacgacggcggcaacctctccgcggcggcgatgttcaagctggacttcggcgagcggcagcttgacaaacgcggtatttggagcggcattgattatagatataggtcgcggcaattcaccggagaggttttctccgccgacgagcggaagagccgctgggacgtcgacggaaccggcaacgcggatattggaaataatggaggcaatatcgttgacgaatccgtcggtcactattttcacagcattgaatcgacgattggcgggacactcgtcaaaggcgcggcggtgagccttacggcggggcaaacgtacattgactcaacggtggagaccgagagggcaaacatcgacgcggaggcgcgttttatacgagacaagctgcttttgaacgccggcgcggcgctcttcagacaccatctttcggatatcgatatcagctatagacgctacggcaaaataacggctaaaccgtcgccgccgtgggaagccgccgttgactatagggacgagtggcgaaccgacaccgcaggacacggcggcggacggatctccggcacggcggaactcgcctatctgccggcgcaactgcggcaaagcgccaacttcacccaatacagaaagggcggcaattttcccgggtcggtcgataccggctacgcttttacatgggatcagtccgtcgcctttaatccgcttgacaagtggaaattgaacggcgacgccaaatggcggcacacggcaatcaatggggagagcggcgcgtcaaccttcctgatgtcggcggcaagcgatatagagccgacaaaaggcggattctcgtcacgccaagagtaccgcgtcaaccaagagttaacctcacgcttcgaacaaaaaatgtactacatcggcaaaggattggggacacacgccttcgattctacggcgggtgaattccgccctagcgtaaacggggactacatcatccaagaggtggagatatacgacaacacgtcgctgtctacggtacgtaaaacacagttaaacgccgattggtactaccgcccgacaaaaaagattcgcggcgttttgggcgacttgtcttggagcggagtgttgtcgttagaggagcatgtcgattcgagaaacggtaatatcaaatcatatataccaggattaatgtcgctcttttcggaagaggatatgaacggatcttcgttaccgcagtaccccggctacgccgacctgtcgtaccgtcaggacatagagcataaaatccaaaacagtatatatagatcaaggctctatatactgccgggaatgcgaataatccgctcgtataaagaacctgtttttgagaccggattgttagtagagagaaagaagaaccgtttgctactgagcgtagaaccgcgttacttgacggtcaagagggaatatctgtcaggatcgcaggagggacagcgcggtaattttgatttgggcgatatcggcgcagaattagtccaaagcatcggtcaaggggagaagttcgaattttacatccgcgaaaggtgcgggatagtctatgagaacgacaaaaaccgcgtcatccccccgccgtcggacagcgccgtctatatacagataaagcccggaatagtctaccgccctacaaagagcggtttcgcggagctatcctacaccgtgtcccacgtcccgcagggcggcgaactggactacagaacagccggcggccagcaacgcggcacatcgcacatcatcacatgcgtcagcgacgtggacgccggcaagcattttaatctgtcggggatgtataggggggagttgacgaggaatccggaggaaaagatcttcgcgccgatgcgccacgtgttttcgtttcaggtcaaggcgtttttgtga

SEQ ID NO: 72144 - protein, 1105 aa, Unknown
  Obtained from environmental sample
  SIGNAL (1)...(24)
  misc_feature (1)..(1105): Xaa is any amino acid
MRFIYKYLFLSALVLILIVPTLRAEDTVSIFAPATFFLHEKQSVKSIDSLSARFTQSADIDSLSTKSKSPPSNGDDRSNLSISGYKSFGVSIGELGEVNLEQGLEALIEGEIRPGTTLRAQLSDQGSQLEGSTREISDIDMMFIELTNKRFTVTAGDQFAKWPLGGVLSGEKKIVGISASVTPAADERLTLNAFGSFSGGNHTVQTVRGREGVQGPYYMTGNGEAGIITPVSGTVRVRLGAKEMIEGIDADYTVDYDIGSIMFGPRVLIGQDDFIRMEYEYKSFDYRRIFAGGGATFHAGDSVLSVEGVVWSESDDKDSPIEMQLSENDKEILRNSGNKPAYLSSTARPVHPLDVAKTSVFYPLYKKAYDDSASDSVLVYAPYDPLRPEDIYGFHTALFTPIKRGETGADYVIDTTVDRGQFVYKYVGAGQGDHTALAPVAAPRRESATEIIARLKMRNVKASLNLVGKEVDENLFSEIDDGGNLSAAAMFKLDFGERQLDKRGIWSGIDYRYRSRQFTGEVFSADERKSRWDVDGTGNADIGNNGGNIVDESVGHYFHSIESTIGGTLVKGAAVSLTAGQTYIDSTVETERANIDAEARFIRDKLLLNAGAALFRHHLSDIDISYRRYGKITAKPSPPWEAAVDYRDEWRTDTAGHGGGRISGTAELAYLPAQLRQSANFTQYRKGGNFPGSVDTGYAFTWDQSVAFNPLDKWKLNGDAKWRHTAINGESGASTFLMSAASDIEPTKGGFSSRQEYRVNQELTSRFEQKMYYIGKGLGTHAFDSTAGEFRPSVNGDYIIQEVEIYDNTSLSTVRKTQLNADWYYRPTKKIRGVLGDLSWSGVLSLEEHVDSRNGNIKSYIPGLMSLFSEEDMNGSSLPQYPGYADLSYRQDIEHKIQNSIYRSRLYILPGMRIIRSYKEPVFETGLLVERKKNRLLLSVEPRYLTVKREYLSGSQEGQRGNFDLGDIGAELVQSIGQGEKFEFYIRERCGIVYENDKNRVIPPPSDSAVYIQIKPGIVYRPTKSGFAELSYTVSHVPQGGELDYRTAGGQQRGTSHIITCVSDVDAGKHFNLSGMYRGELTRNPEEKIFAPMRHVFSFQVKAFL

SEQ ID NO: 72145 - DNA, 1086 bp, Unknown
  Obtained from environmental sample
  misc_feature (1)..(1086): n is a, c, g, or t
atgccaaggcttttcgatctactgtccgacgacgccaagaaggggctcgccgccgaggccaagaagggcgccggcgggggtaagggcgcgcggggagcgccgtccgaacaccgccaacgaaccaatacggcgcgtgtacctacggataaccgtccccgcacggatagaaacgtctcggccggcgataatcatcataccgtaaaaagagacgcgccgcctaaaaacgatcctccacacgtcaaaaatgtcagcccggcccccaaagtcatggacatccccgacttcgtcgcgctcgatgtggagactacgggactcgacttcaagcacgatcgggtgattgaggtgggcgcggtccgttttttgaacggcaagcctgaggccgaattttccacctttgttaacgccggcgtccccatacccgaccacatcacgcggttgacgcatataaccgacgacgacatacggccggcgccgcgtttcagcgatatcgccatacagttgctcgagttcatcgggacgctgccgctctgcggccaccagacggactttgacctgacgtttgtgaacgaggagttaaagcgggcgggatttccggagacctcgccgcaaatcatagacacggcgctcctgtcgcggatattgttgcagcacgtgggccggtattcgcttaaacacgcttgcgactctctctccgtaacgctcaacaacgcgcaccgcgccttgcacgacgccaaggcgtccggggagcttgcggtgcggcttattcccaagctctgcgaactgccgcttgccgtgcgtcaagccttggcggctttcgcgccggggtcgatgttcaaaacgcttgccataaggagcctcttcggcgcacgttacggcgtaaacttggcggcgggagaagcgttaccgggcgatttgcagcgtgtcggcgcgccggaagagatcgttccgattgacacatcggaaatagagagcctcttttcagacgagagcaagaccgggcgcgtaatagcgggtttccgcgctcggagcgcccagcaggaaatggcgctccgcgttactcacgctctgaacgaacgggggatttag

SEQ ID NO: 72146 - protein, 361 aa, Unknown
  Obtained from environmental sample
  DOMAIN (95)...(251): Exonuclease
  misc_feature (1)..(361): Xaa is any amino acid
MPRLFDLLSDDAKKGLAAEAKKGAGGGKGARGAPSEHRQRTNTARVPTDNRPRTDRNVSAGDNHHTVKRDAPPKNDPPHVKNVSPAPKVMDIPDFVALDVETTGLDFKHDRVIEVGAVRFLNGKPEAEFSTFVNAGVPIPDHITRLTHITDDDIRPAPRFSDIAIQLLEFIGTLPLCGHQTDFDLTFVNEELKRAGFPETSPQIIDTALLSRILLQHVGRYSLKHACDSLSVTLNNAHRALHDAKASGELAVRLIPKLCELPLAVRQALAAFAPGSMFKTLAIRSLFGARYGVNLAAGEALPGDLQRVGAPEEIVPIDTSEIESLFSDESKTGRVIAGFRARSAQQEMALRVTHALNERGI

SEQ ID NO: 72147 - DNA, 1716 bp, Unknown
  Obtained from environmental sample
  misc_feature (1)..(1716): n is a, c, g, or t
atgattaacgaaaacaacgccgatacaaaaactgattcttcgggaacggattttatcagtgaatttataaaagaagatttagcggcaaaaaaatacacttatgtgcatacgcgcttcccgccggaacctaacggctggctgcacatcggtcactgcaaggcgttttatatcgactttagcatggctgaacgctttggcggaaaatgcaacctgcgctttgacgataccaaccccgaaaaagaagacatctcctacgttgaggcaatcaagcgcgatattaaatggatgggctacgattgggaagaccgcgaatattacgcttccgattactacgagtacctttatgaactggcgataaaaatcatcaaaaagggaaaagcttatgttgacgatttaaccgataccgaaatgagcgagtaccgtggtacagcggtcgccgataaaaataatatcaccataacgccgccgggtaaaaacagcccttacagggatcgttctatcgaagaaaatcttgatctctttgcgcggatgcgcgcgggcgaattcgccgacggcgcaaaaaccttgcgcgcgaaaatcgatatgactcaccctaacctgctcctgcgcgatcctgtcatgtaccgtatacgccgtgaaactcattaccgcacaggcaattcatggtgtatctatcccatgtatgattttcagcacccgctttccgacgcaaaagagggtatcacccactctctctgctcgcttgaatacgaaatacaccgccccttgtacgaatggtttattcaggaggcggaagtttttccttcgcgccagattgaatttgcccgtcttaatttgagccataccgttatgagcaaacgctggcttttaaaacttgtgcaggacaaatatgtttcaggctgggacgatccgcgaatgcccacaatagcggggcttcgcagacgaggttacactcccgaagctatccgtagttttgtttcgcagatcggcatagcaaaaacggacagcatggtagacatcgcttttcttgagtactgcttgcgcgaagatttaaacaaacgcgctccgcgtgtaatggcagtcctgcgccctctcaagctaatcatagaaaattgggacgaggtcaagaccgatgaaatggaagcggtaaataaccccgaagacgagggcgcgggaaaacgtcatgtgccattctcccgcgaattgtggattgagcgcgaagattttgaagaagtcccgccgcctaaatatttccgtcttttccccggaaactccgtccgcctgcgttacgcgtacattgttacatgcacaggctttgacaaagacgcaaacggcaatattacagccgtgcgctgcacctacgaccccgaaacaagaggcggtaacgctcaagacaacaaaaaagtaaaaggtacgatacattgggtttccgcggcgcattcagtccccatacaagcccgtatttacgattacttgttcggcgcagaaaagcctatggaagttcctaaccgcgcggacggctctcccggcgaatttaccgataacttaaatcccaattcgctggaagtgattgaaaacgcgcagggagaaccgttactcgcaaatgtttcgccgggcaaagtttttcaatttgaacgcatgggctattttgtccgcgatcccgacatttccgctaacgggaaacctattttaacaaaacaactcggccgaatctga

SEQ ID NO: 72148 - protein, 571 aa, Unknown
  Obtained from environmental sample
  DOMAIN (355)...(553): tRNA synthetases class I (E and Q), anti-codon binding domain
  misc_feature (1)..(571): Xaa is any amino acid
MINENNADTKTDSSGTDFISEFIKEDLAAKKYTYVHTRFPPEPNGWLHIGHCKAFYIDFSMAERFGGKCNLRFDDTNPEKEDISYVEAIKRDIKWMGYDWEDREYYASDYYEYLYELAIKIIKKGKAYVDDLTDTEMSEYRGTAVADKNNITITPPGKNSPYRDRSIEENLDLFARMRAGEFADGAKTLRAKIDMTHPNLLLRDPVMYRIRRETHYRTGNSWCIYPMYDFQHPLSDAKEGITHSLCSLEYEIHRPLYEWFIQEAEVFPSRQIEFARLNLSHTVMSKRWLLKLVQDKYVSGWDDPRMPTIAGLRRRGYTPEAIRSFVSQIGIAKTDSMVDIAFLEYCLREDLNKRAPRVMAVLRPLKLIIENWDEVKTDEMEAVNNPEDEGAGKRHVPFSRELWIEREDFEEVPPPKYFRLFPGNSVRLRYAYIVTCTGFDKDANGNITAVRCTYDPETRGGNAQDNKKVKGTIHWVSAAHSVPIQARIYDYLFGAEKPMEVPNRADGSPGEFTDNLNPNSLEVIENAQGEPLLANVSPGKVFQFERMGYFVRDPDISANGKPILTKQLGRI

SEQ ID NO: 72149 - DNA, 585 bp, Unknown
  Obtained from environmental sample
  misc_feature (1)..(585): n is a, c, g, or t
atgtatcatggaaatatgtctgcaagttcttctcttcccggcgaataccgtaaaacggctgaacgcctgtttttaaaagacggtttttccaaagggcaaaaacccgatataaaagccgccggagaatttgccaaatctcttggcatcggcgttgagtatcagcgtttgttcgctcttgaaacaaacagcggagaattaagaacttttttggatcagtttcaaaataatttggctttgttaataaaaaaaacatgggtggaagaagccgatgaaatccgcaaaggaaaattacacgacgacattccgtcttttatgaaaactatcgagcagccgaattacttaaaggcaatagaagaattcagcgtggttcttgatgagttagcttatctttttttcggcaaacaaagcgaaaaagaagattttgccgaatacaccttccgtattgacgcgcaaatgggtcttttctggtggtacggaagcagactaactttattaaaagaattgaaagataaaaatattgaccaaaacgacaaatgcttatgggcggttttacttcttggtctgtgttatctgacaaatttttaa

SEQ ID NO: 72150 - protein, 194 aa, Unknown
  Obtained from environmental sample
  misc_feature (1)..(194): Xaa is any amino acid
MYHGNMSASSSLPGEYRKTAERLFLKDGFSKGQKPDIKAAGEFAKSLGIGVEYQRLFALETNSGELRTFLDQFQNNLALLIKKTWVEEADEIRKGKLHDDIPSFMKTIEQPNYLKAIEEFSVVLDELAYLFFGKQSEKEDFAEYTFRIDAQMGLFWWYGSRLTLLKELKDKNIDQNDKCLWAVLLLGLCYLTNF

SEQ ID NO: 72151 - DNA, 552 bp, Unknown
  Obtained from environmental sample
  misc_feature (1)..(552): n is a, c, g, or t
atgtttaatttttgcccgtcatgcgcttcaaaaaaaatcacctttaacgaggggaaatttttccgctgtcccgactgcggtcttgtttattatcacaatgtcgccgccgcgacaggctgtattatcattgtgccggacggcgattcggagcggcttgtatttcttgtccgcggcaaagagccgggtataggcaagctcgatcttcccggcggctttgtcgatcccggcgagggcgttcttgacggactctaccgcgaattacgggaagaaattaattggacgccgcaaattccaagcggcgtaaaattatccgacgtttttaaattatttgcatctttctcaaatgtgtacaaatacaagggcatagattacaacacatgcgatatgtatttttccatacgcgccccgggtctaaaacctgaagacctgcgccggcaggaaaatgaaattacggatattctattcttaaaacccgatgaaattgatttttcccgcttcgcttttccttccaccgtgaaggctgtaaaaacgtatctcaacatccttgactaa

SEQ ID NO: 72152 - protein, 183 aa, Unknown
  Obtained from environmental sample
  DOMAIN (34)...(181): NUDIX domain
  misc_feature (1)..(183): Xaa is any amino acid
MFNFCPSCASKKITFNEGKFFRCPDCGLVYYHNVAAATGCIIIVPDGDSERLVFLVRGKEPGIGKLDLPGGFVDPGEGVLDGLYRELREEINWTPQIPSGVKLSDVFKLFASFSNVYKYKGIDYNTCDMYFSIRAPGLKPEDLRRQENEITDILFLKPDEIDFSRFAFPSTVKAVKTYLNILD

SEQ ID NO: 72153 - DNA, 396 bp, Unknown
  Obtained from environmental sample
  misc_feature (1)..(396): n is a, c, g, or t
atgaaaacagaatgttcattacgggtaagaagctatgaatgcgacggctacaaccatgtgaataacgcaaactatcttaattatcttgaatacgggcgttatgaatttcttaaagatattggttttgactttgttaaagcgacaaaagccggttacggcgtttacattgcccgaatagaaattgattacaaaagacccgcgtttaccgacgacacattgattattaaatcgcgtcctgtaaaacaaggcgcggtaagcggcgttatcgcgcaggaaatttggcggggcgaagatttattgattgaggcaaaagttacatgggcgtttgtcgattcaaaaggcgctccgacaaaaatcccgccggagtttgatgtgccgggacttaaaccggattga

SEQ ID NO: 72154 - protein, 131 aa, Unknown
  Obtained from environmental sample
  DOMAIN (17)...(102): Thioesterase superfamily
  misc_feature (1)..(131): Xaa is any amino acid
MKTECSLRVRSYECDGYNHVNNANYLNYLEYGRYEFLKDIGFDFVKATKAGYGVYIARIEIDYKRPAFTDDTLIIKSRPVKQGAVSGVIAQEIWRGEDLLIEAKVTWAFVDSKGAPTKIPPEFDVPGLKPD

SEQ ID NO: 72155 - DNA, 954 bp, Unknown
  Obtained from environmental sample
  misc_feature (1)..(954): n is a, c, g, or t
atgaaaaaattatgtttctttattttttctgccgtactgatttttaatctgtcagctaaagaacatgatttttctgtaggcgcttcttttggctttttgaacggtcgggcgcaagaaatagtatatagaaataatatatcagaagataaattaagcgaactgctctggaactttaacgctctgccctacattgggctggatataaagtattcatggttaaaaccgggaaacgcttgggggctttttgcaaacggctcattcaagtttggatttccgggcggagccgatgtaatggaagatcgggactggataattttgaactatccgaattggttaacgcattattccgtacatgataacaggacagattccgcaaaaataatagattttaatttgggagcgtcttttttaattagaaaatttttgctaaaagcatatatttcttatcattatatgtatttttcatggaccgcaagcggcggttcaatattatacccttcatgggatattgacggagacggtaaacctgatggagatcacttaccgctttatgctctttatgaaggaccggttggaaagtatgaacagacttggcatattttttctcctgcaatttctttttatggagaatttaaccgtttttttgacattgaaattgcgttggcaataacgccgtttatatggtgcaacgctgtagatcaacatcttcttcgcgatttggtaattactgacacactggaaggagggctcttcattgaaccaagttttcttttttcatataaaccttcgaagcattttgcactatccctttcattcgattatagagacataaaaaaagctcgcggcgatgcacattacaaatatgccgtaggacggtctcttactgaaaagaaattaagcggagggggatttaccttgtttgatattggcattatcgcaaaatacaaactatag

SEQ ID NO: 72156 - protein, 317 aa, Unknown
  Obtained from environmental sample
  SIGNAL (1)...(19)
  DOMAIN (19)...(317): Omptin family
  misc_feature (1)..(317): Xaa is any amino acid
MKKLCFFIFSAVLIFNLSAKEHDFSVGASFGFLNGRAQEIVYRNNISEDKLSELLWNFNALPYIGLDIKYSWLKPGNAWGLFANGSFKFGFPGGADVMEDRDWIILNYPNWLTHYSVHDNRTDSAKIIDFNLGASFLIRKFLLKAYISYHYMYFSWTASGGSILYPSWDIDGDGKPDGDHLPLYALYEGPVGKYEQTWHIFSPAISFYGEFNRFFDIEIALAITPFIWCNAVDQHLLRDLVITDTLEGGLFIEPSFLFSYKPSKHFALSLSFDYRDIKKARGDAHYKYAVGRSLTEKKLSGGGFTLFDIGIIAKYKL

SEQ ID NO: 72157 - DNA, 534 bp, Unknown
  Obtained from environmental sample
  misc_feature (1)..(534): n is a, c, g, or t
atgggctcttctgtcggattcagcaaggttcacaatgaagcggatttagccgccgcgttaaatgacgctttttgttacgacacaaaaatcatcatagaagaatttatcatcggcagagagattgagtgcgctgttcttgggaatgaagagcccgccgcgtccgtgcccggcgaaatagtcccctctcacgaattttattcttacgacgcaaagtatcttgatgaaaaaggagccgctcttgaaatccccgcaaaacttgaagacgcaacaaaaaagcggattcaagagcttgccgtaaaagtttttcaggtgctttgctgtgaagggctttcgcgcgtggatttctttttgaaaaaagacggcgaaataatagtcaacgaaattaacacgatgcccggttttacaaaaataagcatgtatccaaaaatgtgggaagcaagcgggataggctataccgaacttatcacccgtttaattgaattggcagtcagccgatttgaaaaagagcggaagctaaaaaccagcgtgaaataa

SEQ ID NO: 72158 - protein, 177 aa, Unknown
  Obtained from environmental sample
  DOMAIN (1)...(160): D-ala D-ala ligase C-terminus
  misc_feature (1)..(177): Xaa is any amino acid
MGSSVGFSKVHNEADLAAALNDAFCYDTKIIIEEFIIGREIECAVLGNEEPAASVPGEIVPSHEFYSYDAKYLDEKGAALEIPAKLEDATKKRIQELAVKVFQVLCCEGLSRVDFFLKKDGEIIVNEINTMPGFTKISMYPKMWEASGIGYTELITRLIELAVSRFEKERKLKTSVK

SEQ ID NO: 72159 - DNA, 1011 bp, Unknown
  Obtained from environmental sample
  misc_feature (1)..(1011): n is a, c, g, or t
atgattgttgttattaaaaaggacgcgaacgaaaagagcgtagaaaatcttatctcgtggctggaaaatcagggactgcgcgtcaatgtaaaccgcggcatgtttcaaactgttcttgggctgattggcgacacgcacagccttaacgcggaacttgtcggcggcatggacattgtggaacgcgtacagcggatcagcgaaccgtataaaaaagccaaccgcaagtttcacatagacgataccgttgtggacatgggcggttataaaatcggcggcggtaattttcagtttatcgcgggtccctgttccgtagaatcaaacgaacaaatatgcggaatcgcaaagcaggtaaaacaggcgggagcgaatcttctgcgcggcggagcgtttaaaccccgcacttccccctactctttccaaggactccgcgacgaaggcattgagtatttactgcaggcgaaagaacaaaccgaaatgccgattgtcagcgagataatgaacgccaaccatttgtcgatgttcgaaaagatcgatgtaattcaagtcggcgcgcgcaatatgcagaactttgaacttttaaaagaattgggagcgactaacaaaccaattctgctaaaacgcggacttgcaaatactcttgaagaacttttaatgagcgcggaatatatcatgtccggcggaaacgaacatatcattttatgcgagcgcggtatccgcacatttgaaaccgcaacgcgcaacactctcgatatttcagccataccgatgcttaaacggttgactcatcttccggtaatcatcgacccaagccacgcggcgggagacgcggctcttgtgtatccgctttccatggcggcggcggcggcaggcgcggacggattaattattgaagtgcacaacgacccagcccacgcgttatgcgacggaccgcagtcgatcacgccggacgctttcgcttctttggcgggtgatgttaagaaagttttagaaattgtaaacaagaagaaataa

SEQ ID NO: 72160 - protein, 336 aa, Unknown
  Obtained from environmental sample
  DOMAIN (113)...(334): NeuB family
  misc_feature (1)..(336): Xaa is any amino acid
MIVVIKKDANEKSVENLISWLENQGLRVNVNRGMFQTVLGLIGDTHSLNAELVGGMDIVERVQRISEPYKKANRKFHIDDTVVDMGGYKIGGGNFQFIAGPCSVESNEQICGIAKQVKQAGANLLRGGAFKPRTSPYSFQGLRDEGIEYLLQAKEQTEMPIVSEIMNANHLSMFEKIDVIQVGARNMQNFELLKELGATNKPILLKRGLANTLEELLMSAEYIMSGGNEHIILCERGIRTFETATRNTLDISAIPMLKRLTHLPVIIDPSHAAGDAALVYPLSMAAAAAGADGLIIEVHNDPAHALCDGPQSITPDAFASLAGDVKKVLEIVNKKK

SEQ ID NO: 72161 - DNA, 1143 bp, Unknown
  Obtained from environmental sample
  misc_feature (1)..(1143): n is a, c, g, or t
atggatattgataaactgaatcaggaagtagacggcattgacgaccagatacttaagctgtttgaacaacgcatggaactttcgcaaaaaatagggcaaggcaaggaagagctttcattgcccgccatggatacggaacgcgagcgtaaaattttgtaccgtctttgcgaaaaagcgaaaccggaactttcaggctatgtaaaagttttattttcgtccttgtttgagattggcagaagccatcaaaaaactttcggcagccactacgattcatccgtaataaaactgcttaatgacgcggttgcgcaaaaacttgaagtctttccatcacgcgcgacagtcgcgtgtcagggcgtggaaggtgcgtattcacaagccgcctgcgacaaattattttctccggcggacatcacttactttaccagctttgaaggcgtttttcaggcggtagaaggcggcttgtgccgttacggcgtagtgcctcttgaaaacagcacagccggttccgttaacgaagtatacgaccttatgaaccgctaccgtttttacattatccgcagtgtaaaactgcctatagcgcatacgctgttggcggctcccggcgcgaagttagacgacataaaggaagtgttttcgcatgaacaggctatccgccaatgcagtaaatttttaaaatcatggaacggcgtaaaaataaccgagtgcgccaacacggcgttggcggcaaaagaggcggcaagctccggcaggacggacgcggcggttatttcttcgcgcgattgcgccgaattgtacggcttacacgcgctttcgtttaacattcaaaacaccgacaacaattacacgcgttttatctgtatttcaaaaaaaccggaaatatatccgggcgcgcaaaaaaccagtctaatactcgccttaaagcacaaacccggctctctgtacagcgtactcgcgaaattttacgcgcatggaatcaacatgaacaaattggaaagccgccccattttgggtcaggcttttgagtttatgttttattttgacatagacacgccggttataacggaagaattgaagctagtactggcggagttggaacaggaaaccgatatgtttgatttccttgggacttatcaggaaatataa

SEQ ID NO: 72162 - protein, 380 aa, Unknown
  Obtained from environmental sample
  DOMAIN (300)...(376): ACT domain
  misc_feature (1)..(380): Xaa is any amino acid
MDIDKLNQEVDGIDDQILKLFEQRMELSQKIGQGKEELSLPAMDTERERKILYRLCEKAKPELSGYVKVLFSSLFEIGRSHQKTFGSHYDSSVIKLLNDAVAQKLEVFPSRATVACQGVEGAYSQAACDKLFSPADITYFTSFEGVFQAVEGGLCRYGVVPLENSTAGSVNEVYDLMNRYRFYIIRSVKLPIAHTLLAAPGAKLDDIKEVFSHEQAIRQCSKFLKSWNGVKITECANTALAAKEAASSGRTDAAVISSRDCAELYGLHALSFNIQNTDNNYTRFICISKKPEIYPGAQKTSLILALKHKPGSLYSVLAKFYAHGINMNKLESRPILGQAFEFMFYFDIDTPVITEELKLVLAELEQETDMFDFLGTYQEI

SEQ ID NO: 72163 - DNA, 378 bp, Unknown
  Obtained from environmental sample
  misc_feature (1)..(378): n is a, c, g, or t
atgaaagtaatatccaccgattcagcgccgaaggcaatcggaccatattctcaggctatcgtaacggacgaactgctctttgcgtcagggcaaattcctctgtcgccggaaacaggcgatgttgtatcgggcggcataaaagagcaggcggaacaagttatgcaaaatatcgcggcggtgcttaaggcggcgggaagtgattttacaaaagttgtaaaatcgacatgctttttaaccagcatggataatttcgccgcgttcaatgaagtttacgcaaagtattttaccggaaaacccgcccgttcctgcgtagctgtatccgctctgccgcgaggcgttttggttgaagtcgaagttatcgccgaagtttccgaataa

SEQ ID NO: 72164 - protein, 125 aa, Unknown
  Obtained from environmental sample
  DOMAIN (6)...(123): Endoribonuclease L-PSP
  misc_feature (1)..(125): Xaa is any amino acid
MKVISTDSAPKAIGPYSQAIVTDELLFASGQIPLSPETGDVVSGGIKEQAEQVMQNIAAVLKAAGSDFTKVVKSTCFLTSMDNFAAFNEVYAKYFTGKPARSCVAVSALPRGVLVEVEVIAEVSE

SEQ ID NO: 72165 - DNA, 2031 bp, Unknown
  Obtained from environmental sample
  misc_feature (1)..(2031): n is a, c, g, or t
atgaaaaggaatgttattttcggaatattattttttgtaatgataatgacgactttcggcagtcagactgataatgccacgcgacgttttggtatttttatcggttccaataacggcggaagagatcgcgtcacgctgcgttacgcggtgtccgacgcgcgttccatagcgaatgttttttcgcagatgggaggaatagcgggcgaagattccattcttcttgtagacccgaatatcagagaaataaacagacgtatagacgccatgcacgaacaggtgcttaatacgatgaaagccaacaggcgcaccgaaattattttttactattcgggacactcggacgatgaaggcttgttattaaaccgcgaaaaatattattaccgcgaactgcgtgaaaaaataaacaatatcccctccgatatgcgtattgtaatccttgactcctgcgcgtcgggagcgtttacaagaataaaaggcggtgaaaaaactcttccctttttacttgacagctcgtctaccgccgaaggatacgcgtttttaacgtcaagctccgccaatgaatcttcgcaggagtcggacagaatcgcatcctcatacttcacacattcgcttgtagcgggacttcgcggagccgcggatagtgtcggcgacggacgggtaaccttgaatgaactataccgttatgcgtacgcggaaaccatggcgcgcaccgagacttcgctttatggcacacaacaccccagctacgacatacaaataaacggttcgggagatttggtgctgacagatgttaatcaaacctccgccggaatagtaattgatgaaaaaataacaggacggcttaccatacgagacgataaggatcgccttattgtggaaataaataaaaccgcgcgtgttctggaattgggactggagccgggaatttatagtattaccctgcagcaaggcgtcgatttgtttcgcgccgagataacgcttgttcaggaacagcgtactttggtttcaatgaaagattttaatcgtattgggacggctcccgctcgacggagagggggtgatgaaaaagatgatgcagcggggacgaatttatatactttcttttttaatattgtttatgaaccttttcctttaccattgataggttttgtaaacattgcgattggaaatcataaatattttcaggcaagctttgttaattggaatacggaaaattttagtgggtttcagacgggatttattaataccgtaggaggaaattttaacggcttccaagccggatttgttaatactatagccggagatacaaagggattgcaggttgcatttgttaatacaaatgtgggagaaataaaaggaatgcagacaggcttttttaataccgctgtaaaaaaaatggaaggtgtacagaccggatttgttaacattgcgacgcgagacatgaaagggcttcaagttggttttgttaactacgctgaaagtatagacggagcgccgataggatttatttccatagtaaagaacggcggttatatggcggttgaatattttaattccgaatatcacaattacaatttaagttttaaaacaggaatagacaagttgtatacttcaattgttgtttcttataatcaaaccgatgaaaatacatggaataatttcgcttcgggagtgggaattggttcaattcttccaataggtaaaatattttattttaatcccgaattaacttctttagcgccttccataaataattttagttacgagagttttgttccttattttggcgttaattttaaaaaattcagtattgcggcgggacctgttataacatgggtaagaagacataataaaaataatgttgatgaaccagaggggtatccggcatgggtaagaatagatacaggaaactataatgataataaagataacccgctgccgaaaccgaattacagtttgtattatcacgaaataaacgataacaacagtctttcaattggttttagagcggcggcaagattgaggttttaa

SEQ ID NO: 72166 - protein, 676 aa, Unknown
  Obtained from environmental sample
  SIGNAL (1)...(23)
  DOMAIN (29)...(243): Caspase domain
  misc_feature (1)..(676): Xaa is any amino acid
MKRNVIFGILFFVMIMTTFGSQTDNATRRFGIFIGSNNGGRDRVTLRYAVSDARSIANVFSQMGGIAGEDSILLVDPNIREINRRIDAMHEQVLNTMKANRRTEIIFYYSGHSDDEGLLLNREKYYYRELREKINNIPSDMRIVILDSCASGAFTRIKGGEKTLPFLLDSSSTAEGYAFLTSSSANESSQESDRIASSYFTHSLVAGLRGAADSVGDGRVTLNELYRYAYAETMARTETSLYGTQHPSYDIQINGSGDLVLTDVNQTSAGIVIDEKITGRLTIRDDKDRLIVEINKTARVLELGLEPGIYSITLQQGVDLFRAEITLVQEQRTLVSMKDFNRIGTAPARRRGGDEKDDAAGTNLYTFFFNIVYEPFPLPLIGFVNIAIGNHKYFQASFVNWNTENFSGFQTGFINTVGGNFNGFQAGFVNTIAGDTKGLQVAFVNTNVGEIKGMQTGFFNTAVKKMEGVQTGFVNIATRDMKGLQVGFVNYAESIDGAPIGFISIVKNGGYMAVEYFNSEYHNYNLSFKTGIDKLYTSIVVSYNQTDENTWNNFASGVGIGSILPIGKIFYFNPELTSLAPSINNFSYESFVPYFGVNFKKFSIAAGPVITWVRRHNKNNVDEPEGYPAWVRIDTGNYNDNKDNPLPKPNYSLYYHEINDNNSLSIGFRAAARLRF

SEQ ID NO: 72167 - DNA, 843 bp, Unknown
  Obtained from environmental sample
  misc_feature (1)..(843): n is a, c, g, or t
atgaataaggcgagtatttcatcttttcttcttgaacgctaccatattggcgaagtgagcgctgaagaaaaaaaatatgtcgaggatattctgacaaaggatgagcaggcggcttcggctctcgcaaaactggataacgccgatgacgattttaaacggcggtttcctttggaaaaatttttcccctcggaacaaaaagagagtattaattcaggtctgcggcgtatgagcgtaccgcattttggttttcgcaggctcaggaaagttccggctcttgtttggagcatttgcgccgcggcgttggttttagttatcgcgcttccgttaatcattcttaaaaatcctcgtcaagttgaatttggcgacagaattaaaggcgcgtctgcggaaaacaactccatagagttaagcgtgtacattaaagaaaaatcttccggcgaaggcgttaaattgacaaatcaggctaatgtgcgggaagggagtacggtgcagttagcctaccaagtatcgggcggcgcatccgccgaaaaatacggagtcattttttctatagacggaagatcatcagttacaatgcatttcccttacgcgtcttggcagagtaccttgctggtaagcggaaagcctgttccgctggacgaagcctacacactggatgacgcgccggattacgagatattcttttttgttacgggagaaaaacctttggatgtcggcaaggtaatggatactgcaaaacaacttgccgcgctgatagaaaaaaatcccgattcggcggaaagctatgggattgccgcgttcaataaaaatgaattagcaatgtttacgttaattaaggaataa

SEQ ID NO: 72168 - protein, 280 aa, Unknown
  Obtained from environmental sample
  misc_feature (1)..(280): Xaa is any amino acid
MNKASISSFLLERYHIGEVSAEEKKYVEDILTKDEQAASALAKLDNADDDFKRRFPLEKFFPSEQKESINSGLRRMSVPHFGFRRLRKVPALVWSICAAALVLVIALPLIILKNPRQVEFGDRIKGASAENNSIELSVYIKEKSSGEGVKLTNQANVREGSTVQLAYQVSGGASAEKYGVIFSIDGRSSVTMHFPYASWQSTLLVSGKPVPLDEAYTLDDAPDYEIFFFVTGEKPLDVGKVMDTAKQLAALIEKNPDSAESYGIAAFNKNELAMFTLIKE

SEQ ID NO: 72169 - DNA, 1311 bp, Unknown
  Obtained from environmental sample
  misc_feature (1)..(1311): n is a, c, g, or t
atggcggattcatattataacacttttaataatttccgcgctcaggggtatgatcccaatgaccgctgggtcaattactatgtttggaaacaggcttatgacagatcggtagtacataccgctatcattaatatattgaaaaaatcagggtatatggtgtctgaaaaggcggttaacaaagtggtcttgcaattaccgcaatttcaggacaacgggcgtttttctattgttctgtacaacagaatgtccgaatcatcccgtgttgccctttggaataaaactcaggaagatatcgcgatgaatatatttttcagcgattactttagtttgttaatccctgagtccgaggcgaaatttatcgcgaatatgtcgtcgccaaaaagaacttttgattttgtttcttttaacgtttatgattatcccgatagcgagtatcttgcgtacgcgcgggaaaactccaaacttttcgattcaatacagttatccaaaattacaatttcaagcagtgaaaaagaagcgaaaaaaattctggcttccataaaagacggaaccactacttttgaagacgccgcaaaagcccagtcaaaagacggctacgccgacaggggcggagatatgggtattaaattctgctatgaaatagacggtgaaatttccaagccggaggatcgcgaggcgatttacagtctgggcaggggagagttaagcggcgttatttcaactaacgacggatgggcttttttcagggcggaaagcgagttgactaaggctgattttgacgattattcggtaatggaaagagtgcgttcctatgttaaggactatgaaagaggacgcatggaagactggactgtcgggcaagcgaatgaatttattaccgagtcgaaagaatcggggtttgttaatgccgcgcgctggaaaaacttaagcagcaagaattttggaccgcttccgcttaactacggcggggttgatatttttacgacacttgaatcttttaccgaatccggtttaaactccgacgagcttaaagcgttatcgcaaaatgaaaatttttggaaaagtacttttacaacacctgtaaatactccatgcgagccgcttgttcagggaagcaatgtatttgtatttattccgacggaagaaactacagccgaggaatcatcaattgaggaaattgcgtcaaactacaaaaatcaatttgtacaatatacagccgaccagtcattacagaaatattttatgaataacggaaaattgacggatcattttgatgatatttattttaatgttttaaacgccagtaaatag

SEQ ID NO: 72170 - protein, 436 aa, Unknown
  Obtained from environmental sample
  DOMAIN (164)...(252): PPIC-type PPIASE domain
  misc_feature (1)..(436): Xaa is any amino acid
MADSYYNTFNNFRAQGYDPNDRWVNYYVWKQAYDRSVVHTAIINILKKSGYMVSEKAVNKVVLQLPQFQDNGRFSIVLYNRMSESSRVALWNKTQEDIAMNIFFSDYFSLLIPESEAKFIANMSSPKRTFDFVSFNVYDYPDSEYLAYARENSKLFDSIQLSKITISSSEKEAKKILASIKDGTTTFEDAAKAQSKDGYADRGGDMGIKFCYEIDGEISKPEDREAIYSLGRGELSGVISTNDGWAFFRAESELTKADFDDYSVMERVRSYVKDYERGRMEDWTVGQANEFITESKESGFVNAARWKNLSSKNFGPLPLNYGGVDIFTTLESFTESGLNSDELKALSQNENFWKSTFTTPVNTPCEPLVQGSNVFVFIPTEETTAEESSIEEIASNYKNQFVQYTADQSLQKYFMNNGKLTDHFDDIYFNVLNASK

SEQ ID NO: 72171 - DNA, 1599 bp, Unknown
  Obtained from environmental sample
  misc_feature (1)..(1599): n is a, c, g, or t
atgcagggattaccgtttgtccgaaacgggaagactcttctttccgcagttgatcccgcaggacgcgccgaacgtacagccaagtcgattcctgtaaaagaaagaaccctctatttttgtccttcgcctctgtacggctacggtctttcctgctttctttcgcgattggaagcggaagcgcccgattccgccgtattatgtatagaagccgatcccgaactttttgatcttgccatgcaaaatattgactcttcaatcgcttccaataaattattctgtcttacaaatgtatgcggcggcgagggcgtttattctcttgtgcgagaaaaatggggcgcgcgggcattccgccgcgttgaaatattgcggttaacaggcggttggcaattattccccgaattgtatgattctatctgcgattcgcttcgccgcgagatcgccgtagattggagtaacgccctaactcttgcgaaaatgggtcgcctatacattcgtaacgcgttacgcaatctcccgcttgttttaaaatacccgtcagcgcaggatttgtctttcggctgcgcgcccattcttgtacttggcgcaggtccctctcttgatgaaacccttgacgcgcttacagccgaatacgccgacattcttgcctctcccgaaaaacgcaattttaaaattatatgcgtagacacatgccttggtgcgttaaaagaaagaaacattgttcccgaccttgccgtaatcttggaaagccagcactggaatatcaacgactttttaacttgcagagggtggaaagtaaacgccgcaatagacctttcttcgcttcccgcttctgtaaatattctctcaggcgaaaattttattttttttacaccgtggacgcagttaaaaatctttgaacggctgaaaagtacggggctgttacccgctgtcgttcctcctcttggctccgtagggcttacggcggtggaattaagccggcggctcacaacaggaaaaataatcagcgccggacttgatttctcgtttacccaagacaagtatcacgcccgctcaacgccgggacaccgttcccgcctaaacctacaaagccgttttaaaagactatttaaccccgcggcgtacaatcagtattcaaccgccgccgtttcaaagtcagggagtcccgtttacacaaaccccgccatgaaaaattaccgcgacctttttgaacaagaattcggcggcgattcgcgtatatttgacatcgcaagcacaggactcccattaggaataaaaactctctccatcgaagacgcgatggctctgttgaacaaagaaaagtccactcccacgcaaaatgttcgtgtggttcgtggtaaaaattccgaattagtttctttctttgagagcgaaaaaaaaagattagaggaattacgcaatcttttaacaggcgaagcggcggctgataatgagcgattgaatacgctgatagaagattgtgattacctatgggcgcatttccccgattacgcgggcggtcgccgtccggcggtaaccgatatttcgtttctaaaacgtgtccgcgctgagatagaccctatgctgaaactgttgaattaa

SEQ ID NO: 72172 - protein, 532 aa, Unknown
  Obtained from environmental sample
  DOMAIN (166)...(340): Protein of unknown function DUF115
  misc_feature (1)..(532): Xaa is any amino acid
MQGLPFVRNGKTLLSAVDPAGRAERTAKSIPVKERTLYFCPSPLYGYGLSCFLSRLEAEAPDSAVLCIEADPELFDLAMQNIDSSIASNKLFCLTNVCGGEGVYSLVREKWGARAFRRVEILRLTGGWQLFPELYDSICDSLRREIAVDWSNALTLAKMGRLYIRNALRNLPLVLKYPSAQDLSFGCAPILVLGAGPSLDETLDALTAEYADILASPEKRNFKIICVDTCLGALKERNIVPDLAVILESQHWNINDFLTCRGWKVNAAIDLSSLPASVNILSGENFIFFTPWTQLKIFERLKSTGLLPAVVPPLGSVGLTAVELSRRLTTGKIISAGLDFSFTQDKYHARSTPGHRSRLNLQSRFKRLFNPAAYNQYSTAAVSKSGSPVYTNPAMKNYRDLFEQEFGGDSRIFDIASTGLPLGIKTLSIEDAMALLNKEKSTPTQNVRVVRGKNSELVSFFESEKKRLEELRNLLTGEAAADNERLNTLIEDCDYLWAHFPDYAGGRRPAVTDISFLKRVRAEIDPMLKLLN

SEQ ID NO: 72173 - DNA, 1806 bp, Unknown
  Obtained from environmental sample
  misc_feature (1)..(1806): n is a, c, g, or t
atggcacagactcaatttatccgtaacttttgcattatcgcgcacatcgatcatggcaagtctacccttgccgaccgcctcattcaaaaagccaaccttgtcgacgaccgcaatttcaaggatcagatactcgataatatggatattgagagggaaagaggcatcactatcaaaagccaggcggttactctgccctacacggcgaaggacggtaacgagtacacactcaatttggtagacacgcccggacacgttgattttagttacgaggtaagccgagcgattaattcctgcgagggcgctctgctcttggtggacgcgactcagggcgtgcaggcgcaaactttgtctaacatgtaccttgcgctggaacacaatcttgagatagtgcctgtaatcaacaaaatcgatatgcaggcggctgatgttccaagagttaaaaaacaaattgataaagacttagggctggactcggaaaccgccgtcttggcgtccgcaagacagggtatcggaattgacgagcttttagaggcgatagtacagaaaattcccgctccctcagggaagacagacgcgccgttacgcgctcttatttttgactgccattacgatccttatcgcggcgtagtcgtgcatttgcgtctctttgacggaaaaataaaaaagggaatgaaaatatcctttatgtccagcggctcttcttacgaagtggaaaccgtaggcgtttttaaacttgcgcttgtggaaacggacgagctttccgcgggggacgtaggctacataatagcaagcattaaaaccgtaagcgatgtgcgcgtaggcgacaccgtaacaggcgcggacaatccctgcccggaacctttacccggtttccgtgaagtaaaacccgtagtcttttcttctatctaccccgttgactcaaacgactacgaagaattacgcgcaagcatggacaaacttaaacttaacgacgcttcccttatctttgaaaaagactcctccgccgccctcggctttggtttccgctgcggctttttaggactcctgcaccttgaggttattcaggaacgtcttgagcgcgaatttgatcaatcggtaattttcaccgcgccgtccgtaaaatacaaggtgcatctaaggaacggcgaagaaatcatgatcgacaaccccatggaataccccgacgagggcagaatagacagcgcggaagagccgtatatccgcgcgagcgtaattactcctaccgattatcttgggaatataatgactctgtgccttgaaaaacgcggcgtacaaaccaacatgacctatcttgatgaaaaacgagtggaattaatctacgatatgccgctttccgaagtgttattcgatttttacgataaattaaaaagcataagccgcggttacgcgtcatttgattacgatatttcaggctacaaaccgacggaactcacaaaaatggacattcttcttaacggcaaacctgttgacgctctttcccagcttgtgttcaaaggcaacgcctacgaccgcgctagaaaagtctgcgaaagattacgcgatgaaattcctcgccagcaattcaagataccgattcaaggctccattggcagtcatataatcgcgcgggaaaccgtcaacgctctccgcaaggacgtacttgcaaaatgctacggcggcgatattacgcgcaaacgcaaactgcttgaaaaacaaaaagaaggcaaaaagcgcatgaagatggtgggcgatgttgagttgccgcaaagcgcgttcttagctgtcttgaaagctaaagatgagtaa

SEQ ID NO: 72174 - protein, 601 aa, Unknown
  Obtained from environmental sample
  DOMAIN (19)...(185): Ras family
  misc_feature (1)..(601): Xaa is any amino acid
MAQTQFIRNFCIIAHIDHGKSTLADRLIQKANLVDDRNFKDQILDNMDIERERGITIKSQAVTLPYTAKDGNEYTLNLVDTPGHVDFSYEVSRAINSCEGALLLVDATQGVQAQTLSNMYLALEHNLEIVPVINKIDMQAADVPRVKKQIDKDLGLDSETAVLASARQGIGIDELLEAIVQKIPAPSGKTDAPLRALIFDCHYDPYRGVVVHLRLFDGKIKKGMKISFMSSGSSYEVETVGVFKLALVETDELSAGDVGYIIASIKTVSDVRVGDTVTGADNPCPEPLPGFREVKPVVFSSIYPVDSNDYEELRASMDKLKLNDASLIFEKDSSAALGFGFRCGFLGLLHLEVIQERLEREFDQSVIFTAPSVKYKVHLRNGEEIMIDNPMEYPDEGRIDSAEEPYIRASVITPTDYLGNIMTLCLEKRGVQTNMTYLDEKRVELIYDMPLSEVLFDFYDKLKSISRGYASFDYDISGYKPTELTKMDILLNGKPVDALSQLVFKGNAYDRARKVCERLRDEIPRQQFKIPIQGSIGSHIIARETVNALRKDVLAKCYGGDITRKRKLLEKQKEGKKRMKMVGDVELPQSAFLAVLKAKDE

SEQ ID NO: 72175 - DNA, 1314 bp, Unknown
  Obtained from environmental sample
  misc_feature (1)..(1314): n is a, c, g, or t
atggatctcttcaatgcaaaccgcgaagccgtcttaaaccgctccgctcccctcgccaaccgcatgcgcccgcgcacgctcgatgagtacatcgggcaggagcacatcatcggccacggccgcctgctgcgccgcgccatacagatcgaccagctctcaagcgttatcttctacggcccgccgggaacggggaagactacgctggcgcggatcatcgccaataccacaaaggcgaacttcatctccataaacgcggtgctggccggcgtcaaggagatacgggaggcgatagacgacgctcaaaaggcgctggcgcactaccaaaaacgcacaaccctgttcgttgacgaggtgcaccgcttcaataaatcgcaacaggacgcgctgctgcctcatgttgagaacggcaccctcacgctcataggggcgaccaccgagaacccgtactttgaggtgaacaaggctctggtatcgcggtcgaggatattccaactcacggtgctgacggaagccgacctaaaggccgtcgccatgcaggcgctctccgacaaggaacgcggctacggcggcaaaaacgtcgtaatcgacgacgacgccctaaaccacttggtgcgcacggcgaacggcgacgcccgaggcgtgctgaacgcgcttgagctggccgtggagacgacgccggaagagagcggcgtgataaggataacccgcgccatagccgaggattcgatacagcaacgcgccgtcctctacgaccgcgacggcgacgcccactacgacacgataagcgcattcataaagtcgctgcgcggctcagacccggacgccgcgctgtattggatggcaaagatggtctacgccggcgaggatccgcgtttcatattccgcagaatgctgatattcgcctgcgaagacgttggcatggccgatccaaacgcgctctcggtagtggtaaacgcggcgcgggctttcgactacgtgggtatgccggagggcaggtttcacttgtcgcacgcttgcatatactgcgcgacggcgcctaagagcaactcgtctatggcgtttttcgacgctttgaacactgtggcgcagagcgcttcggacgacgtgccgaaccatttaagagacgcgtcgcgggatagcaaggggctggggcacgggaaagggtatttgtacccgcacgcttacagggatcattgggtggcgcagcagtatttgccggatcatttgaagggacaggtgttttatgtgccgggggagattgggtatgagagacatgtaaaagagaggattgagaggtataggaaatctttatag

SEQ ID NO: 72176 - protein, 437 aa, Unknown
  Obtained from environmental sample
  DOMAIN (27)...(178): Magnesium chelatase, subunit ChlI
  misc_feature (1)..(437): Xaa is any amino acid
MDLFNANREAVLNRSAPLANRMRPRTLDEYIGQEHIIGHGRLLRRAIQIDQLSSVIFYGPPGTGKTTLARIIANTTKANFISINAVLAGVKEIREAIDDAQKALAHYQKRTTLFVDEVHRFNKSQQDALLPHVENGTLTLIGATTENPYFEVNKALVSRSRIFQLTVLTEADLKAVAMQALSDKERGYGGKNVVIDDDALNHLVRTANGDARGVLNALELAVETTPEESGVIRITRAIAEDSIQQRAVLYDRDGDAHYDTISAFIKSLRGSDPDAALYWMAKMVYAGEDPRFIFRRMLIFACEDVGMADPNALSVVVNAARAFDYVGMPEGRFHLSHACIYCATAPKSNSSMAFFDALNTVAQSASDDVPNHLRDASRDSKGLGHGKGYLYPHAYRDHWVAQQYLPDHLKGQVFYVPGEIGYERHVKERIERYRKSL

SEQ ID NO: 72177 - DNA, 888 bp, Unknown
  Obtained from environmental sample
  misc_feature (1)..(888): n is a, c, g, or t
atgaccgacaaacgactaggctatatactgatgttctttgtgctgctcctcgtcggcggggtgtacggttacctcatttggctcgaccgcaatcccctgaacaccatgaccctgcgattttccgaggtcggcagcttagccctagaggaccccgtccgcatggagggcacgcaagtcgggcagatcagcggatttgaccacgacagtctcgggcgtgtgctagtgtacgtccagtcgccaaagcccatccccgtgcgcgtctccagccaagtcgcggtcaaggtcaaaggagtcatgggcgaacgcttcatagagatcggcatcggcaatcccggcgacccgctcgccgacacgaagcggatcatcgacggcgacttcgagatggggccgtcggaagccatagcctacatggaccttctggccgcgaagatatcggagcttaaggacatcatgggacgattgcgcgacggcgaggatgggaagcgctcattcgtacaagcgttcaacgacgtggccaatacggtcgatacgctggtctacaacgtcttgaccggactgggcggcatggaggacgggcttagctccggactggactccgtagccagattcgtagaacagacggccaaactgacctccgacgtctccgtaaccgcgcccaaactaatagaagacctaaacacattgattgtcaagattgacacggtaatcccgaaggttgaaaaagtcatagccaaaacaaactctatagttgacagcattgacagtaacaagatgctctggggcgaccacttggagaaactgcaaacgcatctcgtagaaatcagaaaaacggcggacaacctgaaggaagaagggctgccgcttactataaagctgaaattgttttaa

SEQ ID NO: 72178 - protein, 295 aa, Unknown
  Obtained from environmental sample
  SIGNAL (1)...(23)
  DOMAIN (32)...(109): mce related protein
  misc_feature (1)..(295): Xaa is any amino acid
MTDKRLGYILMFFVLLLVGGVYGYLIWLDRNPLNTMTLRFSEVGSLALEDPVRMEGTQVGQISGFDHDSLGRVLVYVQSPKPIPVRVSSQVAVKVKGVMGERFIEIGIGNPGDPLADTKRIIDGDFEMGPSEAIAYMDLLAAKISELKDIMGRLRDGEDGKRSFVQAFNDVANTVDTLVYNVLTGLGGMEDGLSSGLDSVARFVEQTAKLTSDVSVTAPKLIEDLNTLIVKIDTVIPKVEKVIAKTNSIVDSIDSNKMLWGDHLEKLQTHLVEIRKTADNLKEEGLPLTIKLKLF

SEQ ID NO: 72179 - DNA, 798 bp, Unknown
  Obtained from environmental sample
  misc_feature (1)..(798): n is a, c, g, or t
ttgcttcgtcgcttcgctcctcgcaatgaccgtcattgcgagcgaagcgaagcaatccggaaagccgcaacttccaaaaaagaaggaaaagacatgagcgacgtactctacgagggcaaatcgaaaatcgtgtgcaaaggccgcgacgagtccacccttctcatcaaatacaaagataccgccacggcgttcaacggcgagaaaaaggccgagctttcgggcaagggcgtgctaaacgcggcgatctccaacctgatctacggctatctggaagagaacggcgtgaaaacgcacctggtcgaggtcgtagacgatacatcggttatcgctaaaaaagccgagattataatggtcgaggtcatagtgagaaacgtcgccgccggcgggttttcgaagaaatacggcgttccggaagggtctgaactgaagaatatcgtacttgagttttgcctaaagagcgacgacctcggcgacccgatgataaacgagagccaaatcaccgccatggggctcgcctcagaccgggagctggactacatggcggaacaggctttaaagatcaacgaactgttgcgctccttgtttgaaaaggccggcataaggcttatagatttcaagcttgaattcggcagaagcggcggggaggtcatcctctgcgacgagatctcgccggattcctgccggttgtgggacgcggagacaaacaaaaaattggataaagaccgcttccgccgtgatttgggcgatgtgctggacggctatcgggatgttttggcgaggctcaaaaatgtccgatag

SEQ ID NO: 72180 - protein, 265 aa, Unknown
  Obtained from environmental sample
  DOMAIN (32)...(265): SAICAR synthetase
  misc_feature (1)..(265): Xaa is any amino acid
MLRRFAPRNDRHCERSEAIRKAATSKKEGKDMSDVLYEGKSKIVCKGRDESTLLIKYKDTATAFNGEKKAELSGKGVLNAAISNLIYGYLEENGVKTHLVEVVDDTSVIAKKAEIIMVEVIVRNVAAGGFSKKYGVPEGSELKNIVLEFCLKSDDLGDPMINESQITAMGLASDRELDYMAEQALKINELLRSLFEKAGIRLIDFKLEFGRSGGEVILCDEISPDSCRLWDAETNKKLDKDRFRRDLGDVLDGYRDVLARLKNVR

SEQ ID NO: 72181 - DNA, 1710 bp, Unknown
  Obtained from environmental sample
  misc_feature (1)..(1710): n is a, c, g, or t
ttgaattcggcagaagcggcggggaggtcatcctctgcgacgagatctcgccggattcctgccggttgtgggacgcggagacaaacaaaaaattggataaagaccgcttccgccgtgatttgggcgatgtgctggacggctatcgggatgttttggcgaggctcaaaaatgtccgatagccgcgaaccagaatcggtattggtgcttgatttcggcgggcagtacaaggagcttatcgcgcgggcggtgagggggctttccgtgtactcggagatacgcccgggcaatatgccggcggaagagatcaagcggctctccccgataggcatcatactgaccggcggccccagcagcgtctaccaacccggctcgccgatgtgcgatccggcgattttcgacttgggcatccccgttctcggcatctgctacggcatgcaccttatgtgccacacgctcggcggcgaggttacggcgggcggcgccggtgagtacgggtgcgtcacggtaacgccggcaaacccgctatcggcgctattccgcggctcgcaaagcaacccgttcaccgcgcttatgagccaccgcgacgtcgtttcacgcctgcccgacggcttccgccaaacggcctacacggcggtctgcgcggcggcatgcgaaaacgcggagaagaaactctacgccgtgcagttccaccccgagacaaaacatacagacggcgggcgcgagatatttcagcgctttctgtacgatgtctgcggcgcggccggagattacaagttagacgactatatcgatacgcaggtacgcctgatccgtcaaaaggtcggcggcggcaacgtgctgctcgccctgtccggcggcgtcgattcctccgtgtgcgccagcctgctgagccgcgccgtgccgaatcaactcgtatgcctgttcgtagaccacggctttatgcggcaaaacgagggcgacgaaatagaacgcgtcttctcgaagcgcaaactgcgcttcatccgcgtcaacgcgaaggagcgctttctcaagcggcttagcggcgtggccgatccggagacgaagcggaagttaatcggcgaggagtttgtccgcgtctttgaggaggagtccgccaaactcggcgacatcccgttcttggcgcagggaaccatctaccccgacatcgtagagtccggagggagctacggggcgacgataaaaagccaccacaacgtaggcggcctccccaaaaacctgaaattcaccggcgtcgtggaaccgctcagcggcctcttcaaggacgaagtccgcatactcggcaggaagcttggactgccggccttcatggtaaaccgccaacccttcccgggtcccggactcgccattagagttgtgggtgacatcacggaggagaaactgaacgttctgcgcaaggccgacgcgatactgcgcgaggagcttgacggcgtcaagaacaggccggatcaatacttcgccgtgctgacggacagttgctcggttggcgtaaaaggcgacgagaggacgtacaatccggtgatagccgttcgcgccgtagtgacgggagatttcatgacctgcgactacgcgccgattccgcataaaatgctggggcggatatcgtcgagaataacgagcgaaataccgtctgtcagccgtgtggtttacgacattacttctaagccgccggctacggtggagtgggagtga

SEQ ID NO: 72182 - protein, 569 aa, Unknown
  Obtained from environmental sample
  DOMAIN (66)...(232): Peptidase C26
  misc_feature (1)..(569): Xaa is any amino acid
MNSAEAAGRSSSATRSRRIPAGCGTRRQTKNWIKTASAVIWAMCWTAIGMFWRGSKMSDSREPESVLVLDFGGQYKELIARAVRGLSVYSEIRPGNMPAEEIKRLSPIGIILTGGPSSVYQPGSPMCDPAIFDLGIPVLGICYGMHLMCHTLGGEVTAGGAGEYGCVTVTPANPLSALFRGSQSNPFTALMSHRDVVSRLPDGFRQTAYTAVCAAACENAEKKLYAVQFHPETKHTDGGREIFQRFLYDVCGAAGDYKLDDYIDTQVRLIRQKVGGGNVLLALSGGVDSSVCASLLSRAVPNQLVCLFVDHGFMRQNEGDEIERVFSKRKLRFIRVNAKERFLKRLSGVADPETKRKLIGEEFVRVFEEESAKLGDIPFLAQGTIYPDIVESGGSYGATIKSHHNVGGLPKNLKFTGVVEPLSGLFKDEVRILGRKLGLPAFMVNRQPFPGPGLAIRVVGDITEEKLNVLRKADAILREELDGVKNRPDQYFAVLTDSCSVGVKGDERTYNPVIAVRAVVTGDFMTCDYAPIPHKMLGRISSRITSEIPSVSRVVYDITSKPPATVEWE

SEQ ID NO: 72183 - DNA, 546 bp, Unknown
  Obtained from environmental sample
  misc_feature (1)..(546): n is a, c, g, or t
gtgcgtcacggtaacgccggcaaacccgctatcggcgctattccgcggctcgcaaagcaacccgttcaccgcgcttatgagccaccgcgacgtcgtttcacgcctgcccgacggcttccgccaaacggcctacacggcggtctgcgcggcggcatgcgaaaacgcggagaagaaactctacgccgtgcagttccaccccgagacaaaacatacagacggcgggcgcgagatatttcagcgctttctgtacgatgtctgcggcgcggccggagattacaagttagacgactatatcgatacgcaggtacgcctgatccgtcaaaaggtcggcggcggcaacgtgctgctcgccctgtccggcggcgtcgattcctccgtgtgcgccagcctgctgagccgcgccgtgccgaatcaactcgtatgcctgttcgtagaccacggctttatgcggcaaaacgagggcgacgaaatagaacgcgtcttctcgaagcgcaaactgcgcttcatccgcgtcaacgcgaaggagcgctttctcaagcggcttag

SEQ ID NO: 72184 - protein, 181 aa, Unknown
  Obtained from environmental sample
  misc_feature (1)..(181): Xaa is any amino acid
MRHGNAGKPAIGAIPRLAKQPVHRAYEPPRRRFTPARRLPPNGLHGGLRGGMRKRGEETLRRAVPPRDKTYRRRARDISALSVRCLRRGRRLQVRRLYRYAGTPDPSKGRRRQRAARPVRRRRFLRVRQPAEPRRAESTRMPVRRPRLYAAKRGRRNRTRLLEAQTALHPRQREGALSQAA

SEQ ID NO: 72185 - DNA, 687 bp, Unknown
  Obtained from environmental sample
  misc_feature (1)..(687): n is a, c, g, or t
atgaatcaaatcaacctcgacataagaatggccggcttaggcggccaaggcgtagtcaccgccgcgcacatcttgggcactgcggtagtacataccggcaaatacgcggttgtcaacccgttcttcggagccgagaaacgcttggcgcccacagaaagctacgtacgcatctccaacgaggcgatatacgacagaggcgaggtcatgtaccccgacatcatagcggtattcgccccgcaagtgataaccgtaggcaagtcgcactcaataccgttctattccggactgcgaaacggcgggttgatcgtcgtcaactccgaagagccgataatcaccgaaaaagatatggcggagattgacaaagcgggagcgcgtgtatcatacgtccctgcgacaaagctggcggtagatttcgccggaaccgacttagcgacaaacatgacgatgctgggcgccatctgcggcctatccccggatttagttgacttgaattctctattgacggcggtggaggagcgtttcagcggaaaatccaaaatagtgacatctggaacaaccgcggcgcttgacgaggcaatcaagagcaagtttgacaaggcctcggcattgatcgaaaagaatataaccgccatcaaggaagcgtatggatatactaattctttaacaatcactcccactccaccgtag

SEQ ID NO: 72186 - protein, 228 aa, Unknown
  Obtained from environmental sample
  DOMAIN (14)...(194): Pyruvate ferredoxin/flavodoxin oxidoreductase
  misc_feature (1)..(228): Xaa is any amino acid
MNQINLDIRMAGLGGQGVVTAAHILGTAVVHTGKYAVVNPFFGAEKRLAPTESYVRISNEAIYDRGEVMYPDIIAVFAPQVITVGKSHSIPFYSGLRNGGLIVVNSEEPIITEKDMAEIDKAGARVSYVPATKLAVDFAGTDLATNMTMLGAICGLSPDLVDLNSLLTAVEERFSGKSKIVTSGTTAALDEAIKSKFDKASALIEKNITAIKEAYGYTNSLTITPTPP

SEQ ID NO: 72187 - DNA, 498 bp, Unknown
  Obtained from environmental sample
  misc_feature (1)..(498): n is a, c, g, or t
atggaaaaaataataatggagagagataaagtacagatttttgatacgacgcttagggacggcgagcaggccgcgccggctagtttgacggtggagcagaagtgtcatatcgcgaagcagcttgcgagtctgagggttgacgttattgaggcaggttttcccatatcgtcgccgggcgactttcaagcggtatcgaaaatcgccaaggagataaggggcggcccggtaatatgcgggcttgcacggcttgttcagaaagacatagaggtttgcgccgacgcggtcaggcacgcggagcgtccgcgtatacatacttttatcggaacgtccgcgatccataccgagaaaaaactccgtaaatcggaggaagaggtgctggaactcgtcaagaatagtgtcaaactggcgcgcaatctctgtgaagaggtcgagttttccgccgaggacgcgggaaggaccgatattaagtacctataccgcattgggaaacggctatag

SEQ ID NO: 72188 - protein, 165 aa, Unknown
  Obtained from environmental sample
  DOMAIN (19)...(164): HMGL-like
  misc_feature (1)..(165): Xaa is any amino acid
MEKIIMERDKVQIFDTTLRDGEQAAPASLTVEQKCHIAKQLASLRVDVIEAGFPISSPGDFQAVSKIAKEIRGGPVICGLARLVQKDIEVCADAVRHAERPRIHTFIGTSAIHTEKKLRKSEEEVLELVKNSVKLARNLCEEVEFSAEDAGRTDIKYLYRIGKRL

SEQ ID NO: 72189 - DNA, 1269 bp, Unknown
  Obtained from environmental sample
  misc_feature (1)..(1269): n is a, c, g, or t
atgcttacagcgatagtcggtataaattggggagatgagggcaagggacgcatggtcgatttgctttcggaaaaatacgaaataatctgccgttatcagggcggcaataacgcaggacatacagtcatcaacgataaaggaaaatttattctcaatcttctgccgtccggtattctgcgagacggaacagtaaatgttatgggaaacggtatggtcatcgacatagaacatctttgcggtgaaattgacaagttaaaagaaaaaggtattaaggttactcccgacagtttaaaaatcagcgacaaggcttttatctgcatgccctaccacaaagcgcaggacatacttgaggaagaacgccttggcgataaaaaatacggctctacccgccgaggcatcgcgcccgtgtacggcgacaaatacatgaagaaaggaataaggataggcgacctgcttgacggcggaaccttgaaacaaaaacttgttgacattcttgaatggaaaaatatgatattcaaagcttacggctccggtgtaaagcttgacgaaatcatggcttggctgactgattttggagcgaaaataaaaccttatatcaccgatacaactgattttctgtccgcgtccgtaaaatccggaaaagacattttgttcgaggcgcaattaggcgcgttacgcgacattgattacggtatttacccctacaccacatcgtctcagacgcttgccgcctacacacccataggagccggaatacccggcatcagacttgactgcgttatcggcattatgaaagctttttcaagctgcgtaggcgaaggaccctttgccgtggaaatgacaggcgatgatgccaacgccctgcgcgaagcgggagccgaatacggcgccgcgacgggcagacctcgcagagtcggcgcgtttgacgtgcccgcaagccgctacggagtgcaggcgcagggagcgaatgagcttgcgctgacaaaactcgacgtgctttcgtaccttgaaaaaattccaatctgcacagagtacgagattgacggagtaaaaaccgatcgtttcccatcaggcagcgcgcttgaaaaggcgaaacccgtatttcaatacatggatggttttaaaacagacgtatctaaatgccgtaaaccggaagatttaccggacgcggcaatcaaatacatacgatttattgaaaaagccgtatgctgtccgataaaatatgtgtccgtcggagccggacgagatgattatttagttatgagataa

SEQ ID NO: 72190 - protein, 422 aa, Unknown
  Obtained from environmental sample
  DOMAIN (2)...(420): Adenylosuccinate synthetase
  misc_feature (1)..(422): Xaa is any amino acid
MLTAIVGINWGDEGKGRMVDLLSEKYEIICRYQGGNNAGHTVINDKGKFILNLLPSGILRDGTVNVMGNGMVIDIEHLCGEIDKLKEKGIKVTPDSLKISDKAFICMPYHKAQDILEEERLGDKKYGSTRRGIAPVYGDKYMKKGIRIGDLLDGGTLKQKLVDILEWKNMIFKAYGSGVKLDEIMAWLTDFGAKIKPYITDTTDFLSASVKSGKDILFEAQLGALRDIDYGIYPYTTSSQTLAAYTPIGAGIPGIRLDCVIGIMKAFSSCVGEGPFAVEMTGDDANALREAGAEYGAATGRPRRVGAFDVPASRYGVQAQGANELALTKLDVLSYLEKIPICTEYEIDGVKTDRFPSGSALEKAKPVFQYMDGFKTDVSKCRKPEDLPDAAIKYIRFIEKAVCCPIKYVSVGAGRDDYLVMR

SEQ ID NO: 72191 - DNA, 1428 bp, Unknown
  Obtained from environmental sample
  misc_feature (1)..(1428): n is a, c, g, or t
atgcctgatcggtacgagaaccctctctgtaaaagatacgcaagcgcgcagatgcagtttatattctcggatgataataaattttcaacatggcgcaaactttggatcgcgcttgcggaaagccagaaagagctggggcttgatataagtacggatcaaatcgacgaaatgaaggcgcagcaaacaaacatcaactacgaaacagcggcaaaaattgaggcggagacaaggcacgacgtaatggcgcatattcgcgccttcggcgaacaatgcccgaaagcgaaaccaattatccaccttggagctacttcctgctatgtgggcgataacaccgacatcattcaacagcgcgccgctcttttgcaaataaaaaaactgcttgtaaacacaatagccaagctctgcgagttcgccgacaaatacaaagcccttccctgcctcgccttcacgcattttcaggcggcgcagccgactacgatgggaaaacgggcaacactctggatacaggatttattgtccgaccttgaacagcttgagttcacgcttaacggcttaaaattgctcggctgtaaaggcacaacgggaacaggagcgagctttctttccctttttgaaggcgatcatgaaaaagtaaaatctctcgaaaaaaaaatagccgaaaaaatgggctttgaaaaagtatatgccgtaagcggacaaacctattcaagaaaagtcgattattacacattgtctgttctttcgggtatcgctcaaagcgcgtataaattttctaacgatatccgcctgctttcccatcttaaagaagttgacgaaccgtttgagaacactcaagtaggctcctccgcgatggcgtacaaaagaaacccgatgagaagcgagcgcatcgcttccctagcccgttatgtgacagttgacgctcttaaccccgcgcttaccgccagcgcgcaatggcttgagcgcactctcgatgattccgctaacaggcgcatatcaatccctgaggcgtttcttgccgcagacgcgatactttcgctttacatcaatatagcaggcgggcttaatgtctaccccaaagtaatagaaaaacatttaaacgaagaattgccttttatggcgacggaaaatattttaatgcactgcgtaaaaaaaggcggcgacaggcaggctctccacgaaaggataagaattcactccatggaagcggcggaaaaaataaaactgcacggcggcgaaaacgatttaatcacccgcattttagcggataacacttttgagataaccaaaaaagaaatggataacctgctttctgcggaacaatttacaggcagagcgaaagaacaaactgaagaatttttatctgaagtaaaaaaagttcttgacgcgaataaagaaattttaggcgttgatgttaagataacggtataa

SEQ ID NO: 72192 - protein, 475 aa, Unknown
  Obtained from environmental sample
  DOMAIN (11)...(305): Lyase
  misc_feature (1)..(475): Xaa is any amino acid
MPDRYENPLCKRYASAQMQFIFSDDNKFSTWRKLWIALAESQKELGLDISTDQIDEMKAQQTNINYETAAKIEAETRHDVMAHIRAFGEQCPKAKPIIHLGATSCYVGDNTDIIQQRAALLQIKKLLVNTIAKLCEFADKYKALPCLAFTHFQAAQPTTMGKRATLWIQDLLSDLEQLEFTLNGLKLLGCKGTTGTGASFLSLFEGDHEKVKSLEKKIAEKMGFEKVYAVSGQTYSRKVDYYTLSVLSGIAQSAYKFSNDIRLLSHLKEVDEPFENTQVGSSAMAYKRNPMRSERIASLARYVTVDALNPALTASAQWLERTLDDSANRRISIPEAFLAADAILSLYINIAGGLNVYPKVIEKHLNEELPFMATENILMHCVKKGGDRQALHERIRIHSMEAAEKIKLHGGENDLITRILADNTFEITKKEMDNLLSAEQFTGRAKEQTEEFLSEVKKVLDANKEILGVDVKITV

SEQ ID NO: 72193 - DNA, 870 bp, Unknown
  Obtained from environmental sample
  misc_feature (1)..(870): n is a, c, g, or t
atgaaaaaaataatcagcgggaaagtcagggaagtatacgacttttctgacgaaaagtcgtccgacatttccgacgacaaacttgtcatcgttactactgacagaatttccgcatttgacgttatcctgtctaaacctgttttgaacaaagggaaagtgttaaacgccgtatctttattttggtttgattatacaaaaaacattattcccaatcatattatttcaagcgacttaaaagatatgcccgaattttttcagaaagacgaattcgaggggcgcacggttttagttaaaaaactcaaaatactgccgtttgaatttatcattcggggatatgtgttcgggaatatgtgggaagcgtactccaaaggaaaagaattctgcggtcaaaagattgaaggcaattataaacttgccgaaaaacttgccactcccctctttaccccctcgacaaaagcgcgtgaaggacacgacgaatatatttccgttcagtatcttgcggataatatcggcgctgatttggcgaagaaaatagaaaaactatgcttcgatatttacacaacttgttacgattacgcgtacaaaaaaaacatcatcatagccgacacaaaatttgaattcggtcttgacgagaacaacaacctctttatcgccgatgaagtgcttactcccgattcaagcagattctggagtcttgccgattaccaaatcggaacttcgccgaaaagctacgataaacaatttgttcgggactggcttcagaacaacaaaaaagacggagaaatgcaatttgataatgtgcccgatgacgtgttaagcaaaacatcggaaatttacgccgaatgtttgcggaggctggttaatgcctga

SEQ ID NO: 72194 - protein, 289 aa, Unknown
  Obtained from environmental sample
  DOMAIN (1)...(271): SAICAR synthetase
  misc_feature (1)..(289): Xaa is any amino acid
MKKIISGKVREVYDFSDEKSSDISDDKLVIVTTDRISAFDVILSKPVLNKGKVLNAVSLFWFDYTKNIIPNHIISSDLKDMPEFFQKDEFEGRTVLVKKLKILPFEFIIRGYVFGNMWEAYSKGKEFCGQKIEGNYKLAEKLATPLFTPSTKAREGHDEYISVQYLADNIGADLAKKIEKLCFDIYTTCYDYAYKKNIIIADTKFEFGLDENNNLFIADEVLTPDSSRFWSLADYQIGTSPKSYDKQFVRDWLQNNKKDGEMQFDNVPDDVLSKTSEIYAECLRRLVNA

SEQ ID NO: 72195 - DNA, 1506 bp, Unknown
  Obtained from environmental sample
  misc_feature (1)..(1506): n is a, c, g, or t
atggcattaaatttattataccccgaatatgaaatgataaggaattacgacagatgtatcgcctgccgcgcctgcgaacgccaatgcgccaacgaagcgcatgagtttctggaagaagaaaacaaaatgttatgcgacgattcaaaatgcgtaaattgccaccgctgcgtctcgctctgccctacccgcgcactgaaagttgaaaaatgcggcaacacttacaaacacaatatgaactggagcaacaaaacgatagatgaaatctacaaacaggctaactcaggcggcgtactgctctccagtatgggtaatcccgaaaattatcccgtgtactttgataaaattcttttaaacgcctcgcaggttacaaatccgtccatcgatccgttacgcgaacctatggagacaagaatgtccctcggcgcaaaaccggaaagaatagaaagagacagcaaaggaaggattatcaacaacctgccgcctcagctgcatttatctatgcctgttatgttctccgcaatgagttacggttccataagttacaacgcgcacgaaagtttggcgcgcgccgccgaggagcttggcattctttacaacaccggcgaaggcggtctgcatgaggatttttataaatacggaaaaaatacaatcgtacaagtcgcgtcgggacgtttcggcgttcatcacgattatttgaactcaggcgcggcggttgaaattaaaatgggtcagggagcgaagcccggtatcggcggacatctgccgggagcaaaaatagtaggcgacgtttcccgcaccagaatgattcccgaaggaaccgacgctatctctcccgcgccgcaccacgacatatactctattgaagatttacgtcagcttgttttctctttgaaagaagctaccgattaccaaaaaccgattatcgtaaaaatcgccgcggtgcataacgtaaccgctatcgcgagcggtatcgcaagaagcggcgcggacataatcgccattgacggcttccgcggcggaactggagccgcgccgacccgcatacgcgaccatgtcggtattcccatagaacttgcccttgccggcgttgacaaacggttacgtgacgagggaatccgcgacaacgtgtccattgtcgtaggcggaagtatccgctcaagcgccgacattgtaaaagcgctcgctctcggcgcagactgcgtatacatagcgacatccgcgttgatagcgcttggctgccacctttgcagaagctgtcacggcggcaaatgcaactggggtatcgcgacgcaagttcccgaacttgttaaacgccttaatcccgacatcggatacaagcggctcgtcaatttattgacagcgtgggatcacgaaataaaagaaatgatgggcggcatgggaattaactcgattgacggattaaaaggaaacagacttatgcttcgcggagtcggcttaaacgaaaaagagctggaaattttaggaattaaacacgccggagaataa

SEQ ID NO: 72196 - protein, 501 aa, Unknown
  Obtained from environmental sample
  DOMAIN (12)...(35): 4Fe-4S binding domain
  misc_feature (1)..(501): Xaa is any amino acid
MALNLLYPEYEMIRNYDRCIACRACERQCANEAHEFLEEENKMLCDDSKCVNCHRCVSLCPTRALKVEKCGNTYKHNMNWSNKTIDEIYKQANSGGVLLSSMGNPENYPVYFDKILLNASQVTNPSIDPLREPMETRMSLGAKPERIERDSKGRIINNLPPQLHLSMPVMFSAMSYGSISYNAHESLARAAEELGILYNTGEGGLHEDFYKYGKNTIVQVASGRFGVHHDYLNSGAAVEIKMGQGAKPGIGGHLPGAKIVGDVSRTRMIPEGTDAISPAPHHDIYSIEDLRQLVFSLKEATDYQKPIIVKIAAVHNVTAIASGIARSGADIIAIDGFRGGTGAAPTRIRDHVGIPIELALAGVDKRLRDEGIRDNVSIVVGGSIRSSADIVKALALGADCVYIATSALIALGCHLCRSCHGGKCNWGIATQVPELVKRLNPDIGYKRLVNLLTAWDHEIKEMMGGMGINSIDGLKGNRLMLRGVGLNEKELEILGIKHAGE

SEQ ID NO: 72197 - DNA, 1092 bp, Unknown
  Obtained from environmental sample
  misc_feature (1)..(1092): n is a, c, g, or t
atgcagtatgaggggcaagtacggataccttccggctgtgccatatcaggcattattgacagaacgggacggcgtatgagcggcgaagcgattattaaatcgatcagcgtcatgcatgaccgctcgaatggtctgggcggcggtttcgccgcgtatggaatctaccctgaatataaggactattacgccttgcatttattctatgaatccgcgtccgcaaaaagagagtgcgaggattttcttgagaagcattttgatattatcaacctttcaaaaatccctaccagaaaaataaaagaaattaccgatgaaccgctgatctggcggtactttgtaattccgctgccgacaaaactcgccgacagccagcttgacgaatatgaatttaccgccaaatgcgtgttccgcgtaaacacaaaaattgacggcgcttatgtcttctccagcggaaaaaatatgggcgtgtttaaggctgtcgggtttcccgaagatgtcgggcgtttttacaagctggaagaatacgagggctggtgctttactgctcacgggcgttacccgacaaatactcccggctggtggggcggcgctcaccccttcgctctccttgattattcagttgtgcataacggcgaaatatcttcatacgatacaaaccgaagagctatcgaaatgtacggctacaaatgtacgcttcaaaccgataccgaagttattacctacattattgattatctgcacagaaaacaaaaactttcttttgatgaaatcgcatcggtaatcgccgcttcattttggcagaccattgaaaaacagccggcgaaagagcgcgagattcatgagtatttgcgcgtaatgttcagcgcgcagcttataacgggtccgttctctatccttgtgggcttcgacggcggattgatggcgttaaacgacagacttaaactgcgaagcatggtcgttggtgaaaaggacgatattacctacatcgccagcgaagaagcggctatccgcatcatcgaacctaaccttgatacagtgtgggctcccagaggcggtcagccggtaatcgtcaacataaacagaggtaaagcataa

SEQ ID NO: 72198 - protein, 363 aa, Unknown
  Obtained from environmental sample
  DOMAIN (133)...(332): Glutamine amidotransferases class-II
  misc_feature (1)..(363): Xaa is any amino acid
MQYEGQVRIPSGCAISGIIDRTGRRMSGEAIIKSISVMHDRSNGLGGGFAAYGIYPEYKDYYALHLFYESASAKRECEDFLEKHFDIINLSKIPTRKIKEITDEPLIWRYFVIPLPTKLADSQLDEYEFTAKCVFRVNTKIDGAYVFSSGKNMGVFKAVGFPEDVGRFYKLEEYEGWCFTAHGRYPTNTPGWWGGAHPFALLDYSVVHNGEISSYDTNRRAIEMYGYKCTLQTDTEVITYIIDYLHRKQKLSFDEIASVIAASFWQTIEKQPAKEREIHEYLRVMFSAQLITGPFSILVGFDGGLMALNDRLKLRSMVVGEKDDITYIASEEAAIRIIEPNLDTVWAPRGGQPVIVNINRGKA

SEQ ID NO: 72199 - DNA, 843 bp, Unknown
  Obtained from environmental sample
  misc_feature (1)..(843): n is a, c, g, or t
atgaaaaaaaatattttatgggtaacggcaatcataatgatgattgctgttattgcgtgcaagaccgtaaaacctgcgtttcaggaacctgttatttccttccattctgcgttaattcccgatattaccatttataacgcgcagattctttgtaaaatacaagtacaaaacccgaattcttatgaaattccctttccgcatacaggttggaaactttatattaatgagaaatcctataaagacggagaagtaaaagcaaacggaaaaattaaagcgcgaagtacggtttttatagacgtgcctgtaaaagttgaatacattgatttttttaaaacatttaaaccgttaatcgggagcaaacaggcaagttataaaatagcgatggctgttaaatattcttcccctgattttggcgaaaaaatttggaattttgataataccggagatcttccgcttccacagcttccgtcgataagccagccaaccatggttattgaaagcgttgatttttcaaaggcggtaatacttgttactattaacgttgaaaaccctaatgcgtttgaaatcccatcgcctaaatttacctatgattatcaattaaataaaaaatcctttataaaaggaataatagagaacgaaaagccgctagacccgtcttccgtaacgcctgtaaaattccgtttggtggtaaattatgccgatcttttcaggactttttcaaccttttcatttacaagagaaacaaccagtttacttgttttaacctgtgattttggtatacctgttttcagcggcgaaagcaggcgttttgaaattcccggtacttttcccgtaagaaggtaa

SEQ ID NO: 72200 - protein, 280 aa, Unknown
  Obtained from environmental sample
  SIGNAL (1)...(19)
  DOMAIN (1)...(159): Late embryogenesis abundant protein
  misc_feature (1)..(280): Xaa is any amino acid
MKKNILWVTAIIMMIAVIACKTVKPAFQEPVISFHSALIPDITIYNAQILCKIQVQNPNSYEIPFPHTGWKLYINEKSYKDGEVKANGKIKARSTVFIDVPVKVEYIDFFKTFKPLIGSKQASYKIAMAVKYSSPDFGEKIWNFDNTGDLPLPQLPSISQPTMVIESVDFSKAVILVTINVENPNAFEIPSPKFTYDYQLNKKSFIKGIIENEKPLDPSSVTPVKFRLVVNYADLFRTFSTFSFTRETTSLLVLTCDFGIPVFSGESRRFEIPGTFPVRR

SEQ ID NO: 72201 - DNA, 783 bp, Unknown
  Obtained from environmental sample
  misc_feature (1)..(783): n is a, c, g, or t
gtgaaatttcacttggcatggatattgctacttgtaatgtataaaaggtggtggattatgaataatacaaagaaaagaaaagatgtttatgacagccttacggtatatttaaaagaattaaaccgtatcccggtatttaccagggaagaagaagaggcgaccgcccgcgcggcggcggctggtaataaagaggcaagacagaaacttattaacgcaaacttgcgctttgttataacagtggcaaaaaaatatcagggacttggattgtctctggaagacctgattagcgaaggtaatgtgggacttatcaacgcggcggatcgtttcgacgtagaaaaaggttaccattttatttcttacgcagtatggtggatacgtcaggcgattataagcgctctttatgaaaaatccagaatgataaggcttccggtaaactgcgccgctgatcttatcaaaatcgacaaagccggaaaaatgattgaaaagcagaatacaccggaagaagaaatcaatgaaattgcggaacttttaaatatggataaaaaccatattaaagaaatcgtcaatatttctaaagagattctttcgctggataacagctctaacagtcaggttcagccgttactggaactcatcgaagacaagcagtatcaatcccctgaaaaacacgctgaatacagctgcatgaaagacgatcttaacaatatgcttgatactttgaacaaagacgaagccgaaattattcgttgtcattacggacttggacggcaggaaatgtcataa

SEQ ID NO: 72202 - protein, 260 aa, Unknown
  Obtained from environmental sample
  DOMAIN (143)...(224): Sigma-70 region 3
  misc_feature (1)..(260): Xaa is any amino acid
MKFHLAWILLLVMYKRWWIMNNTKKRKDVYDSLTVYLKELNRIPVFTREEEEATARAAAAGNKEARQKLINANLRFVITVAKKYQGLGLSLEDLISEGNVGLINAADRFDVEKGYHFISYAVWWIRQAIISALYEKSRMIRLPVNCAADLIKIDKAGKMIEKQNTPEEEINEIAELLNMDKNHIKEIVNISKEILSLDNSSNSQVQPLLELIEDKQYQSPEKHAEYSCMKDDLNNMLDTLNKDEAEIIRCHYGLGRQEMS

SEQ ID NO: 72203 - DNA, 1350 bp, Unknown
  Obtained from environmental sample
  misc_feature (1)..(1350): n is a, c, g, or t
atgaatcaaacaaaacttaaggattatatcgtctattgcgtgcaggaacttgtagtaaacgcgaaaaaagccaacacaaaacgggtatactttacggaacgaggtttggatatcaataatgacggcgattatcttctgggaatgaaggattttaaagaagatacgataggcaacatagcccattatctgcaattacagaaagaaaaagggttgtatattaaaattattctacaggtaaaaagaaatacaattcatatagaaatacgcaacaatgtttccgcaaataaaatggaacaactgcgaatccaggataaaatggcgcgttccagacaatttaactctctggaagacgcgttgtctcaagttcttgacgattccgaaggcgcgggtcttggacttgtaatacttgttctcatgctgaaaaaaatgggaattgatgacgaggcttttgaaatcaaggcaaaaggaaacttaacagtcgccagaatttctataccgcttgataaaacaatgatagacaatatgtcggttttatcaagtgaaattgtgcagaacgttaacagtctgccgcaattcccggaaaatgttttactcatacaaaaacttattaacgatccagcttccgatatgccgatgattgcaagacaaatttcgatggaccccgctcttacggcggatttattaaaaattgtcaattccgcgcaatatatgttgtccaaaaaagttgataatatttcggacgccgtaaaaatgatcggtataaagggaataaaaaacctgctctattcctacggaacgcagaaaatattgggcgatgatacgattgataaaaaggcgctttgggaacattcgtacagaaccgctttttacgcttacaatttggtcaaaaacttcaaaaacgacgcaggtcttctggacgacgtatatatcggcggaatgttacacgacatgggaaaaattgttttctccaatgtacatcccgatcttttaaacaggattaaaggtttctgtaacgaaaagaatcttcccgtggcggcgtttgaagatatttccgcgggcatgaatcacgcggaacttggcgctcttatcgccgaaaaatggaatttcccggataaattggttgcggcaatacggtatcatcacgatcctgaatccgcgccttttgattgcaaagacctgatcgatactgtttatcttgccaatatgttctgcgaatatgaaaacaacaatatcagttttgatcagcttgaaatggaaccgcttgaaaactacggtttaaaaaaccaaaaacaagttgatacattgattgaacggctttccgcgggattcaacaaagaaggacagctttaa

SEQ ID NO: 72204 - protein, 449 aa, Unknown
  Obtained from environmental sample
  DOMAIN (280)...(402): HD domain
  misc_feature (1)..(449): Xaa is any amino acid
MNQTKLKDYIVYCVQELVVNAKKANTKRVYFTERGLDINNDGDYLLGMKDFKEDTIGNIAHYLQLQKEKGLYIKIILQVKRNTIHIEIRNNVSANKMEQLRIQDKMARSRQFNSLEDALSQVLDDSEGAGLGLVILVLMLKKMGIDDEAFEIKAKGNLTVARISIPLDKTMIDNMSVLSSEIVQNVNSLPQFPENVLLIQKLINDPASDMPMIARQISMDPALTADLLKIVNSAQYMLSKKVDNISDAVKMIGIKGIKNLLYSYGTQKILGDDTIDKKALWEHSYRTAFYAYNLVKNFKNDAGLLDDVYIGGMLHDMGKIVFSNVHPDLLNRIKGFCNEKNLPVAAFEDISAGMNHAELGALIAEKWNFPDKLVAAIRYHHDPESAPFDCKDLIDTVYLANMFCEYENNNISFDQLEMEPLENYGLKNQKQVDTLIERLSAGFNKEGQL

SEQ ID NO: 72205 - DNA, 411 bp, Unknown
  Obtained from environmental sample
  misc_feature (1)..(411): n is a, c, g, or t
ttgcctacgccggtgtcccaaaaaagttcgcgtatgtctttaagccgaacctgcgccccattgataaaatattcgctttctccggaacggtacagccgccgtttaatttcgatttccggcatatccattggcagaagacctgtttcattcgcgattgcaagagatacttccgccacattgagtggttttctggcttccgtgccgccgaaaatcacgtcttccattttttccgcgcgaagtgattttatcgcgtgttcgccgagaacccatttgattgcgtcaactacgttggattttccgcagccgtttggtccaagaagggcggtgatgccgtcgttaaattcaatgtcggtgcggtctgcaaaagatttgaagccgagaatcgtaagacgcttaaggaacataaattaa

SEQ ID NO: 72206 - protein, 136 aa, Unknown
  Obtained from environmental sample
  misc_feature (1)..(136): Xaa is any amino acid
MPTPVSQKSSRMSLSRTCAPLIKYSLSPERYSRRLISISGISIGRRPVSFAIARDTSATLSGFLASVPPKITSSIFSARSDFIACSPRTHLIASTTLDFPQPFGPRRAVMPSLNSMSVRSAKDLKPRIVRRLRNIN

SEQ ID NO: 72207 - DNA, 2985 bp, Unknown
  Obtained from environmental sample
  misc_feature (1)..(2985): n is a, c, g, or t
atgttccttaagcgtcttacgattctcggcttcaaatcttttgcagaccgcaccgacattgaatttaacgacggcatcaccgcccttcttggaccaaacggctgcggaaaatccaacgtagttgacgcaatcaaatgggttctcggcgaacacgcgataaaatcacttcgcgcggaaaaaatggaagacgtgattttcggcggcacggaagccagaaaaccactcaatgtggcggaagtatctcttgcaatcgcgaatgaaacaggtcttctgccaatggatatgccggaaatcgaaattaaacggcggctgtaccgttccggagaaagcgaatattttatcaatggggcgcaggttcggcttaaagacatacgcgaacttttttgggacaccggcgtaggcaaaaccgcctattcggtaatggaacagggaaaaatcgatcagatactttcttcaaaaccggaagaacggcgttacttgtttgaagaagcggcgggcattacacgctaccgggaacgcggagcggaagctgagcgtaaccttgccaagactgaggaaaatgtgcgtcaggttgatttgatactgaacgaagtaaaacgcgcccatgacagtttaaaaatacagtcggaaaagacgcttaagtaccgcacactccgcgatgaaatttttaactatgaattagacatacaacttttacgtttaaaacaatttaagtacgaaagagacgaaaagaacgaaaccttaagacgcagaacgcaagaccgcgacaggatacgctcggaaatggaagcggaaaacaaagcgttggaagcgcacatggacgaagtaaactccatggaagcgcggcttgtggaacttcaaaaaaatatttacggtcttgcgctggaaaaaaacgccagagaaaacgaagtgcgcctgttcaacgaacagcgcggcgagaataaagtaaaaatcggtcaaaacgaagagcgcgaaaagcagtctgttcaaaaaataacggaactaaacgccgatgccgaagggcaggacgcggttgtacaggacttaagaaaacagtgcgaaaatatagaagaaaatatccgctcctttgaggaaaatatccagcttgccgcggggcgcataagcgaaaacgacaaagaatcgcacatggcggaaaccgagattcacagcatagaaaaagaacttgccgctctggaaaaagacctcgctaaaataacagacgacatcgtagaggaattggacgccggtttaaaaaaagccggctattccgcggcggaacgcaaaaacgcggaagaagctttacgcgaaacgcttaaccgcctgaaaactctcctttcagacagagaagctcttatccgcgaccttgccgccgcctcaaacgcgtcaggcgcggtagacgcgcaggaaattaaacgcattaccgacaatttatcaaacagccttgcggaagccgcggagggcgcgaataaagccgtcgatctttttaacaattaccgcgaacattcgcccgtctttatcgatgaatttttggctcctcaaggaattatcacaaaaaaacgcacgcttgatacgcaaatcagaaacgcgaaagacggcatagaggaaagacgccaacgtattaaaaaactgcgcgaagataacgttaacctaatggcgaaaatgaatgaataccgcgcaactcttgaagacttgaaagttaaccgcgcgcaaatgaacgcccgcgcccagtccgccgaagatcaggcgcggcttatcaggcgcgaactgtcaggacaggaaggccttttaaaaaatatccgcgacgaactttccctgtaccgcaaaagacaggaagaacttaacgagcgcattacggcggctcaaacggagatcgcgggaattgaggaaaagacaaaagcgtattcctccgatttggaaaaattggaaaacgatattcgcaaaagaaacgataatgtcgccagtaagaaagaaacgattaacaagcggactttggaactttcaaaagtgcaggaatcgctggaaaaaattcacttggaaattgttcagtccgacatggaaataaaaaacattcaggagaatttcagagagacccattccagggatttaatggagtttgaggaacgcatattcagcattacaaccgccccggctgtactgcgcgaaaaacttgccttttcgcgcgcaaagatgaaagaactcggctcagtaaatctcatggctcccgaagaattcgccgaaacaaaacagcgatacgattttctcaacaatcaaatggcggacttacaaaaagcgcgcaaagaccttgaagaccttacggcggaaatacgacaggaaacttcgcaattattcattgacacttacaaccgcataaagaaaaattttcacaatatgttccgccgtctcttcggcggcggcagagcggaacttcggctctccgacccgaaccatgtgttggaatcgggcatagaaattttcgcccagccgcccggaaaaaaactggaacacctaagcctgctctcaggcggcgaatgttcaatgacagcggtagcccttttattcgccacctacatggtaaagccaagccccttctgtctcttggacgaaattgacgccgcccttgacgaacaaaacgtcgggcgctttgttcaccttcttaacgagttcagcgactcaagccagttcatcataatcacacacaacaaaaaaacaacatccggcgcgggaacgctcatcggcgtaaccatgcaagagtccggcgtaacaaaagtaatttcagctaggtttaagcaaggcgaacttgatgtagcggactcatcgccgccgcaaaccgagttatgggacgccgacggcaagtttgaagaagaagacgtcgcgcccgaagcgggaagagagctgcccgtcggcgttaacgacccgaagaaagtaacggacgcgcagttaagaccgattaggtcgcgcacgacgaatgggtcgagttctgaataa

SEQ ID NO: 72208 - protein, 994 aa, Unknown
  Obtained from environmental sample
  DOMAIN (2)...(922): RecF/RecN/SMC N terminal domain
  misc_feature (1)..(994): Xaa is any amino acid
MFLKRLTILGFKSFADRTDIEFNDGITALLGPNGCGKSNVVDAIKWVLGEHAIKSLRAEKMEDVIFGGTEARKPLNVAEVSLAIANETGLLPMDMPEIEIKRRLYRSGESEYFINGAQVRLKDIRELFWDTGVGKTAYSVMEQGKIDQILSSKPEERRYLFEEAAGITRYRERGAEAERNLAKTEENVRQVDLILNEVKRAHDSLKIQSEKTLKYRTLRDEIFNYELDIQLLRLKQFKYERDEKNETLRRRTQDRDRIRSEMEAENKALEAHMDEVNSMEARLVELQKNIYGLALEKNARENEVRLFNEQRGENKVKIGQNEEREKQSVQKITELNADAEGQDAVVQDLRKQCENIEENIRSFEENIQLAAGRISENDKESHMAETEIHSIEKELAALEKDLAKITDDIVEELDAGLKKAGYSAAERKNAEEALRETLNRLKTLLSDREALIRDLAAASNASGAVDAQEIKRITDNLSNSLAEAAEGANKAVDLFNNYREHSPVFIDEFLAPQGIITKKRTLDTQIRNAKDGIEERRQRIKKLREDNVNLMAKMNEYRATLEDLKVNRAQMNARAQSAEDQARLIRRELSGQEGLLKNIRDELSLYRKRQEELNERITAAQTEIAGIEEKTKAYSSDLEKLENDIRKRNDNVASKKETINKRTLELSKVQESLEKIHLEIVQSDMEIKNIQENFRETHSRDLMEFEERIFSITTAPAVLREKLAFSRAKMKELGSVNLMAPEEFAETKQRYDFLNNQMADLQKARKDLEDLTAEIRQETSQLFIDTYNRIKKNFHNMFRRLFGGGRAELRLSDPNHVLESGIEIFAQPPGKKLEHLSLLSGGECSMTAVALLFATYMVKPSPFCLLDEIDAALDEQNVGRFVHLLNEFSDSSQFIIITHNKKTTSGAGTLIGVTMQESGVTKVISARFKQGELDVADSSPPQTELWDADGKFEEEDVAPEAGRELPVGVNDPKKVTDAQLRPIRSRTTNGSSSE

SEQ ID NO: 72209 - DNA, 330 bp, Unknown
  Obtained from environmental sample
  misc_feature (1)..(330): n is a, c, g, or t
atggattttgttcgccaagttgtaaatagtaactctttgacatcggttttaaatttaccgccgtcttttcgtgatgttcaggtggaagttatcgtactgcctgttaatgacaagacagcgacagtcgcttcctcgccttccggctcttatgatgtaaaaaaaccggtaaaacattcagcgtttggacggttaaaagcctatgccaatccttctcttataccggaggaaaaaggcgcatgggaaaaggcaacggcggaaaatatcactattcagacctttgatacaaaacttgaaaaattacttacgataatagcaaacacgcacgagtga

SEQ ID NO: 72210 - protein, 109 aa, Unknown
  Obtained from environmental sample
  misc_feature (1)..(109): Xaa is any amino acid
MDFVRQVVNSNSLTSVLNLPPSFRDVQVEVIVLPVNDKTATVASSPSGSYDVKKPVKHSAFGRLKAYANPSLIPEEKGAWEKATAENITIQTFDTKLEKLLTIIANTHE

SEQ ID NO: 72211 - DNA, 1815 bp, Unknown
  Obtained from environmental sample
  misc_feature (1)..(1815): n is a, c, g, or t
atgataaataaaagaaaaactaaaattgtatgttctttaggtcccgcatcttcctcggatcccgttgtacgcgaccttatacttgccggaatgaatgtggcgcgtcttaatttttctcacggggatcaaaaatcgcatcttgcttcaatagatcaggtcaggcgtatatccgccgaattgggaacacccgtcgcgcttctgctggacaccaaaggacctgagatacgaacgggtatggtggagaatgacggcactgttacgataaataaaggggacgatgttgttattgttaccgatgattctcttaccacggcggcggaaaacgggaagcccgcgcgtatttcattatcgtggaaagaagccggagaaaaattgcaaaacggacatcgcgttcttattgcggacgggcttcttgaacttgaagtgatagatacagcgggaggcatcaagtgccgcgcgaacaataccgccgtcattgggagcaaaaaaaacgtcaaccttatcggcgtacacgctggacttcccattatgggcgaacaggataagaaagacttggaattcggcgtatcaatggaacttgattatgtcgccgcgagttttttgagctttccccacgaagtaaccgagataagaaaattccttgaaagccactcttcccgcatgaaaatcatagctaaaattgaaagcggcgaaggcttggaaaatataaaagagattgccaatcttgcggacggcgtaatggtagcgcgcggcgaccttggcgtacagctccccaccgagcagattcccttagcgcaaaaacacattattaatgtgtgccgcagagcgggaaaacccgtcattaccgcgacccaaatgctggactcaatgatacataacccgcgacccacccgcgcggaactgaccgacgtggcaaacgcgatactcgacggaaccgacgcaatcatgctctccggcgaaaccgcgcagggagcgtatccggtggaagccgtaaaaacgatggacaaaatagcatgcaccattgagcagtctgatgaattccgcgtacgcatgagaaattttcacgaagaatgtcactccgaagtacacaacccgaaagagaatctgggtatcataatgtcgagatcgggagttgaaatagcgacggctgtaaaggcaaaagccatagtaacgccgacccaaagcggcaataccgcgcgaatcctcagcgtattcagaccggacgagccgattcttgccgtaaccacagaagcgcgcgctgaacgccttatgcagttatactggggcgtcaacaccagtatcaagtcgaaagttgaagattcggagaccatgatacacaacaccatgaaagttgtttcggagaccgggatagcgggcatatcggataaaatagttctcattgccggcttgccgcttgaaagcccgaacatgataaacaatgtccgcgtcgtaattatcgggacagttctagcccgttcaagcgccggcggttacgcaaatcccgacgttattcgcgcgcagggcaagatagtccacgccgcgactcccgacgaagcccgcaaaaaaatcatgtcagcaggcaaaggcagtatactcatttgcaaagagcttaccgaagactacatatccgttataagcatggtaagcggaatcatttgcgaaggggtctcggtaatcggtgaagaaaaactgcgcctctttaaccccaatcttgtctggcttacccacatcagagacgccgcaaaaaaactggaacacggattaacggtaacaatagacggaaaagagttgcttgtttatgagggtgcgatttaa

SEQ ID NO: 72212 - protein, 604 aa, Unknown
  Obtained from environmental sample
  SIGNAL (1)...(19)
  DOMAIN (373)...(485): Pyruvate kinase, alpha/beta domain
  misc_feature (1)..(604): Xaa is any amino acid
MINKRKTKIVCSLGPASSSDPVVRDLILAGMNVARLNFSHGDQKSHLASIDQVRRISAELGTPVALLLDTKGPEIRTGMVENDGTVTINKGDDVVIVTDDSLTTAAENGKPARISLSWKEAGEKLQNGHRVLIADGLLELEVIDTAGGIKCRANNTAVIGSKKNVNLIGVHAGLPIMGEQDKKDLEFGVSMELDYVAASFLSFPHEVTEIRKFLESHSSRMKIIAKIESGEGLENIKEIANLADGVMVARGDLGVQLPTEQIPLAQKHIINVCRRAGKPVITATQMLDSMIHNPRPTRAELTDVANAILDGTDAIMLSGETAQGAYPVEAVKTMDKIACTIEQSDEFRVRMRNFHEECHSEVHNPKENLGIIMSRSGVEIATAVKAKAIVTPTQSGNTARILSVFRPDEPILAVTTEARAERLMQLYWGVNTSIKSKVEDSETMIHNTMKVVSETGIAGISDKIVLIAGLPLESPNMINNVRVVIIGTVLARSSAGGYANPDVIRAQGKIVHAATPDEARKKIMSAGKGSILICKELTEDYISVISMVSGIICEGVSVIGEEKLRLFNPNLVWLTHIRDAAKKLEHGLTVTIDGKELLVYEGAI

SEQ ID NO: 72213 - DNA, 471 bp, Unknown
  Obtained from environmental sample
  misc_feature (1)..(471): n is a, c, g, or t
atgcgtacgcggaattcatcagactgctcaatggtgcatgctattttgtccatcgtttttacggcttccaccggatacgctccctgcgcggtttcgccggagagcatgattgcgtcggttccgtcgagtatcgcgtttgccacgtcggtcagttccgcgcgggtgggtcgcgggttatgtatcattgagtccagcatttgggtcgcggtaatgacgggttttcccgctctgcggcacacattaataatgtgtttttgcgctaagggaatctgctcggtggggagctgtacgccaaggtcgccgcgcgctaccattacgccgtccgcaagattggcaatctcttttatattttccaagccttcgccgctttcaattttagctatgattttcatgcgggaagagtggctttcaaggaattttcttatctcggttacttcgtggggaaagctcaaaaaactcgcggcgacataa

SEQ ID NO: 72214 - protein, 156 aa, Unknown
  Obtained from environmental sample
  misc_feature (1)..(156): Xaa is any amino acid
MRTRNSSDCSMVHAILSIVFTASTGYAPCAVSPESMIASVPSSIAFATSVSSARVGRGLCIIESSIWVAVMTGFPALRHTLIMCFCAKGICSVGSCTPRSPRATITPSARLAISFIFSKPSPLSILAMIFMREEWLSRNFLISVTSWGKLKKLAAT

SEQ ID NO: 72215 - DNA, 879 bp, Unknown
  Obtained from environmental sample
  misc_feature (1)..(879): n is a, c, g, or t
gtgaggacgattttatcatgcgcggctgtttctggtgttgttaaggcagcgggagcagccggattattaactgatgaagaagttaataaagcagtcaagtccattaatgcgtcctctaaagccataggcactgctgcggaagatattactccggagcaggaatactacatcggcagagcggtagcggcaaatattctttcttcttacaaactctatactaaggatcgaaagctgactaattacttaaacgatatctgctacgccataacaattaattctactcgtccgaatatttataagggttatcatgttgcattgctggacagcaatgaaataaacgcctttgcgacttccggcggacatatttttgttacgcgcggacttgttaaagccgctaagtccgaagacgcgcttgccggagttatagcgcatgaagtcgcccacattcaattacggcacagcattaacgcgataaaaaacagccgttttgctaatgctgtaatggtaacaggcacggcggcagccagcgtgacgacaggagtggatgaaaaagaaataaccgcttttatgaatgaatcggtaggggacattgtacaaacgctatttaataatggttattcacaagctcaagaatttgatgccgacaataccgcaatgaagcttatggcatgggcgggatacaacccgtcaggtttgatagaaatgcttaaatcattgagcactgtccaaaaacccggtgttggtcttggcaagacgcacccaactcccactcaacgtataaacaatgctgaaatgcaggtatcagtattacaattatatagtgatgtcagtgatacaagcgcgagaagaaaagcgcggtttgcttctgcgacaaaatag

SEQ ID NO: 72216 - protein, 292 aa, Unknown
  Obtained from environmental sample
  SIGNAL (1)...(16)
  DOMAIN (85)...(268): Peptidase family M48
  misc_feature (1)..(292): Xaa is any amino acid
MRTILSCAAVSGVVKAAGAAGLLTDEEVNKAVKSINASSKAIGTAAEDITPEQEYYIGRAVAANILSSYKLYTKDRKLTNYLNDICYAITINSTRPNIYKGYHVALLDSNEINAFATSGGHIFVTRGLVKAAKSEDALAGVIAHEVAHIQLRHSINAIKNSRFANAVMVTGTAAASVTTGVDEKEITAFMNESVGDIVQTLFNNGYSQAQEFDADNTAMKLMAWAGYNPSGLIEMLKSLSTVQKPGVGLGKTHPTPTQRINNAEMQVSVLQLYSDVSDTSARRKARFASATK

SEQ ID NO: 72217 - DNA, 804 bp, Unknown
  Obtained from environmental sample
  misc_feature (1)..(804): n is a, c, g, or t
atgctgagtctgcatagcaaaatccgcgaaatatacgctcaccctttcggacatgacattatagacaaactgctccttgaaatggcaaaaccggactggctgattaataatcccatcgtcggaaaccttacccttaataccattaaaaaatttattccccaaaaaataggctcgagttttattgacaccgttcttgatttattaaacaccgaatccgagatcccggaaattaacacggcggaatcaaaacccgcgtggtggaaagaatcggtattttaccaaatctatccgcgcagtttcggaaagaacggcacatcctgcgtcctacgcggaatattggcgaagctggactacctccgcgcgctcggcgttgatgccgtgtggctaagccccgtttacgattccccgaatgacgacaacggctatgacatacgcgactattacaaaatactgcctgagtacggaaccatggaagacatggacaccctaatcgcgggtttgcacgatcacggcatgaagctgatcatggatcttgtcgtcaaccatacatctgatgaacacccctgggtttcatcggcatntaacgatgaanactcgccgtaccgcgacttttatattttccgcaaatcaaaagacaagcctccaaacaactggacttctttcttcggcggctcaacgtggaattactatcccaagcaggatgtttgggcgctcccctgttctccaaaaacaaatggacttaaactgggaatgtcccgcgttacgcgaagagatttacaaaatggtacgctggtggctggctaa

SEQ ID NO: 72218 - protein, 267 aa, Unknown
  Obtained from environmental sample
  DOMAIN (94)...(267): Alpha amylase, catalytic domain
  misc_feature (1)..(267): Xaa is any amino acid
MLSLHSKIREIYAHPFGHDIIDKLLLEMAKPDWLINNPIVGNLTLNTIKKFIPQKIGSSFIDTVLDLLNTESEIPEINTAESKPAWWKESVFYQIYPRSFGKNGTSCVLRGILAKLDYLRALGVDAVWLSPVYDSPNDDNGYDIRDYYKILPEYGTMEDMDTLIAGLHDHGMKLIMDLVVNHTSDEHPWVSSAXNDEXSPYRDFYIFRKSKDKPPNNWTSFFGGSTWNYYPKQDVWALPCSPKTNGLKLGMSRVTRRDLQNGTLVAG

SEQ ID NO: 72219 - DNA, 1281 bp, Unknown
  Obtained from environmental sample
  misc_feature (1)..(1281): n is a, c, g, or t
ttgtcgtcaaccatacatctgatgaacacccctgggtttcatcggcatntaacgatgaanactcgccgtaccgcgacttttatattttccgcaaatcaaaagacaagcctccaaacaactggacttctttcttcggcggctcaacgtggaattactatcccaagcaggatgtttgggcgctcccctgttctccaaaaacaaatggacttaaactgggaatgtcccgcgttacgcgaagagatttacaaaatggtacgctggtggctggctaaaggcgtagacggcttccggcttgacgttatcaattatatttccaaaaatcccggccttaaaaacggcgatccgtttatcggatcgctgctgacatataccggcattgaacattatttttacgggcccaaacttcacgaatacctgaaagaactccgcgccaaagcgtttgatccctacaacgcgttttccgtcggggaaacgcccggcatcggcgtacaaacggggcggcttctgacagacgattaccgccgcgagcttgatttgatttttatatttgatcatctggtatcgccgggccacacccgttttgacaaccaccgttacagcaagtcgtacttaaaacgtttttatcagacgcacctgaacgccgatctggggcacggctggaacacgctgtttttcaataaccacgacaatccgcgcatggcgtcaaagattgacccggagggcaagtacaccgcgccgctgacaaaacttctcgctgtgttacagttaacgctcaggggcacgccctttttgtaccagggcgatgaagccgccgtttgcaatgtaaagttcagctccattgacgagattaccgacgtcgaaagcaagggcctgtacgccgagctgataaagaccatgccgcccgacaaggcgttcaagcaaatacttgcgggaacccgcgatcacgcgcgcgcacccatagactgggaggaacacgagcgcctgcgcggcacgccggattcgatatggtgtttttacagggaccttatcattctgcgccgttcatcaaaggcgcttatttacggcgatctggaattcctgcgcccccgcgataaaaagatattatgctatacccgccgtttggggaacgaatgtttttacattgaagcgaacctcagccatgacaagggcagatgcaaagccaaacccgacatggttctgttattcggcaactacggcaagacagcaggcaagacgctgcgcccctacgaagcgcggatataccatacaaaagaaaaatga

SEQ ID NO: 72220 - protein, 426 aa, Unknown
  Obtained from environmental sample
  DOMAIN (2)...(317): Alpha amylase, catalytic domain
  misc_feature (1)..(426): Xaa is any amino acid
MSSTIHLMNTPGFHRHXTMXTRRTATFIFSANQKTSLQTTGLLSSAAQRGITIPSRMFGRSPVLQKQMDLNWECPALREEIYKMVRWWLAKGVDGFRLDVINYISKNPGLKNGDPFIGSLLTYTGIEHYFYGPKLHEYLKELRAKAFDPYNAFSVGETPGIGVQTGRLLTDDYRRELDLIFIFDHLVSPGHTRFDNHRYSKSYLKRFYQTHLNADLGHGWNTLFFNNHDNPRMASKIDPEGKYTAPLTKLLAVLQLTLRGTPFLYQGDEAAVCNVKFSSIDEITDVESKGLYAELIKTMPPDKAFKQILAGTRDHARAPIDWEEHERLRGTPDSIWCFYRDLIILRRSSKALIYGDLEFLRPRDKKILCYTRRLGNECFYIEANLSHDKGRCKAKPDMVLLFGNYGKTAGKTLRPYEARIYHTKEK

SEQ ID NO: 72221 - DNA, 1734 bp, Unknown
  Obtained from environmental sample
  misc_feature (1)..(1734): n is a, c, g, or t
atgaagtacacaggcgcgcaaatattggttgagtctctgattgagcagggagtggatacgattttcggctatcccggcggcgcagtcttaaatatttatgatgaactctacaaacacagcgacaagattcgccatatccttgtaagccacgaacagcacgccgcccacgccgcggacggttatgcccgatccaccggaaaaacaggtgtgtgcttagcgacttcgggacccggcgcgacaaatcttataacaggaatcgccacggcgtacatggattcaattccgatggtagccattacaggcaacgtccccactggaatattgggcaaggacagttttcaggaagttgacattacaggcatttccatgccgatagtaaaacataactggattgtaaaaaatgttgacgaccttgcggaagttatccgcgaagcgtttgagcttgcctcatcaggtcgtcccggacccgtacttatcgacataccaaaagatattaccgcgctgagcgccgaatggagtccgtcaaagaaaaagaaaggcgagttaaaagacgagactctttccgcgcgggcgaagcgtcttgacgaacgcacctcaagagtcagatttacagacgaagaagtggaaaccgccgccgcaatgattaagaaagcgaagcgtcctctgctctacgcaggcggcggaatcataagcgcagcggcggaagaagaacttatcgccctcgcagaaaaacttaacgctcctgtggcgttaagcctcatggggataggctcgataccgaaagatcaccgtctctgcacgggtcttgtcggaatgcacgggactgtggcaagcaacaaggcgacgcagaagacagacttacttatcgcaatcggcgcgcgtttttccgacagagttacaagcaaggcggatatgttcgccaaaacggcgaaggtaattcactttgatattgacccggcggagattagcaagaacattgatacccacgcgtgggtgataggaaatttaaaagacactcttaaatgtttgttgtcaaaacttcccgctcgtcttaaaaccgaatggggcggcgaaattgacaaatggaaaacccatctgccgcaaacttacacccatgaggttacgttcgccaagaacgccctccaccctcgctttatcatagaagaaacagcgaaggcgttggggtccgaaacaatcgccgttaccgacgttggtcagcatcaaatgtgggcggcacagttcttccccgctgaaaagccgagaacatttataagctcaggcggactggaacaatgggctttcggccttggcgcggctggcggcgcgaaagtggcgaaccccggaaaacccgtggcgctttttaccggcgacggcagtttcaggatgaactgcgcggagatggcgaccctaagcaacaataaaattccgcttttaataattctttttaacaacggagttctgggcatggtaaggcaatggcagagtttcttttacgagggccgctactcgcagacaaccctgggcgcgtatcccgactttataaaactctgcgacgcctacggcataaaaggtttccgcgccaacagcagggattccttcaggaaggccctccacgccgccgccgaagagctgtccgccggaaggcccgcgctgattgaagccgacatagaccgcgacgaaaacgtcctaccgatggtcccatccggcaaaccgatagacgaacaaattctataa

SEQ ID NO: 72222 - protein, 577 aa, Unknown
  Obtained from environmental sample
  DOMAIN (207)...(366): Thiamine pyrophosphate enzyme, central domain
  misc_feature (1)..(577): Xaa is any amino acid
MKYTGAQILVESLIEQGVDTIFGYPGGAVLNIYDELYKHSDKIRHILVSHEQHAAHAADGYARSTGKTGVCLATSGPGATNLITGIATAYMDSIPMVAITGNVPTGILGKDSFQEVDITGISMPIVKHNWIVKNVDDLAEVIREAFELASSGRPGPVLIDIPKDITALSAEWSPSKKKKGELKDETLSARAKRLDERTSRVRFTDEEVETAAAMIKKAKRPLLYAGGGIISAAAEEELIALAEKLNAPVALSLMGIGSIPKDHRLCTGLVGMHGTVASNKATQKTDLLIAIGARFSDRVTSKADMFAKTAKVIHFDIDPAEISKNIDTHAWVIGNLKDTLKCLLSKLPARLKTEWGGEIDKWKTHLPQTYTHEVTFAKNALHPRFIIEETAKALGSETIAVTDVGQHQMWAAQFFPAEKPRTFISSGGLEQWAFGLGAAGGAKVANPGKPVALFTGDGSFRMNCAEMATLSNNKIPLLIILFNNGVLGMVRQWQSFFYEGRYSQTTLGAYPDFIKLCDAYGIKGFRANSRDSFRKALHAAAEELSAGRPALIEADIDRDENVLPMVPSGKPIDEQIL

SEQ ID NO: 72223 - DNA, 1671 bp, Unknown
  Obtained from environmental sample
  misc_feature (1)..(1671): n is a, c, g, or t
atgaaaagcgattctgtaaacaagggtattgcccgcgcgcctcaccgctcgctctttaaggcgttgggttttattgaagaagaatttaaaagaccgttaatagggattgcctgcgcgaaaagcgaaatagtgccgggtcatctgcaccttgataatatcgcgcgcgccgccgccgacggtgttcgcatggcaggcggtgtgcctgtaacatttcccgtaatcggcgtatgcgacggaatagcgatgggtcacgagggaatgagatactccctgccgacaagggaacttatcgccgactcgattgaatgtatggcgaccgctcacgcatttgacgcgcttgtctttattcccaactgcgacaagatagtgccgggtatgctcatggcatcggctcggctcaaccttccgtccgtttttgtttcaggcggaccgatgctcgccgggcgcaaggacggaaaaccgttaacgcttacaacaatgtttgaggcggttggcgctgtcgccgccggaaagatcagtgaagcggaacttgaggaacttgaaaacctttcctgcccgggatgcggctcttgcgccggaatgtttacggcaaactcaatgaactgcgtaaccgaagcgttgggaatggctctgccgggcaacggcactatccctgccgtaatggcggaacgtatccgtctggcaaaaaaaacaggaatgttaattttggacgtacttaaaaaagacctgcgtcctaaaagcatactcacagaaaaagcgttcatgaacgccctcgccctcgacatggcgctaggctgttctacaaataccgcgcttcatcttccagccattgccggtgaagcgggcttcaaactcgatctggaacttcttaacaaggtaagcgcggttactcccaatctttgccgccttgcccccgcgggaaaagacgcaatcgaagacctgcacacggctgggggaattcccgctgtctttaaggaactttcaaaaaagaaccttgtcgatcttaaagccgccacagtgtacggttgtcttggcgatgcgttgggcaaggcggaaaaccgcaaccccgatgtaataaaaccgattgaaaatccctactctgcgacaggagggcttgccgcgttgaaaggaaacatcgctcaagacggctgtgtcgtaaagcgaagcgcggtagcgccttccatgttgaaacacgaaggaccggcgagagtctttgattccgaggaaacggcgtttaacgctatcatgggaaagaaaataaatgcgggagacgttgtcgttattcgttacgaaggaccgaaaggcggtcccggtatgaaggaaatgttagctcctactgcggctctcgcaggcatggggctagacgataaagtcgccctgattacggacgggcgattttcaggcgcatccaaaggcgcgtctatcggtcacgtttcgccggaagccgctttaggcggaaatatcggcatcattaacgaaggcgacatcatcgccattgacattgacgggctttcgataaatgtgaagattagtgatgaagaaattgagcggcggcgcaaaaattggaagcctctttccaagaaccctgtcggttatcttgcccgttatgccgcgcaagtcggctcagccgcgtcaggagcggtttttactgagccgcgaaaaggagattaa

SEQ ID NO: 72224 - protein, 556 aa, Unknown
  Obtained from environmental sample
  DOMAIN (31)...(550): Dehydratase family
  misc_feature (1)..(556): Xaa is any amino acid
MKSDSVNKGIARAPHRSLFKALGFIEEEFKRPLIGIACAKSEIVPGHLHLDNIARAAADGVRMAGGVPVTFPVIGVCDGIAMGHEGMRYSLPTRELIADSIECMATAHAFDALVFIPNCDKIVPGMLMASARLNLPSVFVSGGPMLAGRKDGKPLTLTTMFEAVGAVAAGKISEAELEELENLSCPGCGSCAGMFTANSMNCVTEALGMALPGNGTIPAVMAERIRLAKKTGMLILDVLKKDLRPKSILTEKAFMNALALDMALGCSTNTALHLPAIAGEAGFKLDLELLNKVSAVTPNLCRLAPAGKDAIEDLHTAGGIPAVFKELSKKNLVDLKAATVYGCLGDALGKAENRNPDVIKPIENPYSATGGLAALKGNIAQDGCVVKRSAVAPSMLKHEGPARVFDSEETAFNAIMGKKINAGDVVVIRYEGPKGGPGMKEMLAPTAALAGMGLDDKVALITDGRFSGASKGASIGHVSPEAALGGNIGIINEGDIIAIDIDGLSINVKISDEEIERRRKNWKPLSKNPVGYLARYAAQVGSAASGAVFTEPRKGD

SEQ ID NO: 72225 - DNA, 1158 bp, Unknown
  Obtained from environmental sample
  misc_feature (1)..(1158): n is a, c, g, or t
atgaaattttcagttgcggtaatacccggagacggaatcggacccgaagttatagcgccgactctcgaagttcttgacgctgttggagacaagtacggtcatatttttaactatgtcgaacttgaagccggcggtcttgccattgatcacacgggagagccgcttccgcaagaaacgcttgaagcggcgaagcagtgcgacgcccttctcttgggcgcggtcggcggtcccaagtgggacacgcttcccggacatctgcgtcccgaaagagcgttgcttggtcttcgctccgggcttggcgttttcgctaatcttcgccccgccgccctgctccctcaattaaaatcggcttgccccgttaaagacgaagtgcttatcgcaagcaacagcgaaggaaaagccgctttcgatttattaatcgtaagagaattgacaggcggtctttacttcggcaaacgaggacgaattgacgaaccttcaaacggacacactcccggcgcggcttttgataccgaaacatattcatgggcggaaattgaacgcgtactccgagcaggttatgaagcggcggcggtacggcggaaaaaactctgcgtagtggacaaggcaaacgtgcttgagtcgtcccgtttttggcgcgaagtagcggcggtagtttcaaaggactatcccgacatagagacaagttacctctacgttgacaacgccgccatgcagttgatccgcgctcccggacaattcgacgttatcgttacatcaaatctttttggagacatactttccgacgaggcatccgtgcttacaggttcaatcggtatgctcgcctcggcgagtctcggcgcgccagcgcagggcggaacaagaccgggaatgtacgagcctattcacggctccgcccccgacatcgcggggaaagacatagcgaatccgctggcaacaattctttcggcggcgatgatgctccgctactctttcggtcttgaaaaagaagccgttgccattgaaacagcggtcaacaatgtgctggatcagggactgcggacaggagacatcgcaagcagaagtaatgcgaactgcgcagcaagcagcggcggtgaaaaaattgtagggacaaaagcaatgggcgaagctgtgctcaaagcgttggagaaattatga

SEQ ID NO: 72226 - protein, 385 aa, Unknown
  Obtained from environmental sample
  DOMAIN (4)...(378): Isocitrate/isopropylmalate dehydrogenase
  misc_feature (1)..(385): Xaa is any amino acid
MKFSVAVIPGDGIGPEVIAPTLEVLDAVGDKYGHIFNYVELEAGGLAIDHTGEPLPQETLEAAKQCDALLLGAVGGPKWDTLPGHLRPERALLGLRSGLGVFANLRPAALLPQLKSACPVKDEVLIASNSEGKAAFDLLIVRELTGGLYFGKRGRIDEPSNGHTPGAAFDTETYSWAEIERVLRAGYEAAAVRRKKLCVVDKANVLESSRFWREVAAVVSKDYPDIETSYLYVDNAAMQLIRAPGQFDVIVTSNLFGDILSDEASVLTGSIGMLASASLGAPAQGGTRPGMYEPIHGSAPDIAGKDIANPLATILSAAMMLRYSFGLEKEAVAIETAVNNVLDQGLRTGDIASRSNANCAASSGGEKIVGTKAMGEAVLKALEKL

SEQ ID NO: 72227 - DNA, 1629 bp, Unknown
  Obtained from environmental sample
  misc_feature (1)..(1629): n is a, c, g, or t
atgagtaaagaacaaacgccgtccaatttaacgcctctggaaattcttgacactactctaagagacggcgctcagggcgagggtattaccttttctgtacaggacaaacttgacgtggttcgcgcgttagacgatctcggaatagcatggatcgaggcgggaaacccgggaagcaatcctaaggatatggaatttttccgtcttgccgaaaaccttaaacttaaacacgcgaaactctgcgccttcggcgctacgcgaaaaaaaggagtcaaggcgagcgaggactcaagtcttttgagtctgcttgacgctcaaacgcaagcggtagttatcttcggcaagagctgggaccttcatgtgttggaagttttgcgggtaagccatgaggaaaaccttgcgatgatttcggagacgataactttccttaaagaaaaagggaagcaggttttttacgatgccgaacatttttttgacggctggaaagcgaaccccgaatacgcccttactaccctgaagaccgctgtgaccgcaggagcacagcgcataatactgtgcgacacaaacggcggaacattccccgacacgatagaaaaagcggttaaggaagcggcaaagattatcggcgataacgataaatgccttctgggtattcacgctcataacgatgccgacatggcaagcgcaaacactattaccgccgttcttgccggatgccgccacgttcagggaactcttgtcggcttcggcgagaggtgcggcaacacaagcctcgcggcggtcatgcccagccttgaactaaaactcggtttccgctgtctgccggaaggaaagatggaaatgctttccgagataacccaaattgtcgcggagacggcaaatgtcgccgtgccgggcaatatgccctatgtgggaagccacgcgtttacccacaaggcgggaatgcacgcggacggaattttaaaagtgagcaaatcttttgagcatatcgatccttctcttattgggaatgatcggcatatagtaatgagcgaagtcggcggacgttcggcaatagctgaaagagcgaaaaagatcgatccttccattacgagggatcaccctgtaacgatctctcttgcgcaaaagttaaaaaaccttgaggcggacggctggcagtttgaaggcgcggacggcagttttgatcttttggttcgccgagagcttggtcggtacaagccgctgtttaacattgaggcttaccgcgtggtaagcgaacacccgacgggcgaaacaatcgcctgttcccacgcgtgggtaaaagttcatgttgacggacaggaagaaatagccgccgccgaaggagccggacctgtcaacgcgatggacggcgcgcttcgcagggcgttgaaacatttttacccggaactgcaagaggttcgtcttaccgactacaaagtcagggtaatagacggcaacgccgcgacagcggcgaaggttcgcgtattaatcacttcttccgacggcaaacaaagctggacgacggtaggagtttcggaagacatcatcgacgcaagccgatctgcgcttgtggattcaatagaatacaaattaattgaagatatagaacgacgctttaaagcgtatttatag

SEQ ID NO: 72228 - protein, 542 aa, Unknown
  Obtained from environmental sample
  DOMAIN (21)...(294): HMGL-like
  misc_feature (1)..(542): Xaa is any amino acid
MSKEQTPSNLTPLEILDTTLRDGAQGEGITFSVQDKLDVVRALDDLGIAWIEAGNPGSNPKDMEFFRLAENLKLKHAKLCAFGATRKKGVKASEDSSLLSLLDAQTQAVVIFGKSWDLHVLEVLRVSHEENLAMISETITFLKEKGKQVFYDAEHFFDGWKANPEYALTTLKTAVTAGAQRIILCDTNGGTFPDTIEKAVKEAAKIIGDNDKCLLGIHAHNDADMASANTITAVLAGCRHVQGTLVGFGERCGNTSLAAVMPSLELKLGFRCLPEGKMEMLSEITQIVAETANVAVPGNMPYVGSHAFTHKAGMHADGILKVSKSFEHIDPSLIGNDRHIVMSEVGGRSAIAERAKKIDPSITRDHPVTISLAQKLKNLEADGWQFEGADGSFDLLVRRELGRYKPLFNIEAYRVVSEHPTGETIACSHAWVKVHVDGQEEIAAAEGAGPVNAMDGALRRALKHFYPELQEVRLTDYKVRVIDGNAATAAKVRVLITSSDGKQSWTTVGVSEDIIDASRSALVDSIEYKLIEDIERRFKAYL

SEQ ID NO: 72229 - DNA, 1029 bp, Unknown
  Obtained from environmental sample
  misc_feature (1)..(1029): n is a, c, g, or t
ttgaagtatataggaggttattttatggcgcacatgtattacgaaaaagactgcgatttggcgatgcttaaaagcaaaacaattgcggtaattggttacggttcacagggacacgctcacgccctgaacgctaaggaatcgggtttaaaagtgattgtcggtctttatgaaggttcaaaatcatggaaaaaagcggaagaggcgggctttcaggtaatgacggcgaaagacgctgcgcaggctgcggactttatcatgatcctgattaacgatgaaaagcaggcggctctttacagggaatcaatcgctcccgctcttaaaaaggggaaaactctgtcatttgcccatgggttcaacattcatttcgggcagatagtaccgccgccagatgtcaatgttgtgatgatcgctcccaagggacctggtcatacagtacgtgagcagtacaagaacggcgcaggcgttccctgtcttattgctattcatcaggacgcggacggagatgctaaaaaattggctttagcttatgcggctggtatcggaggagcgcgggcaggagttctggaaacaacttttaaagaagaaaccgagactgatcttttcggcgagcaggcggtactctgcggcggcgtttcagcgctgatgaaggcgggttacgaggtgcttgttgaggcgggttatcagcctgagagcgcgtattttgaagtaatgcacgagatgaagctcattattgatcttgtaaaccggggcgggctttcctttatgcgttattcaatttccgacacggcggaatacggcgactatgttacaggacctaagatcatcaccgaggaaacaaagaacacaatgcgacaagtgttaaaaaatattcaaaacggcagttttgcgcgggactggatacttgaaaatcaagtgaaccgtccattctttaaccgcatgagggcgattgaggcggaacacccaatcgagaagaccggaaacgagcttcgcggaatgatgtcctggttaaagaagaacgaggaaaaataa

SEQ ID NO: 72230 - protein, 342 aa, Unknown
  Obtained from environmental sample
  DOMAIN (192)...(337): Acetohydroxy acid isomeroreductase, catalytic domain
  misc_feature (1)..(342): Xaa is any amino acid
MKYIGGYFMAHMYYEKDCDLAMLKSKTIAVIGYGSQGHAHALNAKESGLKVIVGLYEGSKSWKKAEEAGFQVMTAKDAAQAADFIMILINDEKQAALYRESIAPALKKGKTLSFAHGFNIHFGQIVPPPDVNVVMIAPKGPGHTVREQYKNGAGVPCLIAIHQDADGDAKKLALAYAAGIGGARAGVLETTFKEETETDLFGEQAVLCGGVSALMKAGYEVLVEAGYQPESAYFEVMHEMKLIIDLVNRGGLSFMRYSISDTAEYGDYVTGPKIITEETKNTMRQVLKNIQNGSFARDWILENQVNRPFFNRMRAIEAEHPIEKTGNELRGMMSWLKKNEEK

SEQ ID NO: 72231 - DNA, 498 bp, Unknown
  Obtained from environmental sample
  misc_feature (1)..(498): n is a, c, g, or t
atgaaagaattttttattcccaaagaaaagctccccagaatcttgtacgtcgttttgctttccatagcgggtacattaatcgtattgatattaatcggcactattgtcggtcttatccgtccgcccaacgcaagtcctatttttgcgtttagaaaaatcaacaaggagcaaaccaaaccagaggacatccgcgtctattcaggtttggaacggcttaggattccgctttcaaattcatcgattttaattctttcagtttccttcccctactccgccaaagacacctcttttaccgaagaacttgccgcaaaaatcggcgactttaaaacgatgataacggattatttttcatcccttcctgcggaaagcgcagaccaaatagacgaagaactcgcgaagcaggaaattttaaagcattttaacgccaatctgcgtcttggacgcatagacgcgctttattttaacgaaatgacggtgcttgaaagcgggaaacaatag

SEQ ID NO: 72232 - protein, 165 aa, Unknown
  Obtained from environmental sample
  misc_feature (1)..(165): Xaa is any amino acid
MKEFFIPKEKLPRILYVVLLSIAGTLIVLILIGTIVGLIRPPNASPIFAFRKINKEQTKPEDIRVYSGLERLRIPLSNSSILILSVSFPYSAKDTSFTEELAAKIGDFKTMITDYFSSLPAESADQIDEELAKQEILKHFNANLRLGRIDALYFNEMTVLESGKQ

SEQ ID NO: 72233 - DNA, 4383 bp, Unknown
  Obtained from environmental sample
  misc_feature (1)..(4383): n is a, c, g, or t
atgctccatataggtattgatgtaggttctacaactgtaaaggctgtagtaatacaaaacgacacaaaagaaatactttattccagatatgaacggcacaatgcctgtcagggtgagaaggtttactcacttttacaggaaattttctcgcaattccctcaaaatcagtttaaaatcgctttttgcggctccggcggacgaacaatcgccgaaatgatccatgttccgtatattcaggaagtagttgccaattcaatagcggtgcgcactttctacccgcagacaagagtcgcgatagaactcggcggacaggacgcgaaaatcatctttttttaccacgacagcgcggcaaaccgccttgtagcgggcgatatgagaatgaacggaagctgtgcgggaggaacgggcgcgtttatcgacgaagtagcttccttattgcgtacccccgtagaagaatttgacgctctcgcggcgcagggcactcaagtatatgacatttccggtcgctgcggagttttcgcaaagaccgatattcaaccgttgttaaatcagggcggtttgataaaagacattgctctttccacctttcacgcaatcgcaaaacaaaccataggcggtcttgctcagggacttgagataaagccgcccgtcatctttgaaggcggacctctcacctttaacccaacattaatcaaagtcttcgcgcagagacttggtctttctgattccgatattattctgccgccaaaagccgaattgttcatcgcttacggaaccgcgctctccattgatgaaatgtttgcggagcaatgtaaaaacataagtccgcaggcggttcttacttcgctttcaatgtaccgtgaaattgttacggaaaatacatcaatgaataatatcaacttctttaacacggaggcggagcgtaacgcgtttatagcacggcataaaattctttctattgataaagacaagattaacaagaaaagcggggaaacccttagagtttatcttggcattgacgcgggttctaccacgaccaaatttgttttgatagacgaagatgaaaatgtagtggattgttcttacagccccaacaaaggcgagccgcttaaagttattaaacaagccatgctggaaatgtacgaaaaataccgcaaagcgggagtcaatcttgaagttatcgcccttggaactacaggttatggagaactgctttttgacaaagcccttggagccgatttccacacggtggaaaccgtagcccacgcggcggcggcgcaaaaatatataccgggcgtaagtttcattttggatatcggcggacaggacatgaaagccattaatatttcaaacgacattgttacaaatattactgttaacgaggcttgttcgtcggggtgcggctctttcctggaaacttttgccacaaatctgaatatccccgtcgataaaatagcagagaccgcttttaactcaaaaaatcccgcgcatttgggcagccgctgtactgtttttatgaacagcacaattattaccgaacaaaaaaacggcaaacaagccgacgacattatggcgggtctttgccgctcaatcgttgaaaatgtttttacaaaagtcgtacgcatttccagccccgcgcaacttggagataaaatcgtagtacagggcggcactctgaagaatgacgcggtattgcgggcattggaacagtatctcggcaaatccgttgtgcgcgctccgtatccgggagaaatgggcgctatcggcgtcgctcttttgacaaaaagagaaatcgcggaacacggatacacatcgcctcacggcacgagcgatcgcacgcgctttatcggttttgaggagcttaaaaaattcgattacactcaggaagccaatttaatttgtcctttctgcacaaataactgcaaccgtacattggtgcgtttttacaacggtcttacatgggttacaggcaaccgctgtgaacgcggagaacttgtaggcgacccaaaagatacagcgttacgcgaagaagcgaacaaaagaacaaaaataatgaacgctgttcccgatatgatcaagcttagagatgaattgctttttaaagattatccttttaatcaacttttaccgtcaaaagatataactatcggtattccccgcgcgctggatttttggcgtaatatgcctttctggaaagtattctggggcgctcttggttttaaaacaaaaatatcgcaaaaaagcacgcggggactgtatgaaaagggcattcaatttgttacgtcagatacagtctgtttcccggcaaaactggtgcatggacacatagaagacctaatcgaaaagaaagtagacaggattttctttccgcaaatcaacagactgccgcccgataaccttgagcgtttttgcacttttacatgccccgtattgaaaggttatccgctttccgtaagattttccgacaatcccgaaggaaaacacaacattcctcttgatactcctatttttcattggttctcaaaaagagatatgtatttccagctttgccggtttataaaggaaacatttaacataccggaaaaaaccgttatggcggcgattaaacagggagaaaaaacgctggaagattttaacaacaatttaattgaaaacggcaaaaagataatcgaagatgttgagcgtcagggcaaattcgccgtggttatcgctgggcgttattatcaatatgacgagcatattaatcataatctttcgcgctacttcacaagcctcggcatacccgtcctaacgcttgacgcccttcccgatcttggaaaagtgccgctaaccaaatcgcgtgttgaaataactcataacaatcacgccaacttgctttcgggcgctattatcgcggcggaacatcccgcgcttgaatatgtggatattttcagtttcggctgcggtcatgacgccgtttacacggacgaaattatccgcattatggacgaaatttcgggcaaatctccgctaattttaaaaatggatgaaagcgaaatttcaggaccgttgcgcataagggttcgttcatttattgagaccgtaacgacgcgccgaaaacaaacagcgcataacgctaaacagttgggcgacccataccctgtaaaattaaaaaagaccgataaggaaaaaacaatccttattccaaatgtaagcagggcgttctgccttattttaacggcaggtttgattaaagacgggtaccgcgtggaacctatgcctatgggcggcgcgcaggctatcgctatgggaaaaaaatatgtacataacgatatgtgcttgccggcgcaggttattatcggcgaggctattcttacgcttaaaaacggaaagtatgatcccgacaatacggtaataggaacggcaaaagtgttatgtgactgccgtttatcaaattatatgcctcttacaagaaaagctctggacgaagcggggtttccgcaagttcccgttatcagtacggatatgatggatttaaaaaaagcccaccccggcatgaattttactcccataacttacgccaatgtcgtttggggcataattcaggcggacgcgcttgaatttttacggcggaaaatacgcccctatgaattgcaaaagggagagaccgataaacttgtggaaaacgcgtttcaggaaattgccaatggcatcgcaaagggcggtattcccggttcaattaaaccgtttaagaaggcgattaaagacctgtgcaatgtacgttatgatcgttccaaattaaaagaacaggttgctatacagggggaatatcttcttaccttccacccgggatcgaatcaggaagtggaaaaatatctggaaaaaaacggaatggaagtaattttcccgcgaatgcacggtatttaccgccatcttttccttgggcatactatttccgagatgaaagaattcaaagtaaaacattcgttatacgacacaatgttcgcgacgctgggaaataaattcatggactttgccgtaaaacacaccgataaaatcgcaaaaatgcaccctctgtacgaacccgatataactctggaagaaaaagcaaaatacagcgatcacattatgcatcattcgattttatcgggcgaatcatttttaattgcctcggatattcttcattacgcgtcgaagggtataagatcatttgtcatactccagccgttcggctgtctgcccaaccatatctgcgggcgcggaataattaaaaaaataaaggaacaataccccactattcaaattctgccccttgattatgatcccgacgtaagttttgcaaacatagaaaaccgtttgcagatgttaataatgaacacacgtagtttaaagaaggcgtcttaa

SEQ ID NO: 72234 - protein, 1460 aa, Unknown
  Obtained from environmental sample
  DOMAIN (4)...(263): BadF/BadG/BcrA/BcrD ATPase family
  misc_feature (1)..(1460): Xaa is any amino acid
MLHIGIDVGSTTVKAVVIQNDTKEILYSRYERHNACQGEKVYSLLQEIFSQFPQNQFKIAFCGSGGRTIAEMIHVPYIQEVVANSIAVRTFYPQTRVAIELGGQDAKIIFFYHDSAANRLVAGDMRMNGSCAGGTGAFIDEVASLLRTPVEEFDALAAQGTQVYDISGRCGVFAKTDIQPLLNQGGLIKDIALSTFHAIAKQTIGGLAQGLEIKPPVIFEGGPLTFNPTLIKVFAQRLGLSDSDIILPPKAELFIAYGTALSIDEMFAEQCKNISPQAVLTSLSMYREIVTENTSMNNINFFNTEAERNAFIARHKILSIDKDKINKKSGETLRVYLGIDAGSTTTKFVLIDEDENVVDCSYSPNKGEPLKVIKQAMLEMYEKYRKAGVNLEVIALGTTGYGELLFDKALGADFHTVETVAHAAAAQKYIPGVSFILDIGGQDMKAINISNDIVTNITVNEACSSGCGSFLETFATNLNIPVDKIAETAFNSKNPAHLGSRCTVFMNSTIITEQKNGKQADDIMAGLCRSIVENVFTKVVRISSPAQLGDKIVVQGGTLKNDAVLRALEQYLGKSVVRAPYPGEMGAIGVALLTKREIAEHGYTSPHGTSDRTRFIGFEELKKFDYTQEANLICPFCTNNCNRTLVRFYNGLTWVTGNRCERGELVGDPKDTALREEANKRTKIMNAVPDMIKLRDELLFKDYPFNQLLPSKDITIGIPRALDFWRNMPFWKVFWGALGFKTKISQKSTRGLYEKGIQFVTSDTVCFPAKLVHGHIEDLIEKKVDRIFFPQINRLPPDNLERFCTFTCPVLKGYPLSVRFSDNPEGKHNIPLDTPIFHWFSKRDMYFQLCRFIKETFNIPEKTVMAAIKQGEKTLEDFNNNLIENGKKIIEDVERQGKFAVVIAGRYYQYDEHINHNLSRYFTSLGIPVLTLDALPDLGKVPLTKSRVEITHNNHANLLSGAIIAAEHPALEYVDIFSFGCGHDAVYTDEIIRIMDEISGKSPLILKMDESEISGPLRIRVRSFIETVTTRRKQTAHNAKQLGDPYPVKLKKTDKEKTILIPNVSRAFCLILTAGLIKDGYRVEPMPMGGAQAIAMGKKYVHNDMCLPAQVIIGEAILTLKNGKYDPDNTVIGTAKVLCDCRLSNYMPLTRKALDEAGFPQVPVISTDMMDLKKAHPGMNFTPITYANVVWGIIQADALEFLRRKIRPYELQKGETDKLVENAFQEIANGIAKGGIPGSIKPFKKAIKDLCNVRYDRSKLKEQVAIQGEYLLTFHPGSNQEVEKYLEKNGMEVIFPRMHGIYRHLFLGHTISEMKEFKVKHSLYDTMFATLGNKFMDFAVKHTDKIAKMHPLYEPDITLEEKAKYSDHIMHHSILSGESFLIASDILHYASKGIRSFVILQPFGCLPNHICGRGIIKKIKEQYPTIQILPLDYDPDVSFANIENRLQMLIMNTRSLKKAS

SEQ ID NO: 72235 - DNA, 477 bp, Unknown
  Obtained from environmental sample
  misc_feature (1)..(477): n is a, c, g, or t
gtgnnnnnnnnggttgatgggcgagctatactcgtagacggcggaatcgggcaagtgaacgccgcgaaaggagtgctagacgaacttggagtggattgcggtcttgtcggtcttgccaaacgcgaagaagagctatggcttcccgcggcgaaggaaccgctggttttatcgaagcaatcggaagcgttaaaagttttacagcatgtccgcgacgagtgccaccgctttgcgacaggttttaatcagcgtctaagatcgaaagaccttttttttccgatactggaatccgtggaaggggtcggtcccaaacgcgcggcggcaataatgaaagaatacggctcaatagcgaatatcgcctccgcggatccgtctgaaatagcggaacgctgtcaaataagcgaaaataccgcccgtgcggtgcgagcggtggctagattggaggcggggaattcttataaccacgaaccacacaaatag

SEQ ID NO: 72236 - protein, 158 aa, Unknown
  Obtained from environmental sample
  DOMAIN (1)...(78): UvrC Helix-hairpin-helix N-terminal
  misc_feature (1)..(158): Xaa is any amino acid
MXXXVDGRAILVDGGIGQVNAAKGVLDELGVDCGLVGLAKREEELWLPAAKEPLVLSKQSEALKVLQHVRDECHRFATGFNQRLRSKDLFFPILESVEGVGPKRAAAIMKEYGSIANIASADPSEIAERCQISENTARAVRAVARLEAGNSYNHEPHK

SEQ ID NO: 72237 - DNA, 1089 bp, Unknown
  Obtained from environmental sample
  misc_feature (1)..(1089): n is a, c, g, or t
atgtcaacagaaaagaaagtccgcgttcgcttcgcaccctcccccaccggctacctgcacgtgggcggggcccgcagcgctctttttaacttcctgttcgcacgccgcatgggcggggattttctattacggatagaagacacagacaggacgcgcttcgtggaagacgcgcttacggagatatacgacagcctcaaatggctcggtcttaattgggacgagggccccgtcgtaggcggcgggtacggcccgtacgttcagtcagagcgattggacatctacggcaggatggctgatcaattgataggctccggtcacgcctacaggtgcttctgcacgtcggagcgcttggcggaggtacgcgcggcgcaggagaagagcggcgttatgaccggctacgacaaacgatgcaggaacctgtccgcagaggaggttgacaaaaacttaaaagaaggtgttccgcacgtcgtccgcctgaaaattccggatgggcggacggtcgccttcgacgacctgattcgcggacgcatcgagtacaagagcgaggcgctggacgatctggtgctgattaaggccgacaagttcccgacctaccacatggccaacgtggtggacgaccacgagatggcgatcacgcacgtcttgcgcggcgacgagtggatagcctccacgccgcgtcacgtgctgctctacgaggctttcggatggaatccgccggttttcgcgcacctgccggtgatactgtcgccggacggcggcaaactctccaagcgtaaaggggccgcctccgtgatggactacaaacgcggcgggatactgccggaagcgctgttcaacttcttggcgctgctgggttgggcgcccggcggggacagagagaaaatgagtctggaagagatgatagccgccttctcgcttgaacacgtgtcgccnaaagcggcggtgctggatgagaaaaaactggagtggatgaacgggcagtatttggcggagagacctgcggaaacgttgaatgatgatgtaacgtctatgtggaaagataaaggaggnattgacgaccgtatcaataatgaatacgcgataaggtga

SEQ ID NO: 72238 - protein, 362 aa, Unknown
  Obtained from environmental sample
  DOMAIN (6)...(323): tRNA synthetases class I (E and Q), catalytic domain
  misc_feature (1)..(362): Xaa is any amino acid
MSTEKKVRVRFAPSPTGYLHVGGARSALFNFLFARRMGGDFLLRIEDTDRTRFVEDALTEIYDSLKWLGLNWDEGPVVGGGYGPYVQSERLDIYGRMADQLIGSGHAYRCFCTSERLAEVRAAQEKSGVMTGYDKRCRNLSAEEVDKNLKEGVPHVVRLKIPDGRTVAFDDLIRGRIEYKSEALDDLVLIKADKFPTYHMANVVDDHEMAITHVLRGDEWIASTPRHVLLYEAFGWNPPVFAHLPVILSPDGGKLSKRKGAASVMDYKRGGILPEALFNFLALLGWAPGGDREKMSLEEMIAAFSLEHVSPKAAVLDEKKLEWMNGQYLAERPAETLNDDVTSMWKDKGGIDDRINNEYAIR

SEQ ID NO: 72239 - DNA, 678 bp, Unknown
  Obtained from environmental sample
  misc_feature (1)..(678): n is a, c, g, or t
gtgacgcgcctcgatctgacttcaacaaatcaatcaccttatcgcgtattcattattgatacggtcgtcaatncctcctttatctttccacatagacgttacatcatcattcaacgtttccgcaggtctctccgccaaatactgcccgttcatccactccagttttttctcatccagcaccgccgctttnggcgacacgtgttcaagcgagaaggcggctatcatctcttccagactcattttctctctgtccccgccgggcgcccaacccagcagcgccaagaagttgaacagcgcttccggcagtatcccgccgcgtttgtagtccatcacggaggcggcccctttacgcttggagagtttgccgccgtccggcgacagtatcaccggcaggtgcgcgaaaaccggcggattccatccgaaagcctcgtagagcagcacgtgacgcggcgtggaggctatccactcgtcgccgcgcaagacgtgcgtgatcgccatctcgtggtcgtccaccacgttggccatgtggtaggtcgggaacttgtcggccttaatcagcaccagatcgtccagcgcctcgctcttgtactcgatgcgtccgcgaatcaggtcgtcgaaggcgaccgtccgcccatccggaattttcaggcggacgacgtgcggaacaccttcttttaa

SEQ ID NO: 72240 - protein, 225 aa, Unknown
  Obtained from environmental sample
  misc_feature (1)..(225): Xaa is any amino acid
MTRLDLTSTNQSPYRVFIIDTVVNXSFIFPHRRYIIIQRFRRSLRQILPVHPLQFFLIQHRRFXRHVFKREGGYHLFQTHFLSVPAGRPTQQRQEVEQRFRQYPAAFVVHHGGGPFTLGEFAAVRRQYHRQVRENRRIPSESLVEQHVTRRGGYPLVAAQDVRDRHLVVVHHVGHVVGRELVGLNQHQIVQRLALVLDASANQVVEGDRPPIRNFQADDVRNTFF

SEQ ID NO: 72241 - DNA, 1731 bp, Unknown
  Obtained from environmental sample
  misc_feature (1)..(1731): n is a, c, g, or t
atggattcaaaagaatcaacaacgaatggtaatgaaccgattcccgccgctccaaatttcatccgcgaaatgataaaggacgacatggcgacgggtaagtggggcgggcgcgtggtcactcgtttccctccggagcccaacggctacctccacatcggccacgccaagtccatctgcctgaacttcggcatggccgccgagttcggcggggagtgccatctgcgcttcgacgacaccaacccctcaaaagaggaggacgagtacataaaatccatcatacgcgacgtgcggtggctcggcttcgactggggcaagcacttgtattacgcctccgactacttcggcaagacgcacgagtacgccatagagatgatacgtgcgggcaaggcctacgtcgatgatctcagcgccgacgagatccgcgaatatcgcggcacgctcacggaaccggggcggaacagcccgcaccgcgaccgctccatagaagagaatttggaactcttcgccgcaatgacgcgcggagaatttcctgagggatcgcgagtgcttagagccaagattgacatgacgcacccgaacatgaatatgcgcgacccggtgatgtaccgcatcatgaacgcgccgcaccacagaaccggcgccacgtggaaggtctaccccatgtacgactgggcgcacgggcttgaggactccatagagggggtcacgcactcgctctgcacaatggagtttgaggatcaccgcccgctgtacgactggttcttgttgcagctttccggcgtccaccgcccgcagcagaccgagttcgctcggctcaacctcacgtacacggtaatgagcaagcgcaagctgttgcaacttgtcaaggagaaacacgtgaacggctgggacgacccgcgtatgcccaccataagcggtctgcggcgcagaggctacacgccggaagcgatacggacgttcgccgagcgcatcggcgtggcaaagagggagggcaccgtagatttcgcgtttttggagtactgcctgcgggaagacctcaacaagcggtgcatgagggtaatggcggtgctaaatccaataaaggttgtgatagaaaactaccctgaagggcaagtagaggagttcgacgctctgaataatcccgaagacgaatctgcggggagccgcaaggtgccgttttcgcgggtgatatacatagaacgcgacgactttatggaggatccgcccaagaaattctacaggctcgctcccggacgcgaagtgcggctgcgctacgcctactatatcacctgcaaagaggtcattaaagacggcggcgggaatattattgagcttagatgtacctacgacccgcagacacgcggcggcgcaacaccgccagacgggcgctccccaaaggccactatccactgggtctcggcgcaacacgccataggagcggaggtgcgcatatacgataacctctttacaaatgagaatcccatggaagcggagagcggaaactttttggataacatcaatccggagtcgctcaaagtaataacggattgcaaattggaaccgtcgttaacaaacgctaaggttggagagaagtaccagttcgaacggctggcttacttttgcgttgacgacgactcaacggaaggtaagttggtgtttaaccggacggttacacttaaagacgcttgggcgcggatacagaaaaatacaaattctttaaaatctttttaa

SEQ ID NO: 72242 - protein, 576 aa, Unknown
  Obtained from environmental sample
  DOMAIN (350)...(543): tRNA synthetases class I (E and Q), anti-codon binding domain
  misc_feature (1)..(576): Xaa is any amino acid
MDSKESTTNGNEPIPAAPNFIREMIKDDMATGKWGGRVVTRFPPEPNGYLHIGHAKSICLNFGMAAEFGGECHLRFDDTNPSKEEDEYIKSIIRDVRWLGFDWGKHLYYASDYFGKTHEYAIEMIRAGKAYVDDLSADEIREYRGTLTEPGRNSPHRDRSIEENLELFAAMTRGEFPEGSRVLRAKIDMTHPNMNMRDPVMYRIMNAPHHRTGATWKVYPMYDWAHGLEDSIEGVTHSLCTMEFEDHRPLYDWFLLQLSGVHRPQQTEFARLNLTYTVMSKRKLLQLVKEKHVNGWDDPRMPTISGLRRRGYTPEAIRTFAERIGVAKREGTVDFAFLEYCLREDLNKRCMRVMAVLNPIKVVIENYPEGQVEEFDALNNPEDESAGSRKVPFSRVIYIERDDFMEDPPKKFYRLAPGREVRLRYAYYITCKEVIKDGGGNIIELRCTYDPQTRGGATPPDGRSPKATIHWVSAQHAIGAEVRIYDNLFTNENPMEAESGNFLDNINPESLKVITDCKLEPSLTNAKVGEKYQFERLAYFCVDDDSTEGKLVFNRTVTLKDAWARIQKNTNSLKSF

SEQ ID NO: 72243 - DNA, 303 bp, Unknown
  Obtained from environmental sample
  misc_feature (1)..(303): n is a, c, g, or t
gtggggcgggcgcgtggtcactcgtttccctccggagcccaacggctacctccacatcggccacgccaagtccatctgcctgaacttcggcatggccgccgagttcggcggggagtgccatctgcgcttcgacgacaccaacccctcaaaagaggaggacgagtacataaaatccatcatacgcgacgtgcggtggctcggcttcgactggggcaagcacttgtattacgcctccgactacttcggcaagacgcacgagtacgccatagagatgatacgtgcgggcaaggcctacgtcgatga

SEQ ID NO: 72244 - protein, 100 aa, Unknown
  Obtained from environmental sample
  misc_feature (1)..(100): Xaa is any amino acid
MGRARGHSFPSGAQRLPPHRPRQVHLPELRHGRRVRRGVPSALRRHQPLKRGGRVHKIHHTRRAVARLRLGQALVLRLRLLRQDARVRHRDDTCGQGLRR

SEQ ID NO: 72245 - DNA, 1251 bp, Unknown
  Obtained from environmental sample
  misc_feature (1)..(1251): n is a, c, g, or t
gtgaacatccgtctgaaacccggcaaagacaagcccgtccgcaacggccacccgtggatattttccggcgcggtggcgaaagtcgaaggggatgttgatttgcgtgaccgcttgtgcgccgtatacggcgccggcggcgaacggctcggcgtaggatattataatgacaagtcgacgatacgcgtcagaatgctcactgtcgataccgccgttaataccgccgttaatacaacgaaatcaatacctacgttaacattcaccgcgaaagacctgcaaagtcgcatccgtcaatcaatcgatactcgtgaaaaaaacggtgttttaacgacgaataccggcggtaacaccgactcctgccgcctaatcaattccgagggtgattttctaccggggttgattgttgacaagtacggccacggcgtttgcatacagatcggtacggccggtatggagtgttggcgcggcgccgtcgtggacgcgttatccgatattgtcaaccccgctttcatctacgaacgctctgatacggcgtcacgcgaaagggagggtttgccgcttagcgagggacttattgccggggcgcttccggaaacgcttgtgataacggagaacggcgtcaaatacaaggcggatttacgcgccggacagaagaccggtttcttctttgatcaacgagagaaccgcgcgcttctgcgccgctacgcctccggacgtaacgtttgcgactgcttctcctacagcggcggcttcgcgataaacgcggcgctcggcggcgcggcctccgtcgtcgcggtagactcgtcggaagaggccggcgcttgcctctccgagaacgcgcgattaaacgatgtgtccgatacggtgaagtttatgaaatccgacgcctttacgttcctcaggcagctgcgcccctacggcggcgaccgctcgtccatagacctgttgattttagatccgccgaagtttgccaatcacccaagcgaggttgacagggcggcgcgaggctacaaggagatcaatttagccggacttagagcattggctcccggcggtctgctattcacattctcgtgttccggcgcggtcgacccgtacctatttcggcagatagtattcggcgcggcggccgacgcccgccgcaacgtacagatactgcacatcctgacggcgggaccggatcatccgatcaacatcgcccaccgggagggggagtatctcaagggtcttgtacttaaagttcaaaatctttaa

SEQ ID NO: 72246 - protein, 416 aa, Unknown
  Obtained from environmental sample
  DOMAIN (135)...(336): Met-10+ like-protein
  misc_feature (1)..(416): Xaa is any amino acid
MNIRLKPGKDKPVRNGHPWIFSGAVAKVEGDVDLRDRLCAVYGAGGERLGVGYYNDKSTIRVRMLTVDTAVNTAVNTTKSIPTLTFTAKDLQSRIRQSIDTREKNGVLTTNTGGNTDSCRLINSEGDFLPGLIVDKYGHGVCIQIGTAGMECWRGAVVDALSDIVNPAFIYERSDTASREREGLPLSEGLIAGALPETLVITENGVKYKADLRAGQKTGFFFDQRENRALLRRYASGRNVCDCFSYSGGFAINAALGGAASVVAVDSSEEAGACLSENARLNDVSDTVKFMKSDAFTFLRQLRPYGGDRSSIDLLILDPPKFANHPSEVDRAARGYKEINLAGLRALAPGGLLFTFSCSGAVDPYLFRQIVFGAAADARRNVQILHILTAGPDHPINIAHREGEYLKGLVLKVQNL

SEQ ID NO: 72247 - DNA, 351 bp, Unknown
  Obtained from environmental sample
  misc_feature (1)..(351): n is a, c, g, or t
atgaccgtcaaatgcaagaagtgcaacgcctactgttgccgccacatagccatcggcgtggatactcccgatgacaaggaagggtacgacaatatccgctggtacctgctgcacaaaaacgtctgggtttccatcagccacgacgaccagtggatcgtagagttcaaaacgccgtgccgcctgatcaggagcgactataaatgcggcgattacccgaatcgcccgcttatatgcaagaactatcccgaagaggacgaactgtgcgagggcgagacggacgaaccgtcgtacaaggaactcttcaagaacgtcaaggactttgagaggtattggaagaagcggagtaagtag

SEQ ID NO: 72248 - protein, 116 aa, Unknown
  Obtained from environmental sample
  misc_feature (1)..(116): Xaa is any amino acid
MTVKCKKCNAYCCRHIAIGVDTPDDKEGYDNIRWYLLHKNVWVSISHDDQWIVEFKTPCRLIRSDYKCGDYPNRPLICKNYPEEDELCEGETDEPSYKELFKNVKDFERYWKKRSK

SEQ ID NO: 72249 - DNA, 1437 bp, Unknown
  Obtained from environmental sample
  misc_feature (1)..(1437): n is a, c, g, or t
ttggcgctctcattgcctataatagtcgtcataaacaaaattgacaagccggcggcgagacctatttgggttcttgaccaagtcttcgacctattcgtaaaactggacgcgccggatagcgtcttagactttccggtggtctacgcttccgccaaaaacggttacgcgaaagacgaccccgacgacgacagcaacgacctgctgccgctttacgagatgataataaagcgaatcccgccgccgcagggggacgagaacgccccgttgcagatgttggtcagttccatcgactactcccagtacatgggccgtttgggaataggcaaaatcaccgccggaacgctgaatgtcaataaggaaatatcggtgtgtatgctcgacggcagcatggttccggcgcgtatcaccaaggtctttgcctttgagggcgtgcagaaggtgcccacggacatcgcttcggtggggaacatcgtggccgtggccggaatggacgaggtgaccgtaggcgtcaccttcaccgatacggagaacccgaaccccttgccgccgatagtgatagacccgccgaccatatccatgaacttcattcccaacgactctccatttgcgggaacggaggggaagtttgtaacgtcaagacacctgcaagatagactgatgcgggaaatactctccgatgtggcgctgactgtggagccgttgcaagacgcgatagggcacaaggtgtcgggacgcggcgagttgcatctgtcaattctaatagagcgtatgcgtcgtgagggttacgagtttcaggtgacgagcccgcaggtcattatgcgcaaggacgagaacggcaagcagcttgagccgtacgaggagctgactgttgacgtagatgagaagtacgccggcacggtgatagagaaactgggttcgcgtcgcggcataatgcaagatatgtcgcaggaaaacggcatggcgcgaatgacgttcaaaattcccacaagagggcttctgggctacaaagcggagtttatgacagacaccaaaggcatgggaataatgaactacgtattcttagagtactctccctacgccggcgacatccgcacgagggcgaacggggtgctgatagccaaagaaccgtgcgtgtcggtggcatacgcgttgtttaatttgcaggatcgcggaaagatgttcgtaggtcccggtgtgaagatatacaggggaatgattgtgggcgagcactgccggtcaaacgatttggtggtcaatcccggcaaagagaaaaaattatcgaacatgagggcggccggttcggatgaaaacgtaatattaacgccgccggtagacatgagtttggaagactgtatagcctatataaatgaggacgaactggtagaagtcacgccgcaatctatcagattgcggaagagggacaataagtatcaataa

SEQ ID NO: 72250 - protein, 478 aa, Unknown
  Obtained from environmental sample
  DOMAIN (103)...(173): Elongation factor Tu domain 2
  misc_feature (1)..(478): Xaa is any amino acid
MALSLPIIVVINKIDKPAARPIWVLDQVFDLFVKLDAPDSVLDFPVVYASAKNGYAKDDPDDDSNDLLPLYEMIIKRIPPPQGDENAPLQMLVSSIDYSQYMGRLGIGKITAGTLNVNKEISVCMLDGSMVPARITKVFAFEGVQKVPTDIASVGNIVAVAGMDEVTVGVTFTDTENPNPLPPIVIDPPTISMNFIPNDSPFAGTEGKFVTSRHLQDRLMREILSDVALTVEPLQDAIGHKVSGRGELHLSILIERMRREGYEFQVTSPQVIMRKDENGKQLEPYEELTVDVDEKYAGTVIEKLGSRRGIMQDMSQENGMARMTFKIPTRGLLGYKAEFMTDTKGMGIMNYVFLEYSPYAGDIRTRANGVLIAKEPCVSVAYALFNLQDRGKMFVGPGVKIYRGMIVGEHCRSNDLVVNPGKEKKLSNMRAAGSDENVILTPPVDMSLEDCIAYINEDELVEVTPQSIRLRKRDNKYQ

SEQ ID NO: 72251 - DNA, 432 bp, Unknown
  Obtained from environmental sample
  misc_feature (1)..(432): n is a, c, g, or t
ttgtgccctatcgcgtcttgcaacggctccacagtcagcgccacatcggagagtatttcccgcatcagtctatcttgcaggtgtcttgacgttacaaacttcccctccgttcccgcaaatggagagtcgttgggaatgaagttcatggatatggtcggcgggtctatcactatcggcggcaaggggttcgggttctccgtatcggtgaaggtgacgcctacggtcacctcgtccattccggccacggccacgatgttccccaccgaagcgatgtccgtgggcaccttctgcacgccctcaaaggcaaagaccttggtgatacgcgccggaaccatgctgccgtcgagcatacacaccgatatttccttattgacattcagcgttccggcggtgattttgcctattcccaaacggcccatgtactgggagtag

SEQ ID NO: 72252 - protein, 143 aa, Unknown
  Obtained from environmental sample
  misc_feature (1)..(143): Xaa is any amino acid
MCPIASCNGSTVSATSESISRISLSCRCLDVTNFPSVPANGESLGMKFMDMVGGSITIGGKGFGFSVSVKVTPTVTSSIPATATMFPTEAMSVGTFCTPSKAKTLVIRAGTMLPSSIHTDISLLTFSVPAVILPIPKRPMYWE

SEQ ID NO: 72253 - DNA, 1497 bp, Unknown
  Obtained from environmental sample
  misc_feature (1)..(1497): n is a, c, g, or t
gtggatcctctttccgattccgtatacaagatactcgcggtcgatgacgacgaggttacccttgagttattgacggagattctttcaacgcgttatgacgttacggtttgttccagcggtaaggacgctataaggtatttagatgaaaacaattttgatttgataattaccgaccttatgcttcccgatgcgtccggaatagacgtcctcgctcacgccaagcgccgcgacgcgttcgcggaggttttgatgatcaccggcaacgcctccgtggataccgccgcggcggcgttgagcggcggcgtaggttcgtatttgctgaaaccgttttccatccgcgagctttgcggccgcgtggataaaatggtcgccaagcggagatttcttacgaagactctgcaactcttggcaaaccgcgacgctatcgaccctaccgtaaaagagcatatcgacgacatcacctcgctctatctttttacccgcaaactcgtgctgacgcttgagatctcggaggctatgaggattattttagaggaggccaaccggaaagtcggcgcgatgttttgctcgctagaggttaatcatttgggctataaagaggttttttccatgtcacggtcagggcttgccgataaagaatatcttaacaacgtctttgcggagcattggaacgacgcgtttatctgcaccgccagagcgattttctttaagggggccgtaccgcattacgtctatgaggggcagcccggggaatttcgcgaggcgtccggctataagtgctggaactatcggctcgtagtgccgggaaagactttcggcagcctctcggtgtggatggcggctgacagcgagattaacgaaaggttcgaccggcatctgcatataatgacatccatagcctcgcccgttatcgaacatatatacgccgaccggatggcgcttcatcaagccaagaccgacggtttgacgggcgtatcaaacaaacggcatttttacgaggtattggagagtgagatcgccagagccaaccgtaagaaaaatacttttgcgcttgtgctggccgacattgataattttaagaagataaacgatacccacggccaccaaatcggcgacgctgttttgatagagctgacaaagcatctaaaagataacgtccgcggcggcgacgtggtggctcgctacggcggcgaggaattcatcctgatatttcccgataccgatttagacggggccgtcacattggcgaatagaatacgcgagaccatagcgagcaatccgtttgccaatatgaggtactacgtcccgtatacctccagcttcggtctcgccatgtacgacggcgccgcgccgccgataaacaaggacgaacttatccatatcgcagacacggctctctaccactcaaaacaccacggcaagaaccgcgttacggtagccgcgaaggatggggcgggaatcgtttataaggatacggtttccgaatacatgatataa

SEQ ID NO: 72254 - protein, 498 aa, Unknown
  Obtained from environmental sample
  DOMAIN (9)...(120): Response regulator receiver domain
  misc_feature (1)..(498): Xaa is any amino acid
MDPLSDSVYKILAVDDDEVTLELLTEILSTRYDVTVCSSGKDAIRYLDENNFDLIITDLMLPDASGIDVLAHAKRRDAFAEVLMITGNASVDTAAAALSGGVGSYLLKPFSIRELCGRVDKMVAKRRFLTKTLQLLANRDAIDPTVKEHIDDITSLYLFTRKLVLTLEISEAMRIILEEANRKVGAMFCSLEVNHLGYKEVFSMSRSGLADKEYLNNVFAEHWNDAFICTARAIFFKGAVPHYVYEGQPGEFREASGYKCWNYRLVVPGKTFGSLSVWMAADSEINERFDRHLHIMTSIASPVIEHIYADRMALHQAKTDGLTGVSNKRHFYEVLESEIARANRKKNTFALVLADIDNFKKINDTHGHQIGDAVLIELTKHLKDNVRGGDVVARYGGEEFILIFPDTDLDGAVTLANRIRETIASNPFANMRYYVPYTSSFGLAMYDGAAPPINKDELIHIADTALYHSKHHGKNRVTVAAKDGAGIVYKDTVSEYMI

SEQ ID NO: 72255 - DNA, 423 bp, Unknown
  Obtained from environmental sample
  misc_feature (1)..(423): n is a, c, g, or t
atgcgaaatatgataaccgtccgtctgaaacaagccgattatgaggacatcgtcgcccatgccataagatgtctgccgagcgaagcttgcggattgatcgccggaaacgcggataacgatgttaaaaccgtggagaaggtctacctattgtccaaccctgacgatagcccggcgcatttctctatcgacccaaaagttcagtttacggccgtcaaggatatgagagctaacggacttgccccgctcggtaattttcattcccatccggcgaccccggcgcggccgtcggaagaggatataaagatgttttttgacagtacggcgagctatctcattctatcgttagccgacgacgacccgatattaaaggcgttcagcgttaaggacggggaggttattcggcaggagttggagattttttga

SEQ ID NO: 72256 - protein, 140 aa, Unknown
  Obtained from environmental sample
  DOMAIN (2)...(112): Mov34/MPN/PAD-1 family
  misc_feature (1)..(140): Xaa is any amino acid
MRNMITVRLKQADYEDIVAHAIRCLPSEACGLIAGNADNDVKTVEKVYLLSNPDDSPAHFSIDPKVQFTAVKDMRANGLAPLGNFHSHPATPARPSEEDIKMFFDSTASYLILSLADDDPILKAFSVKDGEVIRQELEIF

SEQ ID NO: 72257 - DNA, 810 bp, Unknown
  Obtained from environmental sample
  misc_feature (1)..(810): n is a, c, g, or t
atggtaaacatggccttgactaacgagcagttggagcggtactcccgccacatcatactcgccgaggtgggagccaaagggcagaaaaaactcttggacgcgaaggtgctcatcatcggagccggcgggctcggttcgcccgccgctctgtatttagccgccgccggagtgggcgtcataggcattgccgacgcggacaatgtcgatttgtccaatttacaacggcaggtcatccacaccacggctgacgtcggcaaggctaaggcgctctccgccaaggagacgatgaacgcaatcaatccggacgttaaggtagacgttcaccgcctcttcgtagcctcggacaacataatgaaactgatcgccgattatgactttatcattgacggaaccgacaatttcccggcgaagttccttatcaacgacgcgtgcgtgctgtcgaaaaagcccttttcccacgccggtattttacgctttaagggacagcttatgacctacgttccgggcgccgggccgtgctaccgctgcatattcaaagaaatgccgcccccatccgccataccgacctgccggcaggccggcgtcataggagcgataggcggcataataggttccctgcaagccatggaagctatcaaattcatcctaggcaaggggaaactgctgacaggcgctctgcttacttacgacgcgttggaaatggaattccgtaaaatcaaacttccgacagcgaagaactgcgccgtatgcggggataaccccaccatagagaagcccttcgactacgaacaggcggtatgcgaaatatga

SEQ ID NO: 72258 - protein, 269 aa, Unknown
  Obtained from environmental sample
  DOMAIN (169)...(254): MoeZ/MoeB domain
  misc_feature (1)..(269): Xaa is any amino acid
MVNMALTNEQLERYSRHIILAEVGAKGQKKLLDAKVLIIGAGGLGSPAALYLAAAGVGVIGIADADNVDLSNLQRQVIHTTADVGKAKALSAKETMNAINPDVKVDVHRLFVASDNIMKLIADYDFIIDGTDNFPAKFLINDACVLSKKPFSHAGILRFKGQLMTYVPGAGPCYRCIFKEMPPPSAIPTCRQAGVIGAIGGIIGSLQAMEAIKFILGKGKLLTGALLTYDALEMEFRKIKLPTAKNCAVCGDNPTIEKPFDYEQAVCEI

SEQ ID NO: 72259 - DNA, 873 bp, Unknown
  Obtained from environmental sample
  misc_feature (1)..(873): n is a, c, g, or t
atgacggtcgattataaagggctgaagtgcggcgggtttatgcaacaggtgcagaagaataatttctcattgcgcttgaaagtcgtcggcggaaacctgacggccgatcagttgcaaaccatcgccgaaatcagcaagaagtacggggacgggcatgttcacctgacctcccggcagggagtggagataccgttcatcaaattggcggatgtcgaacaagtcaaggccgaattggatgccggcggggtaaacaccggcgtttgcggtccgagggtacgtacgataaccgcttgccaaggcagtgaaatatgtccgtcaggctgtatagatacttatccgttggcgcggcaaatttccgatagatatttcgggcgcgaactgccgcacaagttcaagttcggcattacaggctgtatgaacaactgcctgaaagcggaggagaatgatttgggcgttaaaggcggttacgttatagaatggcaaaaagatgcgtgcactttttgcggcgtatgcgtaaaggtatgccgcgaaggagctatcacgcaacgcgcggcgaacggtgttgatgagatttcgcttgatgaatcaaaatgcaacaactgcgggcgctgcgtgaaatcatgcccgatggacgcgtggaggggagaatccggatacatcctctctttcggcgggacgtttggaaatcttatagcgaaaggagaaccctttttgcctataatcaatgacaaagagacactattccgagtggcggacgcggcgctggacttttttgacaaacacgcaaagaagagcgaacggttccgtatagccattgatagaatagggtgggataaatttaaagaagaaatggaggcggcttatcatggatga

SEQ ID NO: 72260 - protein, 290 aa, Unknown
  Obtained from environmental sample
  DOMAIN (158)...(181): 4Fe-4S binding domain
  misc_feature (1)..(290): Xaa is any amino acid
MTVDYKGLKCGGFMQQVQKNNFSLRLKVVGGNLTADQLQTIAEISKKYGDGHVHLTSRQGVEIPFIKLADVEQVKAELDAGGVNTGVCGPRVRTITACQGSEICPSGCIDTYPLARQISDRYFGRELPHKFKFGITGCMNNCLKAEENDLGVKGGYVIEWQKDACTFCGVCVKVCREGAITQRAANGVDEISLDESKCNNCGRCVKSCPMDAWRGESGYILSFGGTFGNLIAKGEPFLPIINDKETLFRVADAALDFFDKHAKKSERFRIAIDRIGWDKFKEEMEAAYHG

SEQ ID NO: 72261 - DNA, 1773 bp, Unknown
  Obtained from environmental sample
  misc_feature (1)..(1773): n is a, c, g, or t
atgctacccgctaaccggcggggaagaatcggacgcggatactttggacgcggtaatcgcggagacgttagcctccgttaccagcgaacgcacgagcagggttatagacaacgaagcggccggcagtatggaacgccgcaagcgggaggggtatttctaatgaataacgcagatttgagcctcttaaaattcatcacctgcggaagcgtcgacgacggcaagtcaacgcttatcgggcacatattgtacgattcaaagttgatctatgccgaccaagaacgcgccctgattttagacagtcaggtgggttctcgcggcggaaagatagactactccctcctcttggacggcttgatggccgagcgtgagcagggcatcaccattgatgtcgcgtatcgctattttacaaccgagaaacgcagtttcattgtcgccgacactcccgggcatgaggagtacacgcgcaatatggcggtgggcgcgtcgttcgcggatttggctgttatcttggtcgacgccaagcgcggggttctgccgcagactctccgccacgccagaatttgcgccttgatgggcatccgttatttcgtcttcgcggtcaacaagatggatttggcgggttatggtcaggagcggttcaaggctatttcacgcgacatcgaaaaactcagcggcgagttaaagcttgccaataccgccatcataccggtatccgccaccgaaggcgacaacataacgaaacgcagtgaaaacatgccttggtatgagggtagcgttctgctttcgtatttggaatctttggatatagtcggcggtcatacagaggccggtttctatatgccggtgcagcgggtctgccgtcccgaccataccttccgcggttttcaagggcaggttgaatccggaaccgtctcggtcgacgatacgctgaccgcgctgccgtccggcgagatggccatcgtaaccgcgatttacgtcgcggacaagcgggcggactccgccgtcgccgggcagcctataaccgttcggtttgaccgcgaagtggatgtttcaagaggttgcgtgctcacacgagagacaggactcaagatcgtcaaagaatttgaggcgacgctcttgtggatggacgatcaaaagctcgttcccggcaaggagtactggattaagataggtacaaaactgttaccggcgattgtctccggaatccggcataaggttgacgtcaatacgggagcgctcatgcctgtaaactcggcggccaaaaacgagatcgtccgttgcgaaatcgttatgaccgagtctgcggtattagacgaattccgttcgcacaaaacactgggcgaattaattttaattgatcgggtgagccgctctaccgccgcctgcggggtcgttgaagtagtcggaaaacaccacggcgacagcgttcttttgcgcgacggggctttagaaatcgcgatagggctgtttgacggtttctattatcatcccgatattcacaccgtactgcggcacagtccggctccggcaatatatcaagcgggagattcgctgccgctgcggaacgctgaattcaactaccccgacgattttgatatttccgccgagggcggtttcgccaacatcagaaacggcgtatttaccggattcggagaacataacgcggacgtcccgttactgaacgaaaacggtatgcaaattgacgagaatccgcccaaagactttgggaaataccgaaatatcgcgatatgggaaaaagagtatgaaatttaa

SEQ ID NO: 72262 - protein, 590 aa, Unknown
  Obtained from environmental sample
  DOMAIN (62)...(204): GTPase of unknown function
  misc_feature (1)..(590): Xaa is any amino acid
MLPANRRGRIGRGYFGRGNRGDVSLRYQRTHEQGYRQRSGRQYGTPQAGGVFLMNNADLSLLKFITCGSVDDGKSTLIGHILYDSKLIYADQERALILDSQVGSRGGKIDYSLLLDGLMAEREQGITIDVAYRYFTTEKRSFIVADTPGHEEYTRNMAVGASFADLAVILVDAKRGVLPQTLRHARICALMGIRYFVFAVNKMDLAGYGQERFKAISRDIEKLSGELKLANTAIIPVSATEGDNITKRSENMPWYEGSVLLSYLESLDIVGGHTEAGFYMPVQRVCRPDHTFRGFQGQVESGTVSVDDTLTALPSGEMAIVTAIYVADKRADSAVAGQPITVRFDREVDVSRGCVLTRETGLKIVKEFEATLLWMDDQKLVPGKEYWIKIGTKLLPAIVSGIRHKVDVNTGALMPVNSAAKNEIVRCEIVMTESAVLDEFRSHKTLGELILIDRVSRSTAACGVVEVVGKHHGDSVLLRDGALEIAIGLFDGFYYHPDIHTVLRHSPAPAIYQAGDSLPLRNAEFNYPDDFDISAEGGFANIRNGVFTGFGEHNADVPLLNENGMQIDENPPKDFGKYRNIAIWEKEYEI

SEQ ID NO: 72263 - DNA, 693 bp, Unknown
  Obtained from environmental sample
  misc_feature (1)..(693): n is a, c, g, or t
atgcttgcctttcgcgacaaacgcgccggtgaattaggtatcaatatgctggtttaccgcaacgaggaggccgtcgctcagggtattaaccctttcgacaacggcgccgcctatacggacattatgaaaactcaagcgctcaaggacgcgctgactaaatataactttaccgcggcgttcggcggcgggaggcgggatgaggaaaagtcgcgcgccaaggagcggatattctcttttcgcaacgagcgccacgcttgggatcccaaaaaccagcggcctgagatgtggaagctctacaataccaaaatcaacaagggcgagagtattcgggtttttcccatttccaactggacggaaaaggatatatggcagtatatcaaacgggagaacattcccatcgttcctctttatttcgcggcggaacgtcccgtggtgtatcgtgacggcaatatcatcatggtagacgacgagcggatgcgccttctgcccggggaaaaaccgcagataaaaaaagtccgcttccgcacgctcggatgctacccgctaaccggcggggaagaatcggacgcggatactttggacgcggtaatcgcggagacgttagcctccgttaccagcgaacgcacgagcagggttatagacaacgaagcggccggcagtatggaacgccgcaagcgggaggggtatttctaa

SEQ ID NO: 72264 - protein, 230 aa, Unknown
  Obtained from environmental sample
  DOMAIN (1)...(185): Phosphoadenosine phosphosulfate reductase family
  misc_feature (1)..(230): Xaa is any amino acid
MLAFRDKRAGELGINMLVYRNEEAVAQGINPFDNGAAYTDIMKTQALKDALTKYNFTAAFGGGRRDEEKSRAKERIFSFRNERHAWDPKNQRPEMWKLYNTKINKGESIRVFPISNWTEKDIWQYIKRENIPIVPLYFAAERPVVYRDGNIIMVDDERMRLLPGEKPQIKKVRFRTLGCYPLTGGEESDADTLDAVIAETLASVTSERTSRVIDNEAAGSMERRKREGYF

SEQ ID NO: 72265 - DNA, 750 bp, Unknown
  Obtained from environmental sample
  misc_feature (1)..(750): n is a, c, g, or t
atgagacaatttaaagaaataataattgctatactcattgttaccgcagtcagttttttattatactctttggtgcaaagcgataataaaaggaaaaacaaggaactggcgcgccgtattgccgaattaagtccaaaaggaggtccgcctgagaccattgaaggtttaaggcaggcaattgcgttatatgaagatcaaattgagcgtaatgtcagagaaggtgcgcagacaggaacatactggaaaattcttgccataaggcttgccgataaaggaatgcacaacgacgcgcttaaagcccttgaacgcgctatttattttatttccgaagacccggttctttataaccttacgggtgttagcgcgggaattgcggcaaaatcggttgtaggtttcacgtcttctgcggaaaaagaaagggatcaattctttaaactttcggagaattcatataaacgcgccttggaactggacgcaacttacacaaaaccgatgtacggtcttgccgtattgtatgtatttgaacttaaccgtccttcggaagcaataccatatcttgagcgttatttgtcaataaatacttcggactttaatgcaatgtttattctggcaagggcgcacgccgtaaccggaaactataaacaggcgattgaaatttacgaaaaaattatttcccgatcaaaaaagaaagatatacaggcggaagcgtctaataatatagaaattgtacagaggatgatgtatgagtag

SEQ ID NO: 72266 - protein, 249 aa, Unknown
  Obtained from environmental sample
  SIGNAL (1)...(27)
  misc_feature (1)..(249): Xaa is any amino acid
MRQFKEIIIAILIVTAVSFLLYSLVQSDNKRKNKELARRIAELSPKGGPPETIEGLRQAIALYEDQIERNVREGAQTGTYWKILAIRLADKGMHNDALKALERAIYFISEDPVLYNLTGVSAGIAAKSVVGFTSSAEKERDQFFKLSENSYKRALELDATYTKPMYGLAVLYVFELNRPSEAIPYLERYLSINTSDFNAMFILARAHAVTGNYKQAIEIYEKIISRSKKKDIQAEASNNIEIVQRMMYE

SEQ ID NO: 72267 - DNA, 987 bp, Unknown
  Obtained from environmental sample
  misc_feature (1)..(987): n is a, c, g, or t
atgagtagccgtggaatgctggatttatatatttctcttttaccgaggttaatgcccgcggaaaaagtaaatatgctggaggcttttgaatgtgaagacgatcttgttcttcaaaccagggaagacatggaacattttttggggcgaaaaattattaatttctgggatatagataaaattcgcaatcaggcggagcaaatagagaccgttcacagaaaaaggtcgataaattgggtgtcatggagccgcgccgcgtatccgccgctgttaagagaaatgtacgatcctcctgccgttatttattacaggggttgccttccagacccggataaatctatgcttggcatggtcggtacgcgcaggccaagccctgaagcggcaaatcaggcttatacattggcttgcggcgctggaaaggcgggcctttcggtagtatcggggcttgccctcggcattgacgcaatgtcgcataggggaaacttggcaggcggcgttcccggatacgcggtattgggttcgggagtagacgaaatctacccgtcttcgaacagggctttggcaaagaagatactggattcaggcggagctctgctttcagaatatcctccggggacaaagcccagtaaatggaatttccccgcaagaaacagaattatcgccgccctgtcacgcggcgttataatcgtggaagcgccgagaaaatcaggcgcgttgattaccgcgtctttcgcccttgaacagggaaaagacctttgggtagcctcaagcgggcttcaggaacatcagtacagttctctgcacgataaaatcggaacgatcaaacttgcaagcgacggagcggaaataatttattcaataggcgatgtatttgaaaaatggaatatagaatttgcagataacggtgattctgatgatgcgccggtatgggattctacaggaatggaactggcggcctctatggcggattttctggaaattaatttataa

SEQ ID NO: 72268 - protein, 328 aa, Unknown
  Obtained from environmental sample
  DOMAIN (70)...(284): SMF family
  misc_feature (1)..(328): Xaa is any amino acid
MSSRGMLDLYISLLPRLMPAEKVNMLEAFECEDDLVLQTREDMEHFLGRKIINFWDIDKIRNQAEQIETVHRKRSINWVSWSRAAYPPLLREMYDPPAVIYYRGCLPDPDKSMLGMVGTRRPSPEAANQAYTLACGAGKAGLSVVSGLALGIDAMSHRGNLAGGVPGYAVLGSGVDEIYPSSNRALAKKILDSGGALLSEYPPGTKPSKWNFPARNRIIAALSRGVIIVEAPRKSGALITASFALEQGKDLWVASSGLQEHQYSSLHDKIGTIKLASDGAEIIYSIGDVFEKWNIEFADNGDSDDAPVWDSTGMELAASMADFLEINL

SEQ ID NO: 72269 - DNA, 2160 bp, Unknown
  Obtained from environmental sample
  misc_feature (1)..(2160): n is a, c, g, or t
atggcggcggaaacaaaggcaaaaaaacaaagcaaggttgctaaaaaagttacaaaaaaagaaaaagaaaagcaaactcttgtaattgtggaatctccaggtaaggtgaaaaccatcgaaaaatatttgggaacttcctataacgtaaaagcgtctatgggtcatcttatcgatctgcccaaatccagaaccgcgattgatgttgagcataactttgaacctgaatacatcacagtccgcggcagagcgaaaattttaaaagaattgcaggctgacgcgaaaaaagcggaaaaagtattgcttgcctgcgataatgaccgcgagggcgaggctatcgcgtggcatttgcgaaacgcgatcttggcaaagacggataaagttcccatagagcgtatcagttttaacgaaataactccgcaggctgttaacgacgccgttctgcacccgcgtaacattgacgaggaaaaagtcgccgcgcaaaaagcgcgccgtgttcttgacaggcttgtaggctataatctttcgccccttctctggaaaaaagtgaaaaacggactttccgcgggcagggtgcaatcggttgcgttacgccttatctgcgaaagggaaaaagaagttgaaagttttattcccgaagaatattggactctggaagctgattttaaattaggcagaacatcttatgccgcccagcttgttttgtggaataacaataaacctgaacttaaaaatgaaaccgaagttaagaacatcatagaaaaaattaaaaacagcgaatgcgtggtttccgatgtccgcgaaacggataaaacaatccgtcccaaagcgccgtttaccacctcgcaattacagcagacggcggcaaacaggcttggttacacatcgcgcaaaacaatgcaggtggcgcagcagctttacgaaggcgtaagcataggagccagccgcgtcggtcttattacttatatgcgtacagacagcgtccgcatttcaaataccgcgctggaagacgtgcgcgcgtggcttggaaaaaatttccccggcgaactgcctgaaaaacccgttgaatacacggtgggcaaaaaggctcaggacgcgcatgaggcgataagacctacatatacggaatatactcccgattcggtaaaagaatcgcttacaaaagatcaacttcgcctttatacgattatctgggaaagatttgtttccagtcagatgaataacgcaaaaagcagaacggtcagcgtcgatataaaagttacggaaggacaggacgaggggctgttccgagtcagcgggacaaaactccttgaaaaaggattttataaagcaattaaacttctttcctcaaaagatgaaagcggaaacacctgcccttcgttaaaaacaggcgataaagtaaacgtagataaatttaaaccggaacagcattttacccagggtcccgcccgttattccgacgcttcaatcgttcgtattcttgaggaaaaaggcatagggcgtccgtcaacttacgcgtcaattatttcggttcttttggatcgttactatgttacgcgctcaaataaacagttggttcccacagtgcttggcaaattaataaatgaggtattggtagaaaacttcccgctttatgttgacgctgattttacggcatcaatggaaacaaaacttgatgaagtagaagaaaacaaagtcagttggcccgagatgataaaggatttctggttcccctttaaaacgatagtagacgacgtgggcaaaaaagtggaatcatttaaagggacgttggatgaaaaaactgattttgtctgtgaaaaatgcggaaaaccgctgcttaaaaaattgggaagatacggatattttctggcgtgttcaggttttccggagtgcagaaatacaaaatcaattcctcttgccaaatgcccgaaatgcgacggcgatatagtcgcgcggaaaaccaagggcaggggcaaagaattttacggttgtacaaattatcctgaatgtgactttataagccactttaaaccgataaatcagaattgtccgaagtgcggatttttcatggtggaaaaatacgacaagaaaaacggcgcgcataaggcttgtataaatcctgattgcgattatttacacagcgcggatgataatgaggaataa

SEQ ID NO: 72270 - protein, 719 aa, Unknown
  Obtained from environmental sample
  DOMAIN (25)...(135): Toprim domain
  misc_feature (1)..(719): Xaa is any amino acid
MAAETKAKKQSKVAKKVTKKEKEKQTLVIVESPGKVKTIEKYLGTSYNVKASMGHLIDLPKSRTAIDVEHNFEPEYITVRGRAKILKELQADAKKAEKVLLACDNDREGEAIAWHLRNAILAKTDKVPIERISFNEITPQAVNDAVLHPRNIDEEKVAAQKARRVLDRLVGYNLSPLLWKKVKNGLSAGRVQSVALRLICEREKEVESFIPEEYWTLEADFKLGRTSYAAQLVLWNNNKPELKNETEVKNIIEKIKNSECVVSDVRETDKTIRPKAPFTTSQLQQTAANRLGYTSRKTMQVAQQLYEGVSIGASRVGLITYMRTDSVRISNTALEDVRAWLGKNFPGELPEKPVEYTVGKKAQDAHEAIRPTYTEYTPDSVKESLTKDQLRLYTIIWERFVSSQMNNAKSRTVSVDIKVTEGQDEGLFRVSGTKLLEKGFYKAIKLLSSKDESGNTCPSLKTGDKVNVDKFKPEQHFTQGPARYSDASIVRILEEKGIGRPSTYASIISVLLDRYYVTRSNKQLVPTVLGKLINEVLVENFPLYVDADFTASMETKLDEVEENKVSWPEMIKDFWFPFKTIVDDVGKKVESFKGTLDEKTDFVCEKCGKPLLKKLGRYGYFLACSGFPECRNTKSIPLAKCPKCDGDIVARKTKGRGKEFYGCTNYPECDFISHFKPINQNCPKCGFFMVEKYDKKNGAHKACINPDCDYLHSADDNEE

SEQ ID NO: 72271 - DNA, 936 bp, Unknown
  Obtained from environmental sample
  misc_feature (1)..(936): n is a, c, g, or t
atgaaagaggaaaaggaagaacatataattaagcctccggctgttattactgagtatttatcctatatggaatcagtaaaaggttgttcagcaagaacattggaggcttacaaaaacgatttattgcattatgtgaaatactgcaataatcacgatattgttattgaaaaagcggaggcttatcaagtgcagagttttatcgctgaattaaccgcggaaaatatggcggcgtcaagcgttaatcgttttctctcaacagttcgcggtttttaccgctggatggtgcgccttaaaaaacgcgccgataatccatgcaccgcgctgcgtaatattaaaacgcccgaaaaactgccccatgttttatgggaagatgaaatggcggaatttgcctctcttccggagacaaccggaatcctctggcccgaaagggataaggcgcttattatggcaatgtattcggcggggcttagaatctcggaagtagtgtctctttccatggcgaatatatccgccgatcttgacgaggcgaaaataacagggaagggcggaaaacagcgttttgtgtttttcagcgacgaggcggtagcggcgattcaggaatatcttccgcaaagggcggaacttttaaaaacagccggagttgacgggaaaaagacagccttgtttatcagcagaaaaggacatcccatttcaattcccggagtgcgctggataatttcacgttacgcgcttcattcgggaatgggcaaaaacattcatccgcacgcgctccgccacagttttgccactcatcttgtaaattcgggctgcgatgtgcgcattgttcaggaaatgctggggcactcaagcatttccaccacacagcgttatacgcatgttaatcttgaaaatatgaaaaaggtatacgcggcttcgcatccgcacgcgggaggttaa

SEQ ID NO: 72272 - protein, 311 aa, Unknown
  Obtained from environmental sample
  DOMAIN (16)...(98): Phage integrase, N-terminal SAM-like domain
  misc_feature (1)..(311): Xaa is any amino acid
MKEEKEEHIIKPPAVITEYLSYMESVKGCSARTLEAYKNDLLHYVKYCNNHDIVIEKAEAYQVQSFIAELTAENMAASSVNRFLSTVRGFYRWMVRLKKRADNPCTALRNIKTPEKLPHVLWEDEMAEFASLPETTGILWPERDKALIMAMYSAGLRISEVVSLSMANISADLDEAKITGKGGKQRFVFFSDEAVAAIQEYLPQRAELLKTAGVDGKKTALFISRKGHPISIPGVRWIISRYALHSGMGKNIHPHALRHSFATHLVNSGCDVRIVQEMLGHSSISTTQRYTHVNLENMKKVYAASHPHAGG

SEQ ID NO: 72273 - DNA, 540 bp, Unknown
  Obtained from environmental sample
  misc_feature (1)..(540): n is a, c, g, or t
atggaaggaaaaataagaagcactaccgtaatagcggtaagaaaagacggcaaggtcgctatggccggagacggtcaggtaacaatgggcgatacggttatgaaaaataacgctcgtaaagtccgccgtcttatggacggaaaagtgctttgcggttttgcgggcgctacggcggacgcgtttacgctctttgatcgttttgaagaaaagttaaaagaatattcgggagacttggcaagagccgctgtggaattggcaaaagaatggcgcatggatcgaaatttaagacgccttgaggcgcttctgctggtagccgatttatcaaaaacattgttaatttccggcacgggagacgtgatagagccggcggaaaacgcgcttgcgattggctccggcggaaattacgcgtacgccgcggcgttggctttccttgagggaagtaagtttacggcggcggaaatagcggagaaaagtttaaagattgcaggtaacatctgcatttatacaaatatgcaaataacattagaggaattaagctga

SEQ ID NO: 72274 - protein, 179 aa, Unknown; identical to SEQ ID NO: 68260
  Obtained from environmental sample
  DOMAIN (5)...(178): Proteasome A-type and B-type
  misc_feature (1)..(179): Xaa is any amino acid

SEQ ID NO: 72275 - DNA, 1530 bp, Unknown
  Obtained from environmental sample
  misc_feature (1)..(1530): n is a, c, g, or t
atggaagaaaaaaaagaatatacgccgaagcaaattgtagcggaattggacaagtatattgtgggtcagaaaaaggcgaaaagagccgtcgctgtagctttgcgtaaccgcatcagaagattaaaactcgcccccgaaattcgcgaagatatcgctccaaaaaatattcttatgattggacctacaggagttggaaaaacagaaatcgcccgccgtcttgcgaaacttgcggggtctccgttcttaaaagtagaggcgacaaaatatacagaggtaggctatgtaggcagagacgttgagtccatggtacgcgatttaatggcggctggatttcaaatggtaaaacaggaaatgcaggagacagtaaaacaggaagccgaaaaacgcgcggaagaagcgcttttggatttattactgcctgtaaactcaaaaaagcagaaagagaaaaaaccgcgtcccggtccgataataaagcccatgggctctttctcaattaaccctgaaaattcaaacggcagtattatcgcgacaacattacagttgggatttcccactgtcaaaaaaaataaagaaactcaggatgaagatcagagtaacgcggatgccgcaagtcaggcggaagaagttaaagacggcgaagatgataaatttaaagatacaagagagaaattaagaacaatgcttcgcgaaggcaaacttaacgacagaacagtcgaacttatggttggacaaagtccgacgttccccacttttgaaatgatgggcggcagtatggaagaccttgaggcaagcatttcagggattgccggaatgttaggcggcggtcaaaagaaaaaagttgtaaccgttccgcgcgcgatggaaatactaagagccgaagaagccgagaaacttgtagaccgcgacagggtaagcgacgaggcgcgccagcgcgtggaagaaacgggaataatcttcatagacgaaattgacaaaatcgcggtaaaaggcgacagaggcggcggtcccgacgtttcgcgcgaaggcgtacaacgcgacatccttcccattgttgaaggagcgacggttaacacaaaatggggacccgtcaatacggatcatattctctttatcgcggcgggcgctttcaacgtaagcaaaccgtcggacttaattcccgaattacagggaagattccccctgcgcgtggaattggattctttgggtaaggacgattttttgcgtattttaacggagcccaagaacgcgcttatcaaacagtacgttgctctgcttgggacggaaaatatcgagcttaattttgcttcggaagcgattgaacacatggcggcgctggcggcagaggttaactcgaagctggaaaatattggggcaaggcggcttcatacaataatggagacccttttggaagagctttcgtttgaagcgtccgatatagcccccgcgaaggttgacataaccgtggattatgtcaataaaaaactggcggaaatcgtcaaggatcaggatcttggcaggtatattctatag

SEQ ID NO: 72276 - protein, 509 aa, Unknown
  Obtained from environmental sample
  DOMAIN (55)...(452): ATPase family associated with various cellular activities (AAA)
  misc_feature (1)..(509): Xaa is any amino acid
MEEKKEYTPKQIVAELDKYIVGQKKAKRAVAVALRNRIRRLKLAPEIREDIAPKNILMIGPTGVGKTEIARRLAKLAGSPFLKVEATKYTEVGYVGRDVESMVRDLMAAGFQMVKQEMQETVKQEAEKRAEEALLDLLLPVNSKKQKEKKPRPGPIIKPMGSFSINPENSNGSIIATTLQLGFPTVKKNKETQDEDQSNADAASQAEEVKDGEDDKFKDTREKLRTMLREGKLNDRTVELMVGQSPTFPTFEMMGGSMEDLEASISGIAGMLGGGQKKKVVTVPRAMEILRAEEAEKLVDRDRVSDEARQRVEETGIIFIDEIDKIAVKGDRGGGPDVSREGVQRDILPIVEGATVNTKWGPVNTDHILFIAAGAFNVSKPSDLIPELQGRFPLRVELDSLGKDDFLRILTEPKNALIKQYVALLGTENIELNFASEAIEHMAALAAEVNSKLENIGARRLHTIMETLLEELSFEASDIAPAKVDITVDYVNKKLAEIVKDQDLGRYIL

SEQ ID NO: 72277 - DNA, 414 bp, Unknown
  Obtained from environmental sample
  misc_feature (1)..(414): n is a, c, g, or t
atgaatacatttgctaaaactatcgatttattacaccgcgcaatggacgcaaacactgtccgcaggcaggttatagccaataatttggctaacgccgatgttccgaattttaaacgcacagacgtcaactttgaaagcgcgttaaaaaaggcgcttgaatcggaaaataaaagaccggtgatggaattgaatatgactcacccaaaacattttccgaattacaaggaaagggactaccgcgacgtgcagattcgccgcgttttagactacacaaccgcatacaacaacaacgggaacaatgtagacccggaaaaggaattcatgcttgccacggagaaccagatgagctacacgctcttcgcgcaagccgcggcgtttgaatttagccagataaatcaggtattaagaggataa

SEQ ID NO: 72278 - protein, 137 aa, Unknown
  Obtained from environmental sample
  DOMAIN (8)...(38): Flagella basal body rod protein
  misc_feature (1)..(137): Xaa is any amino acid
MNTFAKTIDLLHRAMDANTVRRQVIANNLANADVPNFKRTDVNFESALKKALESENKRPVMELNMTHPKHFPNYKERDYRDVQIRRVLDYTTAYNNNGNNVDPEKEFMLATENQMSYTLFAQAAAFEFSQINQVLRG

SEQ ID NO: 72279 - DNA, 462 bp, Unknown
  Obtained from environmental sample
  misc_feature (1)..(462): n is a, c, g, or t
atgggaatttttaattcgataagcgttgcggcgacaggtttaaccgcaaacagaatgaggctcgacgttatagccaacaacatggctaacgtaaatacgacaagaacgaccgaaggcggtcccttcagacgcagccgcgtagttatgcgccctgttacggaaagtccgttttggcgttctccgttccttcccgattccatggacgacggaattggtaaaggcgtgcgcgttgtggaagttcaaaaggatcttaaaacagagcctcgttatgtttatgatcctacgcaccccgacgcgattctttcaggtccgagggagggctatgttgaaatgcccaatgtagacgttgttacggaaatgacggatatgatttcagcttcgcgatcttatgaagcgaacgccgccattattgaaggatcaaaatccatgttccaaagagctttggacataggatcaaaatag

SEQ ID NO: 72280 - protein, 153 aa, Unknown
  Obtained from environmental sample
  DOMAIN (7)...(37): Flagella basal body rod protein
  misc_feature (1)..(153): Xaa is any amino acid
MGIFNSISVAATGLTANRMRLDVIANNMANVNTTRTTEGGPFRRSRVVMRPVTESPFWRSPFLPDSMDDGIGKGVRVVEVQKDLKTEPRYVYDPTHPDAILSGPREGYVEMPNVDVVTEMTDMISASRSYEANAAIIEGSKSMFQRALDIGSK

SEQ ID NO: 72281 - DNA, 342 bp, Unknown
  Obtained from environmental sample
  misc_feature (1)..(342): n is a, c, g, or t
ttgaaaatttttagcaatcaggcttttgtaagcgcgtcagcggcgcagaattattcgattacgatgaatcgcactcatccaaagcatatgcagatgcccgacagtccgtactttgggaacgggaataaagctctcgcgcttagggatacaatcggagcgcagggcattacaagggcgggcgtttttgaggacgcaatgcttcaagcgctggataaggtatcgggagcgcagttaaacgcaagcgagctgcagaagcaggcgattatcaaccccgattcggttgatattcatgatattacgatagcccaggcggaagcgagcatggcgctggagttacgctaa

SEQ ID NO: 72282 - protein, 113 aa, Unknown
  Obtained from environmental sample
  misc_feature (1)..(113): Xaa is any amino acid
MKIFSNQAFVSASAAQNYSITMNRTHPKHMQMPDSPYFGNGNKALALRDTIGAQGITRAGVFEDAMLQALDKVSGAQLNASELQKQAIINPDSVDIHDITIAQAEASMALELR

SEQ ID NO: 72283 - DNA, 738 bp, Unknown
  Obtained from environmental sample
  misc_feature (1)..(738): n is a, c, g, or t
ttgcggataatgatgccggagtatgaaaatttcggcgttaattacgatcaaatgataaaaccttcgattgattctccggcgtcaaacgccgtaataacccatatcgccttacatcaatacgacggaccttatgattcgtccgacagggccggagcaaaggcgtttccggatatcatcgcaacaggcaaacgtttttggcagaccgaagtttcaacatcgggcgggcaaatgccatacggaaccggcattgacaacgcgctttattacgccagaatgatacattttgattttactctttcacaaattaacgcttatctttactggtggctttggaaaaataacgacaatgacaggaattttccaggaggcttaataaacatcacggacggcgcaattaaaacttcaaaacgccttttcgcgcttgggcagttttcgcgctttatcaggccgggatggttcaggatagaatgcggcgattctcccaagtacggggtgtactcaagcgcgtacagaaatccaaaaacaaaagaaatcgcagtagttttaattaacgacagaatggccgaccacactctttcgctggatttatctggagcggaattttctgagatttcggcatggcggacatcggcaaatgaagaactaaaaagtttgggaaaacaaaaattgtcaaaaaataccatgagcgtaaaacttccgcaaaaatcaataactactctttacggaaaggttaaataa

SEQ ID NO: 72284 - protein, 245 aa, Unknown
  Obtained from environmental sample
  misc_feature (1)..(245): Xaa is any amino acid
MRIMMPEYENFGVNYDQMIKPSIDSPASNAVITHIALHQYDGPYDSSDRAGAKAFPDIIATGKRFWQTEVSTSGGQMPYGTGIDNALYYARMIHFDFTLSQINAYLYWWLWKNNDNDRNFPGGLINITDGAIKTSKRLFALGQFSRFIRPGWFRIECGDSPKYGVYSSAYRNPKTKEIAVVLINDRMADHTLSLDLSGAEFSEISAWRTSANEELKSLGKQKLSKNTMSVKLPQKSITTLYGKVK

SEQ ID NO: 72285 - DNA, 1188 bp, Unknown
  Obtained from environmental sample
  misc_feature (1)..(1188): n is a, c, g, or t
ttgataaaacccgggaaaaaaatattaataattattttttgtataaccttgtttactaatataactatggcctgtaaaacaaacgcgggaaaagaacctaaacaggttcctttgtatacaaaatggccgttccctgtcggagcggcggcccccaacacggcgtttacctcaaaaaaagaacaatacaacctgctttatcattttaacgttctcgcaacggaaaatgaaatgacgccggaagccctgctgccgcccgcggaaaaaggagcctacaggtgggccaaggcggatacgctggtaaattacgcgcaggataaaaatgttaaaatccgcgggtcttcgcttgtttgtcacaagcaaactcccgcgtggttctttgaaggctccggaaaagactctcttgcgtcaaaggaacagctttattccagaatggaaaattacataaaaaacgtgtttgaaaaatacggaggcaaaatcggctggtggaacgtctgcagcgaagttgtcggagacgacgggtctccccgtgcggccgcaagctcaaaatacaccgctatcatgacaaattccggctttacaggcatgaacagatacgagtatgtccttcaggctttcatttgggcgcgaaaatacgcagatgcaaacggcggcaagaacgttaaactctaccttaacgattataacatcgaatacgacggcgcgaaacaaagcgagtttatcaaactggtatactggctgatagaaaaagacgctcctattgacggtatcggccttgagtgccacatcaagtgggactggccgagcgcggcgcaaatctcaggcgccattgacaagttatccgccataacaaggaaagacggcgttaaattaataacgcaggtaacggaactggatatgtcgcttttcagcagcaacgaaagcgattttcacggcggacacattcttcttacgcttcccgatgtcatgcgcgacaggcggcttccggcgcangcgaaaaaataccgcgagctctttgacatgtttaanaataaatacagggaaaaaaaactcgatatggttctgatatgggggcttgccgacggccatagctggttaaacaattacnccgcgcagggcagaacggattatccctttctttttgaccgcggctataagccganagaggcgtattgggaactggtaaaataa

SEQ ID NO: 72286 - protein, 395 aa, Unknown
  Obtained from environmental sample
  SIGNAL (1)...(24)
  DOMAIN (35)...(395): Glycosyl hydrolase family 10
  misc_feature (1)..(395): Xaa is any amino acid
MIKPGKKILIIIFCITLFTNITMACKTNAGKEPKQVPLYTKWPFPVGAAAPNTAFTSKKEQYNLLYHFNVLATENEMTPEALLPPAEKGAYRWAKADTLVNYAQDKNVKIRGSSLVCHKQTPAWFFEGSGKDSLASKEQLYSRMENYIKNVFEKYGGKIGWWNVCSEVVGDDGSPRAAASSKYTAIMTNSGFTGMNRYEYVLQAFIWARKYADANGGKNVKLYLNDYNIEYDGAKQSEFIKLVYWLIEKDAPIDGIGLECHIKWDWPSAAQISGAIDKLSAITRKDGVKLITQVTELDMSLFSSNESDFHGGHILLTLPDVMRDRRLPAXAKKYRELFDMFXNKYREKKLDMVLIWGLADGHSWLNNYXAQGRTDYPFLFDRGYKPXEAYWELVK

SEQ ID NO: 72287 - DNA, 1560 bp, Unknown
  Obtained from environmental sample
  misc_feature (1)..(1560): n is a, c, g, or t
atgaataacacccattatacatttttaacttcccgatcaggcgaaatagtacccgctattattgataaagacggagtatcccgcccattacactccacagttgatccaatacgcgaagcggaacgccttgtgtctactataccgcaggatacgggttttgtgatttttttgggtctttgcggcggctttgcacagcagatcgcgctctccaaaacgtccgcgcagattgttgtcatagattttaacaaagacggcataaaagaacttttatcatcaaaagattacacgccgcttttaaacaacggacgtttcagccttttaacggattttacgttagatgaaataaaaaaatatatcattactaactacaaccccgctctgtgcggcggtattaaagttattcccatgcggacaagaaccgagcatgacttagaaaagtttaacaaagccgccgctgttatacaggaagcgatagacgccgccgcatcggacttcagcgttcaggcgcattttgggcttcgctggttttccaacattatccgcaacataaaaaatgccgaatctacaaagcaatctttcagcgcaaaaaaaattaatgaagcggcaattgtcgcggcgggtccttcgcttgacgggcaaataaccgctcttgcggaatttaaatccaaaggcgtttttattatctgttccgataccgccctgcccgtacttttgcataacggcattgaacctgacgccgtagtttccattgactgccagcatatcagccactatcattttttcggctgtaacatccgcagcattccgctgattctggacatcgcaagccctcctctggtctcccgcttttcaaccttacccgtctttttttccagcggacatcctctcgcgttgtacatttcccgttactggcgatctttgcccttgcttgatacatcaggcggcaatgtaacatacgcctgtctatcccttgctgaaacgcttggcgcaaaacaaataacgctattcggcgcggatttctcctatatccgctcccaatcttacgcaagaggaacatacgtctacccctactttaacagaaggcagaaccgcctctctcccgcggaagcgcaaatgtcaacctttttgtaccgcagtccttttctgcctcgcgaaaacgaaaaccaaatttaccatgaaacatcatcgcttcgtttctacagaacaaaactggaagaaaaagcggcggcaatggacgtgcaaatccgcgccttccccggacaaggcgctcccatcgacttgacaaacaaagcaactcataacgcgaacaataaaaattacgctctcggcgcggcagaaaatcaaaacaaaagcggaattgagtttcttgaacagtaccgcagcgacatagccgctctgcccgcaagcggattaaatgaaaaagaaaggcaaatttttaccacgcttctgcccacagccgccgcgctcaaacaccgtaacacgaacaatattgcagatttaatcgaaacaacaaaaaatcattgtattaatcaaatagataaggtacttgggacacattaa

SEQ ID NO: 72288 - protein, 519 aa, Unknown
  Obtained from environmental sample
  DOMAIN (174)...(340): Protein of unknown function DUF115
  misc_feature (1)..(519): Xaa is any amino acid
MNNTHYTFLTSRSGEIVPAIIDKDGVSRPLHSTVDPIREAERLVSTIPQDTGFVIFLGLCGGFAQQIALSKTSAQIVVIDFNKDGIKELLSSKDYTPLLNNGRFSLLTDFTLDEIKKYIITNYNPALCGGIKVIPMRTRTEHDLEKFNKAAAVIQEAIDAAASDFSVQAHFGLRWFSNIIRNIKNAESTKQSFSAKKINEAAIVAAGPSLDGQITALAEFKSKGVFIICSDTALPVLLHNGIEPDAVVSIDCQHISHYHFFGCNIRSIPLILDIASPPLVSRFSTLPVFFSSGHPLALYISRYWRSLPLLDTSGGNVTYACLSLAETLGAKQITLFGADFSYIRSQSYARGTYVYPYFNRRQNRLSPAEAQMSTFLYRSPFLPRENENQIYHETSSLRFYRTKLEEKAAAMDVQIRAFPGQGAPIDLTNKATHNANNKNYALGAAENQNKSGIEFLEQYRSDIAALPASGLNEKERQIFTTLLPTAAALKHRNTNNIADLIETTKNHCINQIDKVLGTH

SEQ ID NO: 72289 - DNA, 912 bp, Unknown
  Obtained from environmental sample
  misc_feature (1)..(912): n is a, c, g, or t
atggaaattcccgttattattacgggatcaggtccaagccttgaacaagctctgcctgttattcaaaaggcgcaggacaactgtcttatcatcgccgcgtcttcttccgttcttgcgctgtcatcggcgggtatagcggcggatatagtcatcgcgacagacggcggcagttgggcattaaaacacatttaccatttttacagagacaaaaaatacgcaaacgcttcagcttttgccgttaatctctgcgccgccctgccctctcagtgcgcggacagcgcgcaattaattttaaacgacggcagtttttggcagaacatcgttcttcacgagcttaatttaccgtcagtaattattccgcaaagaggaacggtaaccgcaaccgccgtggagcttgcctttgttctttcaagcggaaacatctatcttgccggtttggatttttcagttaatgacattagaacccacgcaagaccgtatagttttgacaatttattttacggcaaagctaaccgttttattccgttctactcggagagttacgcacgttcaagattgcttcatcagggcggaagtatggacatatacgcgtcatggtttaaggagcagttaaacaagtggtcaaaacgaatttattccataggcggcaataaaatttttgaacacggtgagccttcgccgcgcaacggtttaaaaaagactgatgatttttttaagacggtcgaagtagaaaattcaaatgtcttttgcgaaaagggaatacaagccctgcttaacgcgttaaaaaaatccgaatactcacaaaatataaaacgggaacttaattccctgctcttttcaggcgaaaatgaagtaacggagcggaaattggaaaccgcaataaaagaaacctgtataaaggcgcttacatga

SEQ ID NO: 72290 - protein, 303 aa, Unknown
  Obtained from environmental sample
  DOMAIN (1)...(148): Protein of unknown function DUF115
  misc_feature (1)..(303): Xaa is any amino acid
MEIPVIITGSGPSLEQALPVIQKAQDNCLIIAASSSVLALSSAGIAADIVIATDGGSWALKHIYHFYRDKKYANASAFAVNLCAALPSQCADSAQLILNDGSFWQNIVLHELNLPSVIIPQRGTVTATAVELAFVLSSGNIYLAGLDFSVNDIRTHARPYSFDNLFYGKANRFIPFYSESYARSRLLHQGGSMDIYASWFKEQLNKWSKRIYSIGGNKIFEHGEPSPRNGLKKTDDFFKTVEVENSNVFCEKGIQALLNALKKSEYSQNIKRELNSLLFSGENEVTERKLETAIKETCIKALT

SEQ ID NO: 72291 - DNA, 2814 bp, Unknown
  Obtained from environmental sample
  misc_feature (1)..(2814): n is a, c, g, or t
atggctagtaataaaaaaccttcgatatactctgatcgcgcaagcattggaagcgcgaaagatctggatgaatacggcgtatgggtaaagagcgaacctcaagttcttagtgattccgatggtatatcttccgatcttagtatttctccctctggaaaatcatccagcagcgacgaatcattaacttttgacgacgcggtatttgacgttagtgaagctgcgtcacaatcccaatccgaaaatgttgaattccctgatgacgacatagatattgatcttgaagacgatcctttaacttcaaaagatgatttatcggatctcagcatgccttccgatgacagtctcggcgttacacccgaaaacgaagatatcgaaatagaagacacttcttttgatgaatttgaagttcctccgcaagaagaagaaacaactgaaacagaaaccggtgatttcagcgatgataatttaaccatagatgatattgacggcggaacggacaacgatgaatttgacaccgaggatttaagcgtcccgactgtaaaagcaatcgaaaacaatattgacaccgtatccgacgatttagacgccgcggcgagcgatggtaatgtttcaacccatcttcttaaacaaatcgccacagagctttcgtcaataagaaacgaacttacagaacttaaaaaagaatttgccaatatccgttctgccactcccgccggagaagaaaaaaccgacgagggcggcggattcttctccgatgacgaggatgaaactctttctcttaccggcgatgaacttaacaacatattaagttcaggcggcgctatggaagagggcgtaccggaaaccattgatgatgaagatgacgaaacaatttcgcttacaggcgatgaaatggacaacatccttaactcggcggattttactgaagaatcgggaaccgaggaaacgccggtagatgattcttcccttgacgttgacaatattgatatcgacattgatacaaacgaaacaacagaagaacagactgacactgcgtcagacgacgccgctcttgctacagacgattttgcggacgtttcattagacgatacagcgtcaaccgacgctgtggcggacgatgccgatcttgccacagacgactttgcggacgtctcgttagacgatacagcgtcaaccgacgctgcggcggacgatgccgatcttgccacagacgactttgcggacatttcgttagacgatacagcgttaactgacactgcggcggacgacgccgatcttgctacagacgactttgcggatgtttcattagatgatacagcgttaactgacactgcggcggacaacgccgctcttgctacagatgattttgcggacgtttcattagacgataccgcgtcaactgacattgcagcagacgacgccgatcttgctacagacgattttgcggacgtttcattagacgatacagagtcaactgacattgcagcagacgacgccgatcttgctacagacgactttgcggatgtttcattagacgatacagcgttaactgacactgcggcggacgacgccgatcttgctacagacgattttgcggatgtttcgttagacgataccgcgtcaactgatgttgcggcggatgatgccgctcttgctacagacgactttgccgatatttcgtcaactgaacttacatcagaagaaacaacagaagagcaaactgaaactgacattacggcagacgacgctgatcttgcctcagatgactttgccggcatttcgttagacgataccgcgctggacgctgaccttgctgcagatgattttgccgacatttcatcgtctgacgacgctttgtcagacgactctctctcaaccgacgctttgtcagacgatgctctttcggctgacgctttgtcggatgacactctctcaaccgacgattcgtcaactgaccttgcatcagacgacgctgatcttgcctcagatgactttgccgatattacattagacgacaccgcgttggacaccaaccttgcctcggatgattttgccgatatttcgtcaactgacgacgcttcttctactgaccttgcgtcagatgaccttgcgtcagatgatcttgcgtcagacgacgcttccgccgcgcaggatcccgaccttgcaatggatgattttgcagatatttcacaggaagatacagaaataatcgacaaagcccaaactgacgatgaattggacaaactgcgcgaagaaggcgcgatgctcatgacggaagcccctgaaaacagcgattatcttgaaaacgattcaatggatctgtcagacgcggtaatcgacgaaccggtattatcatctaacgaacttttggaaaaagaagtattaacagagccttctttggacggagaagattttgacatggattcttttgataatttatcaattgattccgatacggatgacgatttttcttctcttgacgacgatacagcatcgcagccggaagctcccgcgcccgctcctcagcctgccgcaaaagctcctccgccgccacccgctcaagaagctgctgctgcgccgcagcccgcgcctcaaaccgctccccaatccgcttctgtagccgtagcgggcggacaagccggcggcggcgctccgtttacccttccttcgggtttaagatcagaacttagaaatattttaagctacatggatcagcttcttgaatcattaccggaagaaaaaatcgaagagttcgcaaaatcagaatacttcgattcctacaagaaactctttaaggatttggggctggtataa

SEQ ID NO: 72292 - protein, 937 aa, Unknown
  Obtained from environmental sample
  misc_feature (1)..(937): Xaa is any amino acid
MASNKKPSIYSDRASIGSAKDLDEYGVWVKSEPQVLSDSDGISSDLSISPSGKSSSSDESLTFDDAVFDVSEAASQSQSENVEFPDDDIDIDLEDDPLTSKDDLSDLSMPSDDSLGVTPENEDIEIEDTSFDEFEVPPQEEETTETETGDFSDDNLTIDDIDGGTDNDEFDTEDLSVPTVKAIENNIDTVSDDLDAAASDGNVSTHLLKQIATELSSIRNELTELKKEFANIRSATPAGEEKTDEGGGFFSDDEDETLSLTGDELNNILSSGGAMEEGVPETIDDEDDETISLTGDEMDNILNSADFTEESGTEETPVDDSSLDVDNIDIDIDTNETTEEQTDTASDDAALATDDFADVSLDDTASTDAVADDADLATDDFADVSLDDTASTDAAADDADLATDDFADISLDDTALTDTAADDADLATDDFADVSLDDTALTDTAADNAALATDDFADVSLDDTASTDIAADDADLATDDFADVSLDDTESTDIAADDADLATDDFADVSLDDTALTDTAADDADLATDDFADVSLDDTASTDVAADDAALATDDFADISSTELTSEETTEEQTETDITADDADLASDDFAGISLDDTALDADLAADDFADISSSDDALSDDSLSTDALSDDALSADALSDDTLSTDDSSTDLASDDADLASDDFADITLDDTALDTNLASDDFADISSTDDASSTDLASDDLASDDLASDDASAAQDPDLAMDDFADISQEDTEIIDKAQTDDELDKLREEGAMLMTEAPENSDYLENDSMDLSDAVIDEPVLSSNELLEKEVLTEPSLDGEDFDMDSFDNLSIDSDTDDDFSSLDDDTASQPEAPAPAPQPAAKAPPPPPAQEAAAAPQPAPQTAPQSASVAVAGGQAGGGAPFTLPSGLRSELRNILSYMDQLLESLPEEKIEEFAKSEYFDSYKKLFKDLGLV

SEQ ID NO: 72293 - DNA, 2172 bp, Unknown
  Obtained from environmental sample
  misc_feature (1)..(2172): n is a, c, g, or t
atgagcatcgcgccttcttcgcgcagtttgtccaattcatcgtcagtttgggctttgtcgattatttctgtatcttcctgtgaaatatctgcaaaatcatccattgcaaggtcgggatcctgcgcggcggaagcgtcgtctgacgcaagatcatctgacgcaaggtcatctgacgcaaggtcagtagaagaagcgtcgtcagttgacgaaatatcggcaaaatcatccgaggcaaggttggtgtccaacgcggtgtcgtctaatgtaatatcggcaaagtcatctgaggcaagatcagcgtcgtctgatgcaaggtcagttgacgaatcgtcggttgagagagtgtcatccgacaaagcgtcagccgaaagagcatcgtctgacaaagcgtcggttgagagagagtcgtctgacaaagcgtcgtcagacgatgaaatgtcggcaaaatcatctgcagcaaggtcagcgtccagcgcggtatcgtctaacgaaatgccggcaaagtcatctgaggcaagatcagcgtcgtctgccgtaatgtcagtttcagtttgctcttctgttgtttcttctgatgtaagttcagttgacgaaatatcggcaaagtcgtctgtagcaagagcggcatcatccgccgcaacatcagttgacgcggtatcgtctaacgaaacatccgcaaaatcgtctgtagcaagatcggcgtcgtccgccgcagtgtcagttaacgctgtatcgtctaatgaaacatccgcaaagtcgtctgtagcaagatcggcgtcgtctgctgcaatgtcagttgactctgtatcgtctaatgaaacgtccgcaaaatcgtctgtagcaagatcggcgtcgtctgctgcaatgtcagttgacgcggtatcgtctaatgaaacgtccgcaaaatcatctgtagcaagagcggcgttgtccgccgcagtgtcagttaacgctgtatcatctaatgaaacatccgcaaagtcgtctgtagcaagatcggcgtcgtccgccgcagtgtcagttaacgctgtatcgtctaacgaaatgtccgcaaagtcgtctgtggcaagatcggcatcgtccgccgcagcgtcggttgacgctgtatcgtctaacgagacgtccgcaaagtcgtctgtggcaagatcggcatcgtccgccacagcgtcggttgacgctgtatcgtctaatgaaacgtccgcaaaatcgtctgtagcaagagcggcgtcgtctgacgcagtgtcagtctgttcttctgttgtttcgtttgtatcaatgtcgatatcaatattgtcaacgtcaagggaagaatcatctaccggcgtttcctcggttcccgattcttcagtaaaatccgccgagttaaggatgttgtccatttcatcgcctgtaagcgaaattgtttcgtcatcttcatcatcaatggtttccggtacgccctcttccatagcgccgcctgaacttaatatgttgttaagttcatcgccggtaagagaaagagtttcatcctcgtcatcggagaagaatccgccgccctcgtcggttttttcttctccggcgggagtggcagaacggatattggcaaattcttttttaagttctgtaagttcgtttcttattgacgaaagctctgtggcgatttgtttaagaagatgggttgaaacattaccatcgctcgccgcggcgtctaaatcgtcggatacggtgtcaatattgttttcgattgcttttacagtcgggacgcttaaatcctcggtgtcaaattcatcgttgtccgttccgccgtcaatatcatctatggttaaattatcatcgctgaaatcaccggtttctgtttcagttgtttcttcttcttgcggaggaacttcaaattcatcaaaagaagtgtcttctatttcgatatcttcgttttcgggtgtaacgccgagactgtcatcggaaggcatgctgagatccgataaatcatcttttgaagttaaaggatcgtcttcaagatcaatatctatgtcgtcatcagggaattcaacattttcggattgggattgtgacgcagcttcactaacgtcaaataccgcgtcgtcaaaagttaatgattcgtcgctgctggatgattttccagagggagaaatactaagatcggaagatataccatcggaatcactaagaacttga

SEQ ID NO: 72294 - protein, 723 aa, Unknown
  Obtained from environmental sample
  SIGNAL (1)...(18)
  misc_feature (1)..(723): Xaa is any amino acid
MSIAPSSRSLSNSSSVWALSIISVSSCEISAKSSIARSGSCAAEASSDARSSDARSSDARSVEEASSVDEISAKSSEARLVSNAVSSNVISAKSSEARSASSDARSVDESSVERVSSDKASAERASSDKASVERESSDKASSDDEMSAKSSAARSASSAVSSNEMPAKSSEARSASSAVMSVSVCSSVVSSDVSSVDEISAKSSVARAASSAATSVDAVSSNETSAKSSVARSASSAAVSVNAVSSNETSAKSSVARSASSAAMSVDSVSSNETSAKSSVARSASSAAMSVDAVSSNETSAKSSVARAALSAAVSVNAVSSNETSAKSSVARSASSAAVSVNAVSSNEMSAKSSVARSASSAAASVDAVSSNETSAKSSVARSASSATASVDAVSSNETSAKSSVARAASSDAVSVCSSVVSFVSMSISILSTSREESSTGVSSVPDSSVKSAELRMLSISSPVSEIVSSSSSSMVSGTPSSIAPPELNMLLSSSPVRERVSSSSSEKNPPPSSVFSSPAGVAERILANSFLSSVSSFLIDESSVAICLRRWVETLPSLAAASKSSDTVSILFSIAFTVGTLKSSVSNSSLSVPPSISSMVKLSSLKSPVSVSVVSSSCGGTSNSSKEVSSISISSFSGVTPRLSSEGMLRSDKSSFEVKGSSSRSISMSSSGNSTFSDWDCDAASLTSNTASSKVNDSSLLDDFPEGEILRSEDIPSESLRT

SEQ ID NO: 72295 - DNA, 552 bp, Unknown
  Obtained from environmental sample
  misc_feature (1)..(552): n is a, c, g, or t
atggcggcgacggcgatgccgagcctttcgatttcggcgagtctatgcggcagcttgaaacgccgcccgccgcagacgcccaaccggcggcggccgctcccgccgagcccgcccctacgcccgcgaccgccgttcaagacgacgcggccccgtccggcggggaggcttccgacggcgacggcggcaaacatgccgcgaccggtaagagcgacatccgcgccgccgatagagacgacggcgacggcggctccacccccctattcgcgaaacccgaattcgaactcaacctcggcatggccacggtcaacggccagccctggacacgcgtcgcgctcggcatcgacctacccatctggaagttcggcgtcttccttgatctcgagctcttcatcgacgacgaaagcaaagtgtcgaacaagggctgggacttcaaagatcacgcggcggaggccgtcttccgcaagatacgctacatacgctacgggcacgaggacgagccgctgtttatcaagttcggcggactgtcaaacgtcacgctgggctacggcatga

SEQ ID NO: 72296 - protein, 183 aa, Unknown
  Obtained from environmental sample
  misc_feature (1)..(183): Xaa is any amino acid
MAATAMPSLSISASLCGSLKRRPPQTPNRRRPLPPSPPLRPRPPFKTTRPRPAGRLPTATAANMPRPVRATSAPPIETTATAAPPPYSRNPNSNSTSAWPRSTASPGHASRSASTYPSGSSASSLISSSSSTTKAKCRTRAGTSKITRRRPSSARYATYATGTRTSRCLSSSADCQTSRWATA

SEQ ID NO: 72297 - DNA, 1653 bp, Unknown
  Obtained from environmental sample
  misc_feature (1)..(1653): n is a, c, g, or t
ttgaacgattacgtcagtccacgtcaaccgaaacgcgggtcggctaagggcgcgtccgatccgcgaaagtttaaaatccccgaaaagggcaggattcgggtcgcgctggtcgcggttgtattgacaatagcaattgtcaagtttgccggaccttgcggcgacgggaaaaaatcgaaagtaatcagcgccgcggacagcgtgggcaccgttaatagccctaataacgccaaggcagataagacgccaaagaaggataagggcgacaagaaaaatccagcaacgaataaaagcggcgataataaagcaaccactgataatcgtaccgccggtaatgttgataacgttaatcatgttaatactaataatgctgtcactccaaataataacgccgaaaccgttaatccaaaagataataaaaagaaccctcccgacaacaacaaaatgacatttgccgacctgcgccggttagtcaaggaatacaagataggcgcgggcgcttcgcatcaacagatcgtcgtcgccgcaagcgaaagcggcagggggcttttcggttggggcaagggcaaggacaccggcggcgacacgctctccgtagccctaagcgtcgatacgaccctccagaagtatgccgccagcatattccgccagtataggccgcgctacgcggcggcggcggctctcgacccgtccacgggccgcgtgttggcgcttgtctcctacgccgacgacggagaggagctggacggctccaatctgtaccttaagaattactttccggcggcctccgtattcaagacaatcgtcgccgccgccgcggtggagaggggcgcaatgcacggcaaaacggtattagagcacttcggacgcaaccacacgctctacaccacgcaattaaagaaggatctcaaggtctcgcgtgaaatcactttggaggatgcctacgcctactctgtaaaccctgttttcgcccgcatcgctctattcaatgtgaacaaggacgtcgtgacggagtacgggcggcgcttcgggttcaacgagtccgtaccgtttgagtacgatatcgacgtgagcgagatgttcgagccggacaccggattctccgtggccgagttcgcctccggtttcaaccgcaagaccactatcacaccgctcttcggggcgctcttggccggagcggtatgcgagagcggcgtgatcttcgaaccgacaatcgtcgataccgtccgctccgggcgcggcgactcctgcgtctacgtcaggcggacaaaggtatggcggcgagccgtgaaggagcccacggcggcggagcttagggatatgatggcaaaagtgacgcagtacggcaccgcccacaaaacctttcggcaattgcgcgattccccgaagtacaacgcctttgagttcggcgggaagacggggtcgatgaaccaaatcgggcttgggcgcgtggactggttcgttggatttgccagaaacccgggcaacaagagccagcggatagcggtgagcgtggtgactacgcacggcgactattggacggtgcactcaagctacgtggccgcggagctcattaaaaagtacatcagcaacgctaccgccgcaacatccgctcgtgcaacctctcaacctgcaggcaaaacgcctcaatcctag

SEQ ID NO: 72298 - protein, 550 aa, Unknown
  Obtained from environmental sample
  DOMAIN (222)...(529): Penicillin binding protein transpeptidase domain
  misc_feature (1)..(550): Xaa is any amino acid
MNDYVSPRQPKRGSAKGASDPRKFKIPEKGRIRVALVAVVLTIAIVKFAGPCGDGKKSKVISAADSVGTVNSPNNAKADKTPKKDKGDKKNPATNKSGDNKATTDNRTAGNVDNVNHVNTNNAVTPNNNAETVNPKDNKKNPPDNNKMTFADLRRLVKEYKIGAGASHQQIVVAASESGRGLFGWGKGKDTGGDTLSVALSVDTTLQKYAASIFRQYRPRYAAAAALDPSTGRVLALVSYADDGEELDGSNLYLKNYFPAASVFKTIVAAAAVERGAMHGKTVLEHFGRNHTLYTTQLKKDLKVSREITLEDAYAYSVNPVFARIALFNVNKDVVTEYGRRFGFNESVPFEYDIDVSEMFEPDTGFSVAEFASGFNRKTTITPLFGALLAGAVCESGVIFEPTIVDTVRSGRGDSCVYVRRTKVWRRAVKEPTAAELRDMMAKVTQYGTAHKTFRQLRDSPKYNAFEFGGKTGSMNQIGLGRVDWFVGFARNPGNKSQRIAVSVVTTHGDYWTVHSSYVAAELIKKYISNATAATSARATSQPAGKTPQS

SEQ ID NO: 72299 - DNA, 4473 bp, Unknown
  Obtained from environmental sample
  misc_feature (1)..(4473): n is a, c, g, or t
atggccgcttcgtctataggtatatgcttcggttcgtccgccgttatggccgccgagcttttctccgacgccgacgggagcctccgcctcgggcgcgcggagtccgcaagccacgagagcaatccccgcaaagcctttttaagcctgctcgaccgtttcgacgtcggcgcctacggctacggcatgttcacggggcgcaagttccgcaacctcgtgaacgcgcgctccatcaccgagccggagagcgttgaatacgcgctgcgccttcttcgggagaccggaaagtacacatcaggcaaacccggggcggtggcaagcctggggtcggagaacttcattgtctacgccctgagcggcgatgggatgataagcaccgtcgagacgggcaacaagtgcgccagcggtacgggggagttcttcctgcagcagcttaggcggatgaacgtctccgttgaggaggccgtggagctagccgcgaactcggaggagttcaaggtctccggacgctgctcggtcttctgcaagagcgactgcacccacgccctgaacaagaacatccccatagggcgggtcagcgccggcctgtgcaggatgatggccgagaagattttggatttgctggagaaggtgcccaacaagaggattatagcgacgggtggcgtcacgcataacgccgtaataatggagatgttgaggccgcacgtggatgagctgtatattccggagtttgccgattgttttgaggcggtcggcgccgcgttttacgcgcttatcaacaaaacgccgcttgggttggacagggagcgtatatttgtagagggcggaacgtcgttctcagaactcccgccgatagagatggggaagccgctggtgcggtttgaggatatagagataaagagcgccgacgccggcgatgaattgatactcgggctcgacgtggggtcgacgaccacgaaagccgtcgcgttgcgcacgaaggacgacgccatcgtcgcgtccatatacttgaggacaaacggaaatccggtgcaggcctcccgcgagtgctacgcggcgctgctgcggcagatcaccgttccggtcagcataatagggctgggcaccaccggctccggccgccaaatcgccggactgcacggcggcaccgacggcgtcataaacgagataatagcccacgccgccgccgccgcccgcttcgacaaagaggtggacaccatcttcgagataggcggacaagacgccaagtacacctatttgaccaacgccgtagcctccgattacgcgatgaacgaggcgtgtagcgccggtacgggttcgtttcttgaggagtcggcgggcgagacgctgggtatcgattacaaagagatagagggcatcgcgataaagagcaagcacccgcccaatttcaacgaccagtgcgccgcgtttatcagttccgacatccgcaccgcgtcgcacgagggcgtggcgaaggaggatatcgtcgccgggctcgtgtactccgtgtgcatgaactacgtcaaccgcgtgaaggggcagcgcagcgccggcaacaagattttcatgcagggcggcgtgtgctacaacaaggccgtgccgctggctatggcgaacctgatcggtaaggagatagtggtcccgccgcatcccgggctgatgggggcctacggggtggcgcttgaggtcaaggatcggatagagaaaaagctgttgcagccgtcgtcattcgatttaaaggcgctcgcggatagggaggtgctctacggcaagcgtttcgtttgcgcgggcggtacgtggcattgcgaccgtaagtgcgagattaatatgatgattatcgacgataagaagtttccgttcggcggggcttgcaacaagtattacaatatgattcaccacgtgcggtttgagaagggcgtgtatgataacgcggcggtccgtcagaaaatggtgtttaacgatttcgcggcggtgtcggcggacgaggcggttaagaacggtatagataagtccaaagaccctggattgcttcgtcgcttcgctcctcgcaatgacgtcattgcgagcgaagcgaagcaatccagagaatcatgcaacgataatgccgttaatcaaggtagcagtatcaatcaatccgacagtaacatatcagcgggcaaaaatacaaagcgcgtagggataaaccgggcgtttttgacaaacacattctatccgttatactcaacgttctttaagtcattgggtctggaaatcgtcctatcgcccgatgtcagcgccgacggcatcaaacgcaaacgttcttctttctgctatccgggcgaaatcgctcacggcgcgttgcatagtctgctcctcacagagcccgacttcgtcttcctccccaaactcgtggaactttacgtggagggaatgccggatcgccgcaaggagcatcaatgtacttgtctccttctgcaatgcgagccgtattacctcaagagcgcgtttaaggatttgttgcaaaagacaaagctcgtctctcccgtgattgacttctcaaagggctacgagacaatgaacgaaacgtttgccgatatcgcggaggagtgcgggtgcggcagacgcgaaggcattgaggcctatgccgccgctctcaaagcgcaacgcgaattctttgccgaacagcgcaaacgcggcgccgagatactcaaagagttggaggccgacccaaagcgcaccgccgtcgttctcttcggccgcccgtacaacgcttttgccgacgagggcaacctcggcatccccggcaagttcgcctcacgcggcgttaccgtcattccgtgggacatgcttaattatgacgacgaaccttgttccatggagatgaactgggcgatggggcagaacatacttagggcggctaatgtcgcaagccgccacccgcagctgttcggcgcctatatcacaaatttcagttgcggtcccgactcttttctcgtcggctatttccgcgacataatgaaggacaagccgtcgctaacgcttgagctggacagccacaccgccgacgccggcgttaatactcgcatagaggcgtttttggacatcgtcgcccggtacagggcgctccgcatttcggcaagcgccgaggctccgttccgaaaggccttcatagattattccggaaaaaagccgatgttcgtcgcctcggacggcacccgtgcgtcgcttaaggacaagagggtgcacgtgctcttcccgtcaatgggctcattgacaagcgatatcttcgccgcggcgtttagcggggcggggatcaacgcctcggcgataccggtttatgacacggaggtcttgaaggtcggcaaggggcacagttcatgcaaggagtgtctgccgctcatactaaccacaggcgggttgctgcattacttatcgtcgcgccgtaatacggatgaatacttggtatatttcatgcccacaagcggcggcaactgccgcctctcccagtacaacgtctacatccgcagcgtcttagaaaagaagcgcgtaaaggacgtgacattgctttccttgacaaatgagaacggttacgcggggcttgaagtcaaagatacgctgaacgtaatgaaaggcgccatagtcgccgacgtcatggaggacgtcaaaaacgccctcagcgtgttggcgaaagacaagcggtcggcaatgaaaatctttcatgaggagtgggagcgtatcttggcgctgtttcgcaccggcaaaaccgcgccgctctataaattattggacgacgcggccgctaagctcaaagccgtcccgattaaatatccgttgcgggaggctaaggtcatctcgcttctcggggaaatttttgttcgtagagattatttcgccgcgcaggatttgcttgaacgtctcgaaaaacgcgaaatcatagtgaaacgcgcccctctcttcgagtggctcgaatactgcgactggaacgtggagaacggcatctttgaggcggatttcggattaatggggaaattcgagttcaaggtgcggcggatgctgcagttgcgtctcgaaagaaagataaagagcgtcctcgctaagtccgggctttatacgtatgaacttacggagatggacaaaatcataaagtacgggcgcgagttcttcgatccccgccttacgggggaggctattctcgtcgccggaacgttctttaaggatatattgcacaccacccacgggaccatccagataggcccctttgcctgtatgcccacacgcgtcgtggaggcggtgcttaccgcggaggccaccgtggacaataagaaaatgcttgacaaaagggtattgggcggcagtcactccggggataacataagcacgttgccgtttttgtcgatagagagcgacggcaacccctttccggccatattggagtctaggattgaggcgttttgcctgcaggttgagaggttgcacgagcggatgttgcggcggtag

SEQ ID NO: 72300 - protein, 1490 aa, Unknown
  Obtained from environmental sample
  SIGNAL (1)...(17)
  DOMAIN (6)...(256): BadF/BadG/BcrA/BcrD ATPase family
  misc_feature (1)..(1490): Xaa is any amino acid
MAASSIGICFGSSAVMAAELFSDADGSLRLGRAESASHESNPRKAFLSLLDRFDVGAYGYGMFTGRKFRNLVNARSITEPESVEYALRLLRETGKYTSGKPGAVASLGSENFIVYALSGDGMISTVETGNKCASGTGEFFLQQLRRMNVSVEEAVELAANSEEFKVSGRCSVFCKSDCTHALNKNIPIGRVSAGLCRMMAEKILDLLEKVPNKRIIATGGVTHNAVIMEMLRPHVDELYIPEFADCFEAVGAAFYALINKTPLGLDRERIFVEGGTSFSELPPIEMGKPLVRFEDIEIKSADAGDELILGLDVGSTTTKAVALRTKDDAIVASIYLRTNGNPVQASRECYAALLRQITVPVSIIGLGTTGSGRQIAGLHGGTDGVINEIIAHAAAAARFDKEVDTIFEIGGQDAKYTYLTNAVASDYAMNEACSAGTGSFLEESAGETLGIDYKEIEGIAIKSKHPPNFNDQCAAFISSDIRTASHEGVAKEDIVAGLVYSVCMNYVNRVKGQRSAGNKIFMQGGVCYNKAVPLAMANLIGKEIVVPPHPGLMGAYGVALEVKDRIEKKLLQPSSFDLKALADREVLYGKRFVCAGGTWHCDRKCEINMMIIDDKKFPFGGACNKYYNMIHHVRFEKGVYDNAAVRQKMVFNDFAAVSADEAVKNGIDKSKDPGLLRRFAPRNDVIASEAKQSRESCNDNAVNQGSSINQSDSNISAGKNTKRVGINRAFLTNTFYPLYSTFFKSLGLEIVLSPDVSADGIKRKRSSFCYPGEIAHGALHSLLLTEPDFVFLPKLVELYVEGMPDRRKEHQCTCLLLQCEPYYLKSAFKDLLQKTKLVSPVIDFSKGYETMNETFADIAEECGCGRREGIEAYAAALKAQREFFAEQRKRGAEILKELEADPKRTAVVLFGRPYNAFADEGNLGIPGKFASRGVTVIPWDMLNYDDEPCSMEMNWAMGQNILRAANVASRHPQLFGAYITNFSCGPDSFLVGYFRDIMKDKPSLTLELDSHTADAGVNTRIEAFLDIVARYRALRISASAEAPFRKAFIDYSGKKPMFVASDGTRASLKDKRVHVLFPSMGSLTSDIFAAAFSGAGINASAIPVYDTEVLKVGKGHSSCKECLPLILTTGGLLHYLSSRRNTDEYLVYFMPTSGGNCRLSQYNVYIRSVLEKKRVKDVTLLSLTNENGYAGLEVKDTLNVMKGAIVADVMEDVKNALSVLAKDKRSAMKIFHEEWERILALFRTGKTAPLYKLLDDAAAKLKAVPIKYPLREAKVISLLGEIFVRRDYFAAQDLLERLEKREIIVKRAPLFEWLEYCDWNVENGIFEADFGLMGKFEFKVRRMLQLRLERKIKSVLAKSGLYTYELTEMDKIIKYGREFFDPRLTGEAILVAGTFFKDILHTTHGTIQIGPFACMPTRVVEAVLTAEATVDNKKMLDKRVLGGSHSGDNISTLPFLSIESDGNPFPAILESRIEAFCLQVERLHERMLRR

SEQ ID NO: 72301 - DNA, 1593 bp, Unknown
  Obtained from environmental sample
  misc_feature (1)..(1593): n is a, c, g, or t
atggacggcagcgaatactccggcgtcacggtttcattgggcgagggcaggttcgccaatctgacgaacgccaggaccgctaaggcggccggtatcgccttctggggtcgcggcggcgagggcgtgggcaacgtcggcgtaggcctcttggacaatcagggcaagaacagcgccggcgtggaggtcaaggtgcagactaaggtgctcctcggcgacttcggcaagatcgagcccgtgtggaagtactatatgataccgattcgctccttcaggcccgagggtctctattgggacgacagcaagaacgccgaggtctccggcaaggtggattggacgaagatacaggaagtgcgcttctccgtaggcaagggcgagaacaaggttcccgagggcgaaccggtcactttctatgttaaggatctatccgtcatcgaggagatccccggttacgtgaatccggacgactactggaacgcgttcaagtccaacgccccggaggtcaagttgcacgacatggagacggaggccgaacagaagtgggagtcctcaaacgggcccaagtccgaagtctcgttcaagtactccgaatccggcgctccgaacggcggcaagtccgcgcttgaggtcacctacagattgggcgactgggtcgacgtgctgttcaattatagggatcagaaccgccccgccgagcagcgcgattggacgaagcactgggggttgaagttcgacttctacacggataagccctatcagccgataaccgttcaggttcaggacaagggcaacgagatattcgtggcgccgtcgggcggcaacaaggggtggaatgaggttatagtcccgttcaagaacttcgcgaagttcccctactaccagccggaagacgcggtgcagaacggcaagtttgaccttgacggggtcattgtgctcgacttcaagcccgccggcgagggatcgcgcggtactttcagggtcgacaatataaggctgacaaacgacagggtggccaaggtcaaggaggatccggcgaatgtcgccgtgacgcttacgggcagcgacaaggtgattacgaagaagataaacgaaggcctcttcggtatcaacgttgcgttgtgggacggcgatatgctgttgccggccacggagaagttcgtgaaggatgtgaatcaccacgtactgcgctatcccggcggtcttcgcgccgacgaggatcactgggaagaggtgttgaagaagaaggactggatggtcgacacggacgaattcttggagttctgcaagaagacgaacactacgccgatgatcacggtcaacttcggaaccggtacgccggaggaggcggccaagtgggtgaaccacgtcaacaaggtcaagaaggccaacgtgaagtattgggagatcggtaacgagctttacggtagctggcacgccaaccactgcacgccggaggagtacggcaaacgcgccagggagttcgccaagcagatgaaagcggcggatccgagcattatcatcacggcggtttggatgcttgagggcgagtggaacaagaagaccttgagcagctcaaagacgtggttgacggtgtga

SEQ ID NO: 72302 - protein, 530 aa, Unknown
  Obtained from environmental sample
  DOMAIN (163)...(342): Carbohydrate binding domain (family 11)
  misc_feature (1)..(530): Xaa is any amino acid
MDGSEYSGVTVSLGEGRFANLTNARTAKAAGIAFWGRGGEGVGNVGVGLLDNQGKNSAGVEVKVQTKVLLGDFGKIEPVWKYYMIPIRSFRPEGLYWDDSKNAEVSGKVDWTKIQEVRFSVGKGENKVPEGEPVTFYVKDLSVIEEIPGYVNPDDYWNAFKSNAPEVKLHDMETEAEQKWESSNGPKSEVSFKYSESGAPNGGKSALEVTYRLGDWVDVLFNYRDQNRPAEQRDWTKHWGLKFDFYTDKPYQPITVQVQDKGNEIFVAPSGGNKGWNEVIVPFKNFAKFPYYQPEDAVQNGKFDLDGVIVLDFKPAGEGSRGTFRVDNIRLTNDRVAKVKEDPANVAVTLTGSDKVITKKINEGLFGINVALWDGDMLLPATEKFVKDVNHHVLRYPGGLRADEDHWEEVLKKKDWMVDTDEFLEFCKKTNTTPMITVNFGTGTPEEAAKWVNHVNKVKKANVKYWEIGNELYGSWHANHCTPEEYGKRAREFAKQMKAADPSIIITAVWMLEGEWNKKTLSSSKTWLTV

SEQ ID NO: 72303 - DNA, 723 bp, Unknown
  Obtained from environmental sample
  misc_feature (1)..(723): n is a, c, g, or t
gtggaacaagaagaccttgagcagctcaaagacgtggttgacggtgtgaacgtccaccactacccgcagggcaccggtcaggagaacgacgccggtcttttggccgcgccgcagaccctgaacgagattctgccgggcgtacgtaagcagcttgagcactacggcgtgtcgggcaagaagtacgaggtttggctgacggagtggaactctgtggactttaaacccggtccccagacgctgggtatcgtcaacgccctctttgtggccgactacctcggtatgcttacgcaccacaacatagagcaggcgtcgtactgggatatccacaacagcatcacccccgagggcggcgactacggctacctgtcgcgtaccggcgcaccggacggcgacaacgtgccgcgtccgtcgtactgggcgttcaagatggcgagccacagccttggccgcggttcgctcttggagtcgaacaccggaaacgaccgcgtatcaagctactacacgcttgacggcaagaaaaagtcgcttatgatagtcaacaagcatcctaagagcgtggcggatatcacgatcaacattccgggtttccagggtaaggccaagaagctccttttgaacggtgaaaacgccaagaaggggccgacggaggaggctatagatgttaagccgggcgtgaaactgtcgctgccggcgcactcggtggttacgattacgctggagtag

SEQ ID NO: 72304 - protein, 240 aa, Unknown
  Obtained from environmental sample
  DOMAIN (66)...(233): Alpha-L-arabinofuranosidase C-terminus
  misc_feature (1)..(240): Xaa is any amino acid
MEQEDLEQLKDVVDGVNVHHYPQGTGQENDAGLLAAPQTLNEILPGVRKQLEHYGVSGKKYEVWLTEWNSVDFKPGPQTLGIVNALFVADYLGMLTHHNIEQASYWDIHNSITPEGGDYGYLSRTGAPDGDNVPRPSYWAFKMASHSLGRGSLLESNTGNDRVSSYYTLDGKKKSLMIVNKHPKSVADITINIPGFQGKAKKLLLNGENAKKGPTEEAIDVKPGVKLSLPAHSVVTITLE

SEQ ID NO: 72305 - DNA, 1512 bp, Unknown
  Obtained from environmental sample
  misc_feature (1)..(1512): n is a, c, g, or t
atgaatttctcggaaaaaatcttggacttcttcacgaccgtcctctgccccaccccgcgtccctcgcacagggaggaagcgattgcggacaggcttatcgaattcgcgaatacgcgcaagctaacctcgttccgcgacgcccgcaacaacgtcattatttacaaacccggcacggggaaatatgccggcaccgcgattcccgtaatacttcaggcgcacaccgacatgatttgcgtacccgcctccgccgatttcagcggcggcgtcgaggcgttttattcttctgaaaacaggttgacggggcgcagcgcgattactaaggaaaaaacgtctttgggggccgacgacgggatcggggtcgcggccgcgttggcggtcttggacagcggcgccggcgagatcgtccatccgccgcttgtggcgatattcacggcggaggaggagtgcgggcttaccggggctaaggacatctccgccgacgacatcgtcgggatcgctcccggcttggacttcgggcgcgccgcctttatcaacttggataacggccgtttcggggagttcagcgtgggttgcgccgggtctaccaacgtcaccgtgaaggtgcctataagccgtatgggccttccggcgccgcataaatcctctttctttgaaattgcgatcagcggtctcttgggcgggcactccgggctgtcgatacacgagaggcgggggaacgcgaatatcctgatatgttctaccatccgcaaactctacgacgccggcgtcagcccgcgcattctcggcttcggccggtgcggcgacgcgtcgaacgctatcccggcggcggcgtccgcgtacatcgccatccccaccggtttggaggagaagctcagggcggcgatggaggagctggagcttatgtttaagggaatgttgcgatcagacagcgggatacgcatagaggtgcgcgagaccgatgatttcaaagagagttcgccctactccgctaaaacgatctccaacctgacgctcttagccaccaaagtagacaacggccccctagcctacagcgtcgccatgtccagacttgtggagacgagctcaaacctgggcataataaaggacgagggcagccacatagccgtggtattcatggtaaggagctcggcagacgcgccgatgaagcatgcggtgaaggaaatacgccgcatagccggcctatacgattcggaagtcgaggtaggaagcaaatcgccaggctgggcctataaagaggagagcgcgttaagggatctgttcctgaacaaatacaaggagctgttcggcgaagaagcatacgccgcccccgtccacgccggtctggagtgcggccacttcgtagaaaaattcagccgtttcaaagacatggactttatatcatgcggccctacgactacggagatacacagcgtcaatgagacgttgcataccgatacggtggaaaagttcggcaaattgataattgaagttttaggaaatctttattcctaa

SEQ ID NO: 72306 - protein, 503 aa, Unknown
  Obtained from environmental sample
  DOMAIN (69)...(500): Peptidase family M20/M25/M40
  misc_feature (1)..(503): Xaa is any amino acid
MNFSEKILDFFTTVLCPTPRPSHREEAIADRLIEFANTRKLTSFRDARNNVIIYKPGTGKYAGTAIPVILQAHTDMICVPASADFSGGVEAFYSSENRLTGRSAITKEKTSLGADDGIGVAAALAVLDSGAGEIVHPPLVAIFTAEEECGLTGAKDISADDIVGIAPGLDFGRAAFINLDNGRFGEFSVGCAGSTNVTVKVPISRMGLPAPHKSSFFEIAISGLLGGHSGLSIHERRGNANILICSTIRKLYDAGVSPRILGFGRCGDASNAIPAAASAYIAIPTGLEEKLRAAMEELELMFKGMLRSDSGIRIEVRETDDFKESSPYSAKTISNLTLLATKVDNGPLAYSVAMSRLVETSSNLGIIKDEGSHIAVVFMVRSSADAPMKHAVKEIRRIAGLYDSEVEVGSKSPGWAYKEESALRDLFLNKYKELFGEEAYAAPVHAGLECGHFVEKFSRFKDMDFISCGPTTTEIHSVNETLHTDTVEKFGKLIIEVLGNLYS

SEQ ID NO: 72307 - DNA, 888 bp, Unknown
  Obtained from environmental sample
  misc_feature (1)..(888): n is a, c, g, or t
atgagcacagaaaaaacggaaaacgcgcacaaactgatcggcgccgacatcgccggcgttactttgctgaccctgcacgggcgggggcatacggggcttgtcttcatcgggtttcagcggtcgctgaagcgtaaaatcgcagttaagctggtacctaaggagttggtcgcggcgcggaaattcatggacgaagccgagaccgcggcggtgctgaaccacccgaatatcgtcacggttttcgacgtcggggagttcgaggagtacctgtacataaccatgcagttggtggacggggagagtctgcaaacgctgataaaacgcaaactgcgccatccggcgccgtcgcagcgccgcgtagacctcccgacggcgttgcgtacggccgcacaaacgctcgacgctctcgcctacgcccacaagtccggggtggtgcatcaagacgtgaagccgggcaatatactgatagagaaggagagcgggcggtcgtatttagtggacttcggcatagctcggacggaactgacggaggaggactccctgttcgtccacggcacgccgctctacatgccgccggagcaggcgcggggcgaggtaacggacgccggggcggacattttcgcggccggagtgacgctgtgggagtgcctctccggaacgctgccggtgccggtgctgccgcctgttaaattggtggggataaaggcgaagcgtccgtgggacttttttgaaatgacgccgtcggagagcagcgacaggatagacggggaacttgaggcgataatacaaaaagccacggcgagttacagggatgatcgttatgaggattgcacggagtttctcggaaagataaaggaatacgcttataaaaaattggggttgacgttgtag

SEQ ID NO: 72308 - protein, 295 aa, Unknown
  Obtained from environmental sample
  DOMAIN (20)...(280): Protein tyrosine kinase
  misc_feature (1)..(295): Xaa is any amino acid
MSTEKTENAHKLIGADIAGVTLLTLHGRGHTGLVFIGFQRSLKRKIAVKLVPKELVAARKFMDEAETAAVLNHPNIVTVFDVGEFEEYLYITMQLVDGESLQTLIKRKLRHPAPSQRRVDLPTALRTAAQTLDALAYAHKSGVVHQDVKPGNILIEKESGRSYLVDFGIARTELTEEDSLFVHGTPLYMPPEQARGEVTDAGADIFAAGVTLWECLSGTLPVPVLPPVKLVGIKAKRPWDFFEMTPSESSDRIDGELEAIIQKATASYRDDRYEDCTEFLGKIKEYAYKKLGLTL

SEQ ID NO: 72309 - DNA, 1467 bp, Unknown
  Obtained from environmental sample
  misc_feature (1)..(1467): n is a, c, g, or t
atgagcatcggccctgaaattctcgacgacggtcttcccaatatctcctcattcaaagaggtcgaggacgccgttaaatcgcgtccccaaaacgtcttcagccccgccgatttgggccggatcaacttcggcggcatccgcagcgccacggccgtagccctgcacatgcaccaacccttgatccccgccggcggcggcgacctcgggacggcggacatcatcagcaacctcaagtacatgatggacaaccagggcatcggcgacaaccacaacgcgcccgtcttccactggtgctacaagcgcatcggcgagttcattccgcagctcctcggggagggcaagcagccgcgcgtcatgctcgagtactccggcgaactcctctacgggttgcgcaaaatggggctcgacgacgtcttcgacgccctaaaacgcgtcacctgcgaccccggaatggcccacaccgtcgagtggctgggctgcccctgggggcacgccgtggcgccctcgacgcccgtgcaggactataggctccacgtaaaggcgtggcagagcaacttcgccgcgattttcggaatcgacgccctcaaacgcgtacgcggcttttcgccctccgaaatggcgctgcccaaccatcccgacaccgcctacgaattcgtgaagaccctcgtcgattgcggcttcacctgggtgctcgtgcaggagcacaccgtggaacgccccgaaaacggctgggggcccgagaacaagtacatcccccaccgcctcgtctgcaaaaactccaagggcgaaacggcgtccatcatcgccatcatcaaaacccagggcagcgacaccaagctcgtggcgcagatgcaaccctactacgaggctaaaggcatgtcgcgcacggccatcgccggcaagagcgtcccgccgattgtcgcccagatcgccgacggcgaaaacggcggcgtcatgatgaacgagttcccgccgaagttcatggaggtggccagagactcaaccggctccgactcccccatgatgaacgtcaccgagtacctcgagcacctagcggctatgggcatcaccgaaaaagatctccccaccctgcagccgctctaccaaaaacgcatttgggacaaagcggcgggaagcgccaagaaattggacatagcgcaaacgatagaggagctcaagaaagaggacggccgcttccacatggacggcgggagctggacgaacaacatatcttgggtgcagggctaccaaaacgttttggacccgatcaataaactgagcgcgctcttcgcccaaaaggtgctgggctcgaaggtgccggtgacagaacataggtataggaacgcgttgtactacttgctgctgtcgcagaccagctgcttcaggtactggggccagggggtttggacggactacgccagagagatctgccggcgggggatggagattgtcgacaaggatttttga

SEQ ID NO: 72310 - protein, 488 aa, Unknown
  Obtained from environmental sample
  misc_feature (1)..(488): Xaa is any amino acid
MSIGPEILDDGLPNISSFKEVEDAVKSRPQNVFSPADLGRINFGGIRSATAVALHMHQPLIPAGGGDLGTADIISNLKYMMDNQGIGDNHNAPVFHWCYKRIGEFIPQLLGEGKQPRVMLEYSGELLYGLRKMGLDDVFDALKRVTCDPGMAHTVEWLGCPWGHAVAPSTPVQDYRLHVKAWQSNFAAIFGIDALKRVRGFSPSEMALPNHPDTAYEFVKTLVDCGFTWVLVQEHTVERPENGWGPENKYIPHRLVCKNSKGETASIIAIIKTQGSDTKLVAQMQPYYEAKGMSRTAIAGKSVPPIVAQIADGENGGVMMNEFPPKFMEVARDSTGSDSPMMNVTEYLEHLAAMGITEKDLPTLQPLYQKRIWDKAAGSAKKLDIAQTIEELKKEDGRFHMDGGSWTNNISWVQGYQNVLDPINKLSALFAQKVLGSKVPVTEHRYRNALYYLLLSQTSCFRYWGQGVWTDYAREICRRGMEIVDKDF

SEQ ID NO: 72311 - DNA, 399 bp, Unknown
  Obtained from environmental sample
  misc_feature (1)..(399): n is a, c, g, or t
atgatatttcttgattcggatattatttcttactatcttaacgcaaatataaagatcaaggaaaaaatttttgaggcaattgataacggtgaagatatttgcatgactgtaataaatatatatgaaatactaagaggatttaagtggagaaacaacaaacaaaaagaagttcattttaataaattcttgaaaaatgtcgctattttcactatagatgacggtgcaacgaatattgcgtcgtctatatatgcaaatttaagaaaaaccggaaaaactataggggacgccgatatactaatcgccgctattgtaatgaaaaataaaggaattttgatatccaataatgtaaaacattacgaaaatatagagggattagtattggtaaattggtcaacttag

SEQ ID NO: 72312 - protein, 132 aa, Unknown
  Obtained from environmental sample
  DOMAIN (2)...(130): PIN domain
  misc_feature (1)..(132): Xaa is any amino acid
MIFLDSDIISYYLNANIKIKEKIFEAIDNGEDICMTVINIYEILRGFKWRNNKQKEVHFNKFLKNVAIFTIDDGATNIASSIYANLRKTGKTIGDADILIAAIVMKNKGILISNNVKHYENIEGLVLVNWST

SEQ ID NO: 72313 - DNA, 1302 bp, Unknown
  Obtained from environmental sample
  misc_feature (1)..(1302): n is a, c, g, or t
gtgcagattaaaaagagagcggaaatggcgaaatcggcgctggttacgcggcttaagcgggttcgggcgccaagggcggtcaaggcggttatcaccgccgtcaaaggcggcgtgacggccgccgaaggtttcagcgccgccggcgtcaaagccggaatcaaggcgtctaagaaggccgacctcgccgccgtggtgagcgaccgcggcgcctccgccgccggaacgttcaccagaaacgccatccgcgcctcaagcgtcatgcgttgcgaaaacctcctcccaaccggcggcatccgcgctatactctgcaactccggctgcgccaacgcctgcaccggcaaacagggcgtaaaagacaccgacgccactgcggcgctgctggccaaagccttaggcatcatgccgaagcacgtcctgaccgcctccaccggcgtcataggcaagttcctgcctatggacaagatcgccgccgccatgcctagcttagtaaaagacctatcgccgaccggcggcggcgccttctcgagggctatcatgaccacggaccttgcccaaaaagagtccgccgtgaaggtcgcctgcggaaagcaaactttcaccatcggcggcaccgtaaaaggctccggcatgatccacccccacatggccactatgctgtgcttcataaccaccgacgccgacataacccccgccgtcctaaacggcgtcctaaagagcgtggtcgataaaacctttaacaacttgacggtggatggcgacacatccaccaacgacatggtattggtcatggccaacggagcgagcggcacggaggtcaaaggccacatagccggcgataaagatatgctgaacgcctttgaagagggcctgttcgccgtctgcaacgacctatgcaagcagatagccgccgacggcgagggcgccaccaagcgcgtggagatcaacgtgaccggcgccagaaacgaggccgaagccaaagccgccgccaaagccgtggccgcctccaacctgacgaagtgcgccatattcggaaacgaccccaactggggccgcatagcctgcgccgtaggctactccggagccaagttctcggaaatcagaatgtcgataaaactatgcggcatagaagtcttcaggaacctgcagccggtcaagttcgacgagaagaaggcgcatacgcttatgaaaaagaaagtagtggtgatcgacatagacctaggcgtaggaaacaaagcggccacggcgcatacttgcgactttagctacgactatgtcaagatcaacgcggagtataggacgtag

SEQ ID NO: 72314 - protein, 433 aa, Unknown
  Obtained from environmental sample
  DOMAIN (44)...(433): ArgJ family
  misc_feature (1)..(433): Xaa is any amino acid
MQIKKRAEMAKSALVTRLKRVRAPRAVKAVITAVKGGVTAAEGFSAAGVKAGIKASKKADLAAVVSDRGASAAGTFTRNAIRASSVMRCENLLPTGGIRAILCNSGCANACTGKQGVKDTDATAALLAKALGIMPKHVLTASTGVIGKFLPMDKIAAAMPSLVKDLSPTGGGAFSRAIMTTDLAQKESAVKVACGKQTFTIGGTVKGSGMIHPHMATMLCFITTDADITPAVLNGVLKSVVDKTFNNLTVDGDTSTNDMVLVMANGASGTEVKGHIAGDKDMLNAFEEGLFAVCNDLCKQIAADGEGATKRVEINVTGARNEAEAKAAAKAVAASNLTKCAIFGNDPNWGRIACAVGYSGAKFSEIRMSIKLCGIEVFRNLQPVKFDEKKAHTLMKKKVVVIDIDLGVGNKAATAHTCDFSYDYVKINAEYRT

SEQ ID NO: 72315 - DNA, 714 bp, Unknown
  Obtained from environmental sample
  misc_feature (1)..(714): n is a, c, g, or t
atgaaatctttgcctccgtattcggtaattgcagataacggtcattttattgctgtaaacaaatcatcgggaatttccataggcggcgacagatgggatgaatcgcaggaaagactggacaaacttttagagcgcgatttaaatattaaaaaaatatacacagtccaccgcatagacaaggatacttccggtcttgtaattttcgctaaagacaaagaaacccatcgcaatctttcggttgcctttgaaaacagacaagtttcaaagaaatatatcgctatagtacacggacgcaccgcatggaaggaacaaacctgcgatctggcgcttgttcccaacggcaacaaaaaacacatgactattattgataaatttcagggaaaaaaatcatttacgcgctttatttgtcaattttcagccggaaattacagcgtacttgaagcataccccgaaaccggaagaattcaccagattagggtacatcttgccgccttaggacaccccgtagtctgcgacagcctgtacggaaaagaaaaccctataaaactctcttccttcaaacgcggctggaaaggcgaccctgtagatgaaaaaccgttattgtcaagacttggccttcacgcgcttgaattaacgctgcctgataaacaagtacttaccgcgcaaatgccgcgagatatgtcagctttgattaaacagctcgaaaagatataa

SEQ ID NO: 72316 - protein, 237 aa, Unknown
  Obtained from environmental sample
  DOMAIN (15)...(164): RNA pseudouridylate synthase
  misc_feature (1)..(237): Xaa is any amino acid
MKSLPPYSVIADNGHFIAVNKSSGISIGGDRWDESQERLDKLLERDLNIKKIYTVHRIDKDTSGLVIFAKDKETHRNLSVAFENRQVSKKYIAIVHGRTAWKEQTCDLALVPNGNKKHMTIIDKFQGKKSFTRFICQFSAGNYSVLEAYPETGRIHQIRVHLAALGHPVVCDSLYGKENPIKLSSFKRGWKGDPVDEKPLLSRLGLHALELTLPDKQVLTAQMPRDMSALIKQLEKI

SEQ ID NO: 72317 - DNA, 600 bp, Unknown
  Obtained from environmental sample
  misc_feature (1)..(600): n is a, c, g, or t
atgatcatggaaaacataattgaattattgcgcgaatcaaacgcgatgttggaaggccattttcttttaagctcaggacgccactcggacaagtattttcaatgcgccaaacttttgcagtaccccgacaagtcgcaggccgcgttaaagcctgttgcggataaaatacgcgaagacattaaaagcgggcagcttaaggttgatatagtggtagggccggcgatgggcggaattatcgcagcgtgggaggtggcaagacagctttcacttccggcaatttttacggagcgagacgatacaggcgttatgaccctgcgcagggggtttgagttaaaacccggagaaaacgtccttattgtcgaagatgtcgttaccacaggaaagtcctcgatggaatgcgcggcggcccttaaggaagcaggcgctgttataaccgcccttgcctgtgttgttgaccgcagaacagaaaacgcgcaggatattccatggccgttttatccgggtgtaaaagtaagttccgaaaactgggaagctacagattgcgagctttgcaagaagggaattcccgccgtaaaacccggttcaaggaaaataaaataa

SEQ ID NO: 72318 - protein, 199 aa, Unknown
  Obtained from environmental sample
  DOMAIN (47)...(161): Phosphoribosyl transferase domain
  misc_feature (1)..(199): Xaa is any amino acid
MIMENIIELLRESNAMLEGHFLLSSGRHSDKYFQCAKLLQYPDKSQAALKPVADKIREDIKSGQLKVDIVVGPAMGGIIAAWEVARQLSLPAIFTERDDTGVMTLRRGFELKPGENVLIVEDVVTTGKSSMECAAALKEAGAVITALACVVDRRTENAQDIPWPFYPGVKVSSENWEATDCELCKKGIPAVKPGSRKIK

SEQ ID NO: 72319 - DNA, 1056 bp, Unknown
  Obtained from environmental sample
  misc_feature (1)..(1056): n is a, c, g, or t
ttggctgtacaatacgaaccaaaaaaggcaaccgccgctgctgtacggacggccccattttttcatcggaggatattatcgttgagtgaaaataataattatacttccaatgccgatctttccgtaaatatcgcaggagttcatttcagaaatcctgttatagcggcttccggtacattcggtttcggacgtgaatacggttcaatgacggacatatcggttctgggcggcatttgtacaaagggacttacccttactccccgtccggggaatacgggtacccgtatttgggaaactcccgccggcattttaaattctataggccttgaaaatcccggcattcatcattttattgaaaacgatcttccttacttgcgacagttaggtcctgttgtaatcgcgaacctttccggggcggaatccagcgaatatataaaaggggcggctattcttaaccaatctacggtagacatgatagaactgaacatctcctgccccaatgtaaaagccggaggcatttcattcggtcttgatcccggaaccgcggctgctcttgtcgccgccgtaaagcgcgtatgcacaataaaaccgcttattgtaaaactttcacctaacgctccttcccttcccgccgtatccctgtcctgcattaaagccggagccgacgctctttcgcttattaattcttacagggcgatggcgatagacactgttaaccgcaaaccggtatttgacaatgtcagcgccggcctttccggccccgcgataaaaccaatcgcgctgggcatggtttgggaactcattaaaattttaagggattcaaaatcaaacgttccggttataggcataggcggaatttcctgcactaatgacgcgcttgaatttcttatggcgggagcttccgcggtacaggtaggctccgcaacttttgtgaatccaaacacaatgacagaaattatcgacggattacgcaattatttaatagaaaataagatgtcaaatgtaaatcaaatatcaattagaatagaaaaggatgatcatggaaaacataattga

SEQ ID NO: 72320 - protein, 351 aa, Unknown
  Obtained from environmental sample
  DOMAIN (39)...(327): Dihydroorotate dehydrogenase
  misc_feature (1)..(351): Xaa is any amino acid
MAVQYEPKKATAAAVRTAPFFHRRILSLSENNNYTSNADLSVNIAGVHFRNPVIAASGTFGFGREYGSMTDISVLGGICTKGLTLTPRPGNTGTRIWETPAGILNSIGLENPGIHHFIENDLPYLRQLGPVVIANLSGAESSEYIKGAAILNQSTVDMIELNISCPNVKAGGISFGLDPGTAAALVAAVKRVCTIKPLIVKLSPNAPSLPAVSLSCIKAGADALSLINSYRAMAIDTVNRKPVFDNVSAGLSGPAIKPIALGMVWELIKILRDSKSNVPVIGIGGISCTNDALEFLMAGASAVQVGSATFVNPNTMTEIIDGLRNYLIENKMSNVNQISIRIEKDDHGKHN

SEQ ID NO: 72321 - DNA, 783 bp, Unknown
  Obtained from environmental sample
  misc_feature (1)..(783): n is a, c, g, or t
atgagcgcggcaaacaacgcaaagtccattatatgtgaaataacagcaaatcattcaatagacggcgaatcatttgtccttcattgtacatggaacggccttgctcctaaagccggacaatttttcatgataaagccggtgcgtttttcactttttttaccccgtccaataggagtatttgaatttaatccaattcagcaaattgttaaatttcttattacccggcacggcaagggaacagatgaactttcgcagacgcaagcaggcgaaaaaattcaattaataggccctcttggaaacgcttgggaagattttctgcctgttaacggaagcgcggcgcttgtaggcggcggagcgggggtcgctcctcttgcggctcttgtcgctgaaaaacaggattataattttcatctttacgcgggttttaagacgggctttaaggacaaagaacaggaagacgcaatgcttggagccggcagaaacgcaaaaaaagtaattgtaagcgcggaagacggtgtaaacgccatgagcggacgcatagttgaatttctttttgaacctgaaaaatttgacatagtattcggctgcggtccttttgaaatgctaaaagcgttaatggcaagatgcaaaaaaagaaacgtaccgtgtttcgtttcaatggaaagccggatggcgtgcggcataggcgcttgtcttggctgtacaatacgaaccaaaaaaggcaaccgccgctgctgtacggacggccccattttttcatcggaggatattatcgttgagtga

SEQ ID NO: 72322 - protein, 260 aa, Unknown
  Obtained from environmental sample
  DOMAIN (113)...(207): Oxidoreductase NAD-binding domain
  misc_feature (1)..(260): Xaa is any amino acid
MSAANNAKSIICEITANHSIDGESFVLHCTWNGLAPKAGQFFMIKPVRFSLFLPRPIGVFEFNPIQQIVKFLITRHGKGTDELSQTQAGEKIQLIGPLGNAWEDFLPVNGSAALVGGGAGVAPLAALVAEKQDYNFHLYAGFKTGFKDKEQEDAMLGAGRNAKKVIVSAEDGVNAMSGRIVEFLFEPEKFDIVFGCGPFEMLKALMARCKKRNVPCFVSMESRMACGIGACLGCTIRTKKGNRRCCTDGPIFSSEDIIVE

SEQ ID NO: 72323 - DNA, 903 bp, Unknown
  Obtained from environmental sample
  misc_feature (1)..(903): n is a, c, g, or t
gtggtagataaaaagtccgccgttgatttactttttgattctgtagcaagtaaagggcatgtctgcgtcgggcttgacacgtcgtttgattatgttcccgtcagtgaaaaacaaaaagcaaaaaataaggctcaggcggttcttgcctttaataccgcgctcgttgacgcgactattgacgttgccgcgtgttacaaagttcagattgcgtattacgaggaaatgggcatagaaggattaatcgcgtattccaaaactcttgaatatatcagaaaaaaaggcggacttgttatcgccgacatcaagcgcggcgacatcgccgatacggcgcgctgttacgcgaaagcccacttttccggcgattttaaggcggactttgtaactttaagcccctacatgggaatggactccgttgaaccatggctttccgaagctcaggactcaggcggcggagcgtttgtccttatgaggacgagcaatccaggaatgagggacttccaatattcaattacctctgacggaaaaaaactttaccatatggtaggggacaaattgtctgaacttgcttccaaatacgcgggaaaatacggatacggtcttttcggcgcggtagtcggctgtacggaaagggatgaagcctctaacataagagaaaattatcccaatctttttttccttattcccggatacgggacacagggcggcggagcgcatgatgccgcgctgttgttacgcgaaggaaacggcggcgtagtaaacgcttcccgttcaataattacggcatggcagaaagaaaaaaacaatgaaaacgctgataatgcttttgccgccggttcggcgcgcaaagcggctataaaaatgcgcgatgaaattttacttgccgtaaacggagataaaaaatga

SEQ ID NO: 72324 - protein, 300 aa, Unknown
  Obtained from environmental sample
  DOMAIN (19)...(271): Orotidine 5'-phosphate decarboxylase / HUMPS family
  misc_feature (1)..(300): Xaa is any amino acid
MVDKKSAVDLLFDSVASKGHVCVGLDTSFDYVPVSEKQKAKNKAQAVLAFNTALVDATIDVAACYKVQIAYYEEMGIEGLIAYSKTLEYIRKKGGLVIADIKRGDIADTARCYAKAHFSGDFKADFVTLSPYMGMDSVEPWLSEAQDSGGGAFVLMRTSNPGMRDFQYSITSDGKKLYHMVGDKLSELASKYAGKYGYGLFGAVVGCTERDEASNIRENYPNLFFLIPGYGTQGGGAHDAALLLREGNGGVVNASRSIITAWQKEKNNENADNAFAAGSARKAAIKMRDEILLAVNGDKK

SEQ ID NO: 72325 - DNA, 552 bp, Unknown
  Obtained from environmental sample
  misc_feature (1)..(552): n is a, c, g, or t
atgaaatttccgtggaagttgacagcgacagaagggccgcttatttcgcgcaggcaagattcggaatgtttgtacgcatggcgttattatccagcgtactgggagtggtttaatatgcttaatatagaacagataaaaaacggaattgtaattgatcatataaaagcgggtctgggaataaaaattttcaactggctgaatctggacaaggctccctacacaacagcttttgtcgccaacgcttcatcgtcaatatgcggcagaaaggacataataaaaatagacaacacaatctccattaaccttgatgttctgggattaatcgatcccaacataactgtaaacattattgagaatgagcgcataacaaaaaaaataaaattacagcttccgaaaggggtggaaaacgtgcttgtatgcaagaatccgcgctgtataagttccacggaaaaatatataacccatgttttccatcttgaaaaccgcgagctatgcacttaccgctgtgaatactgcgacgaaataatttctacgggagaattaaagtggtag

SEQ ID NO: 72326 - protein, 183 aa, Unknown
  Obtained from environmental sample
  DOMAIN (132)...(183): Aspartate carbamoyltransferase regulatory chain, metal binding domain
  misc_feature (1)..(183): Xaa is any amino acid
MKFPWKLTATEGPLISRRQDSECLYAWRYYPAYWEWFNMLNIEQIKNGIVIDHIKAGLGIKIFNWLNLDKAPYTTAFVANASSSICGRKDIIKIDNTISINLDVLGLIDPNITVNIIENERITKKIKLQLPKGVENVLVCKNPRCISSTEKYITHVFHLENRELCTYRCEYCDEIISTGELKW

SEQ ID NO: 72327 - DNA, 549 bp, Unknown
  Obtained from environmental sample
  misc_feature (1)..(549): n is a, c, g, or t
atgcccggagacggggggcatcaccaccctacccagactttaaccgatcttcttacatcaagcggcttttggcaaatcggaaacttaaccgtaggtttttgcggggacttaaaattcggaagaacggttcattcgctggctaaggcgcttgcccgatatgaaaatatcaaaatgatttttatctctcccgaggagcttgtccttcccgattacataaaaagcattcttaagaaacaaaatgttcaattctttgaaagggaaaaacttgaagaatccatgccggagatagacgtgctttatatgacaagggttcagcgcgaaaggttttttaacgagaatgattatatccgcttaaaagacacttatgttcttaacacggaaaaaatgcaggcgggcaaagatacgttaatcgttcttcatcctcttccccgtgtaaatgaaatttccgtggaagttgacagcgacagaagggccgcttatttcgcgcaggcaagattcggaatgtttgtacgcatggcgttattatccagcgtactgggagtggtttaa

SEQ ID NO: 72328 - protein, 182 aa, Unknown
  Obtained from environmental sample
  DOMAIN (26)...(178): Aspartate/ornithine carbamoyltransferase, Asp/Orn binding domain
  misc_feature (1)..(182): Xaa is any amino acid
MPGDGGHHHPTQTLTDLLTSSGFWQIGNLTVGFCGDLKFGRTVHSLAKALARYENIKMIFISPEELVLPDYIKSILKKQNVQFFEREKLEESMPEIDVLYMTRVQRERFFNENDYIRLKDTYVLNTEKMQAGKDTLIVLHPLPRVNEISVEVDSDRRAAYFAQARFGMFVRMALLSSVLGVV

SEQ ID NO: 72329 - DNA, 513 bp, Unknown
  Obtained from environmental sample
  misc_feature (1)..(513): n is a, c, g, or t
atgttaaaaggaagatccttagtagagcctgaagatttttcacttaccgaaatggacgggctttttaccctggctgaaaaaatagaaaaagatgaaaaatacatgcgggacagctgccgggggaaacttttggctactctctttttcgagccaagcaccagaacccgccttagtttcgaggccgccatgctgcgccttggcggaagctgtcttgggtttgccgaccccggctccagttccgccgcgaaaggcgaaagccttgccgacacaatacgcatggcctcaagttacgcggacaccatagtcatgcgtaatcccaaggaaggctccgcgcttttagcgacaaagtattcttccgttccaatcattaatgcccggagacggggggcatcaccaccctacccagactttaaccgatcttcttacatcaagcggcttttggcaaatcggaaacttaaccgtaggtttttgcggggacttaaaattcggaagaacggttcattcgctggctaa

SEQ ID NO: 72330 - protein, 170 aa, Unknown
  Obtained from environmental sample
  DOMAIN (5)...(128): Aspartate/ornithine carbamoyltransferase, carbamoyl-P binding domain
  misc_feature (1)..(170): Xaa is any amino acid
MLKGRSLVEPEDFSLTEMDGLFTLAEKIEKDEKYMRDSCRGKLLATLFFEPSTRTRLSFEAAMLRLGGSCLGFADPGSSSAAKGESLADTIRMASSYADTIVMRNPKEGSALLATKYSSVPIINARRRGASPPYPDFNRSSYIKRLLANRKLNRRFLRGLKIRKNGSFAG

SEQ ID NO: 72331 - DNA, 504 bp, Unknown
  Obtained from environmental sample
  misc_feature (1)..(504): n is a, c, g, or t
atgcgtattgtgtcggcaaggctttcgcctttcgcggcggaactggagccggggtcggcaaacccaagacagcttccgccaaggcgcagcatggcggcctcgaaactaaggcgggttctggtgcttggctcgaaaaagagagtagccaaaagtttcccccggcagctgtcccgcatgtatttttcatctttttctattttttcagccagggtaaaaagcccgtccatttcggtaagtgaaaaatcttcaggctctactaaggatcttccttttaacatttatcccctcttaggttgctttatctctcaatttaatgtattattgagtatgagtaaaggcttatcttatgtttttgtaaccccttatacagttgctaagagcaggacaggcggggttctttcccgtttgcttattggggaggacgcgccccggtggggcgctcctgtcccccgcgtggccgcccacggttttgacgttgatgttgactttatatgcggggtttag

SEQ ID NO: 72332 - protein, 167 aa, Unknown
  Obtained from environmental sample
  misc_feature (1)..(167): Xaa is any amino acid
MRIVSARLSPFAAELEPGSANPRQLPPRRSMAASKLRRVLVLGSKKRVAKSFPRQLSRMYFSSFSIFSARVKSPSISVSEKSSGSTKDLPFNIYPLLGCFISQFNVLLSMSKGLSYVFVTPYTVAKSRTGGVLSRLLIGEDAPRWGAPVPRVAAHGFDVDVDFICGV

SEQ ID NO: 72333 - DNA, 945 bp, Unknown
  Obtained from environmental sample
  misc_feature (1)..(945): n is a, c, g, or t
atgacggcgggtgtggttactaagaaagaaatagcaatgtatttttccgcaaaaagaacggcggcgatcgtattggtcgccgtcgtgttatgtttaaccgttaccactgtgtcgcgggcggcgtcgcccgaccgcgccgttgttacctttcgcgccggagccaacgggacgcttacggcctccgtagacggcgttcccattgcctccggcgattcggtgagtatcggtaaaatggttgtgttcacggcatcacccgtcgccggatacggcattgcccattggacggtaaacggcgcggcgattgccgacacttctatgcgcacgttcatggtggggatttcaaacgcggcccctgtcaacgtcactgtgtcgtttgaacgaacgtcgccctgcgtcgcggtgacgttccgcgccgatggcggcgggacggtgacggcctccgtggacggcgtcccgattgcctccggcgattcggtgagcgtaggcaaaaacgttgtgttcacggcgtttcccgccgcagggtacggcattgcccgctggagatcgaacgagacggagattgtagatacctcgatgcacacgctcatggtcgggatttcaaacacggccccggtcgatgtcgccgtgtcgttcgagaagtacgcggaaccgccggacacgttgacaaagccgctctcaggtgttttaacgttcggcccgagtccggtcaggtcgggaggtgaagtggttattttctgggctgggaacaaggagataggcggcgagttgcaggtattcaacgccctcggtgatatggtcgcgtgtgtaaacgtaggcggcataggaaagataggcgcgtggggtacaagcggcgttgcgagaggtacgtatttgatgcggggtatgttgaaggacaaagacgggtttaaatgtcgggtgttgatgttggtgggggttgtgaaataa

SEQ ID NO: 72334 - protein, 314 aa, Unknown
  Obtained from environmental sample
  misc_feature (1)..(314): Xaa is any amino acid
MTAGVVTKKEIAMYFSAKRTAAIVLVAVVLCLTVTTVSRAASPDRAVVTFRAGANGTLTASVDGVPIASGDSVSIGKMVVFTASPVAGYGIAHWTVNGAAIADTSMRTFMVGISNAAPVNVTVSFERTSPCVAVTFRADGGGTVTASVDGVPIASGDSVSVGKNVVFTAFPAAGYGIARWRSNETEIVDTSMHTLMVGISNTAPVDVAVSFEKYAEPPDTLTKPLSGVLTFGPSPVRSGGEVVIFWAGNKEIGGELQVFNALGDMVACVNVGGIGKIGAWGTSGVARGTYLMRGMLKDKDGFKCRVLMLVGVVK

SEQ ID NO: 72335 - DNA, 936 bp, Unknown
  Obtained from environmental sample
  misc_feature (1)..(936): n is a, c, g, or t
ttgtccttcaacataccccgcatcaaatacgtacctctcgcaacgccgcttgtaccccacgcgcctatctttcctatgccgcctacgtttacacacgcgaccatatcaccgagggcgttgaatacctgcaactcgccgcctatctccttgttcccagcccagaaaataaccacttcacctcccgacctgaccggactcgggccgaacgttaaaacacctgagagcggctttgtcaacgtgtccggcggttccgcgtacttctcgaacgacacggcgacatcgaccggggccgtgtttgaaatcccgaccatgagcgtgtgcatcgaggtatctacaatctccgtctcgttcgatctccagcgggcaatgccgtaccctgcggcgggaaacgccgtgaacacaacgtttttgcctacgctcaccgaatcgccggaggcaatcgggacgccgtccacggaggccgtcaccgtcccgccgccatcggcgcggaacgtcaccgcgacgcagggcgacgttcgttcaaacgacacagtgacgttgacaggggccgcgtttgaaatccccaccatgaacgtgcgcatagaagtgtcggcaatcgccgcgccgtttaccgtccaatgggcaatgccgtatccggcgacgggtgatgccgtgaacacaaccattttaccgatactcaccgaatcgccggaggcaatgggaacgccgtctacggaggccgtaagcgtcccgttggctccggcgcgaaaggtaacaacggcgcggtcgggcgacgccgcccgcgacacagtggtaacggttaaacataacacgacggcgaccaatacgatcgccgccgttctttttgcggaaaaatacattgctatttctttcttagtaaccacacccgccgtcatcgcgagcgtagcgaagcgatccagaatgtcccatcattaa

SEQ ID NO: 72336 - protein, 311 aa, Unknown
  Obtained from environmental sample
  misc_feature (1)..(311): Xaa is any amino acid
MSFNIPRIKYVPLATPLVPHAPIFPMPPTFTHATISPRALNTCNSPPISLFPAQKITTSPPDLTGLGPNVKTPESGFVNVSGGSAYFSNDTATSTGAVFEIPTMSVCIEVSTISVSFDLQRAMPYPAAGNAVNTTFLPTLTESPEAIGTPSTEAVTVPPPSARNVTATQGDVRSNDTVTLTGAAFEIPTMNVRIEVSAIAAPFTVQWAMPYPATGDAVNTTILPILTESPEAMGTPSTEAVSVPLAPARKVTTARSGDAARDTVVTVKHNTTATNTIAAVLFAEKYIAISFLVTTPAVIASVAKRSRMSHH

SEQ ID NO: 72337 - DNA, 1857 bp, Unknown
  Obtained from environmental sample
  misc_feature (1)..(1857): n is a, c, g, or t
gtggggcttgagaaaatgttgtggcttgccaaattgcgcgcgttcgccgatgaggacgatagcggcgccgccgaccttgatgataagtacgccgaactctcgcaggaagataaacggcgtataggcaacggtttgctctcccacgcgctaaagcagatagccgcgatactcaaccttccggaggatgacgatgcgcccgcggcctttgagttcgaccccgccgacatagaacagctcgcggccatcatggcctacttagacctcacgataaaaatggccaacgaccgtatagacgtgagcgccaacgccgagattgcgaacatggcgatggccgcctacggcatggagagcccgatagcccacatagagcccgaacagaacgccgccgaactctccgaattcgccgccgctctgcgtaccgagaagttccgcatggacatggccttcaggctgattggcgtcagcggcatgatcgccgagaaaatggccgagaatagcgacgccggaaccgccaccggtattccgcaagccgtcaaccccgccgacctgagcatgtcggtagccgacaccgtgagcgccttcagcaaccttataagagaagaactgtccgcctccgccgaccgcgttaggcagattgtacgcgggcaagccgagatgaccgaccttgagagggcggctgtggaattgggcaccgtcaagtcggagatactcaaggcggcgctgagcaaggctaaccaaacgggcggcgcaaagtccgtgaagattgattcggatgttaatacggttatcaataaagcgaacgttaagacggatgtcaaggcggaagccaaacccaatgtcaaggccgacgttaatataggcgttaatacaactgttaataaggctgatgtcaaggtcggcgttaatcccgatgttaacccaacggttaataaggctgatgtcaaggttgatgttaatcccgatgttaacgcaagggttaataaagccgatgccaaggctgatgttaatcccgatgttaacacaagggttaataaggccgatgtcaaggttgatgttaatcccgatattaacgcaacggttagtaaggccgatgtcaaggctgatgttaatcccgatgttaacccaacggttaataaggctaacgtaaaggccgatgttaattccggtgttaatatgacaattaatacgactgtcaatacgactaatgtcaagaccgatgttaatacaacggttaatgccgctaatgtcaaaaccgatgttaatcccgatattaatacaacggttaataaaactaatgtcaaggccgatgttaattccggcgttaatacaaatgttaatacgacgaatgtcaagcctgatgttaattccggcgttaatacaaatgttaatgcggcgaatgtcaaacctgacgttaattccggcgttaatgcaaatgttaatacgatgaatgtcaagcctgacgctaattccggtgttaatgcaaatgttaatacgacgaatgtcaagcctgacgttaattccggtgttaatgcaaccgtcaagaccgatgttaatcccgatgttaataaaaccgtcaatacgggaaatgtcaagacggatgtttatccaaacgttaataaaacggataatacggctaatgtcaaagctgatgttaatcccgacgttaatacaaccgttaatacggcaaataccaaggctgatgttgatatcggcgttaatacaacggttcacacgacgaatgtcaaggttgatgtcaataccggtgttaataccgaagtcaagtctgacgttaatcccgatgttaatgcaacggttaatacgacgaatgccaaaccggatattaatactcggcgttaa

SEQ ID NO: 72338 - protein, 618 aa, Unknown
  Obtained from environmental sample
  misc_feature (1)..(618): Xaa is any amino acid
MGLEKMLWLAKLRAFADEDDSGAADLDDKYAELSQEDKRRIGNGLLSHALKQIAAILNLPEDDDAPAAFEFDPADIEQLAAIMAYLDLTIKMANDRIDVSANAEIANMAMAAYGMESPIAHIEPEQNAAELSEFAAALRTEKFRMDMAFRLIGVSGMIAEKMAENSDAGTATGIPQAVNPADLSMSVADTVSAFSNLIREELSASADRVRQIVRGQAEMTDLERAAVELGTVKSEILKAALSKANQTGGAKSVKIDSDVNTVINKANVKTDVKAEAKPNVKADVNIGVNTTVNKADVKVGVNPDVNPTVNKADVKVDVNPDVNARVNKADAKADVNPDVNTRVNKADVKVDVNPDINATVSKADVKADVNPDVNPTVNKANVKADVNSGVNMTINTTVNTTNVKTDVNTTVNAANVKTDVNPDINTTVNKTNVKADVNSGVNTNVNTTNVKPDVNSGVNTNVNAANVKPDVNSGVNANVNTMNVKPDANSGVNANVNTTNVKPDVNSGVNATVKTDVNPDVNKTVNTGNVKTDVYPNVNKTDNTANVKADVNPDVNTTVNTANTKADVDIGVNTTVHTTNVKVDVNTGVNTEVKSDVNPDVNATVNTTNAKPDINTRR

SEQ ID NO: 72339 - DNA, 2262 bp, Unknown
  Obtained from environmental sample
  misc_feature (1)..(2262): n is a, c, g, or t
ttgacctcgccgtccgcgggtttggccgctttcctgccgtgcgccaacgccatgacgctcagcggcaactcggcgctgtcgcctgaagacgagggcttcgcgcccatcgtcgcgcgctcggcgctcatcgaggccaaacggttcgcggactctacgcttgagcgccttttacggctcgcggagtcgtgggcgcttatcggtagatctgtgtcggcgacgcgcttttgggctctgtcaattgccttaaaatcggtgttgacatccgtatcggcggcggttgtattaacgacggtattaacatcaatcttggcgtcggctttgacatctgttttgacattcgtcgtatttatatcggccttggtctcggcattaacgtcggtattcgcatccgttttggcattcgccgtattaaccgttgcattaacatcagtattagtattaacgtcagacttgacttcggcattaacagctgtattaacgccggtattaacatcagtcttggcgctcgccgtattaaccgttgtattaacatcgggattaacgtcagacttgacttcggtattaacagccgcattaacgccggtattaacatcaatcttggcactcgccgtattaaccgttgtattaacatcggacttgatttcgctattaaccgttgtattaacgccgagtattaatatccggtttggcattcgtcgtattaaccgttgcattaacatcgggattaacgtcagacttgacttcggtattaacaccggtattgacatcaaccttgacattcgtcgtgtgaaccgttgtattaacgccgatatcaacatcagccttggtatttgccgtattaacggttgtattaacgtcgggattaacatcagctttgacattagccgtattatccgttttattaacgtttggataaacatccgtcttgacatttcccgtattgacggttttattaacatcgggattaacatcggtcttgacggttgcattaacaccggaattaacgtcaggcttgacattcgtcgtattaacatttgcattaacaccggaattagcgtcaggcttgacattcatcgtattaacatttgcattaacgccggaattaacgtcaggtttgacattcgccgcattaacatttgtattaacgccggaattaacatcaggcttgacattcgtcgtattaacatttgtattaacgccggaattaacatcggccttgacattagttttattaaccgttgtattaatatcgggattaacatcggttttgacattagcggcattaaccgttgtattaacatcggtcttgacattagtcgtattgacagtcgtattaattgtcatattaacaccggaattaacatcggcctttacgttagccttattaaccgttgggttaacatcgggattaacatcagccttgacatcggccttactaaccgttgcgttaatatcgggattaacatcaaccttgacatcggccttattaacccttgtgttaacatcgggattaacatcagccttggcatcggctttattaacccttgcgttaacatcgggattaacatcaaccttgacatcagccttattaaccgttgggttaacatcgggattaacgccgaccttgacatcagccttattaacagttgtattaacgcctatattaacgtcggccttgacattgggtttggcttccgccttgacatccgtcttaacgttcgctttattgataaccgtattaacatccgaatcaatcttcacggactttgcgccgcccgtttggttagccttgctcagcgccgccttgagtatctccgacttgacggtgcccaattccacagccgccctctcaaggtcggtcatctcggcttgcccgcgtacaatctgcctaacgcggtcggcggaggcggacagttcttctcttataaggttgctgaaggcgctcacggtgtcggctaccgacatgctcaggtcggcggggttgacggcttgcggaataccggtggcggttccggcgtcgctattctcggccattttctcggcgatcatgccgctgacgccaatcagcctgaaggccatgtccatgcggaacttctcggtacgcagagcggcggcgaattcggagagttcggcggcgttctgttcgggctctatgtgggctatcgggctctccatgccgtaggcggccatcgccatgttcgcaatctcggcgttggcgctcacgtctatacggtcgttggccatttttatcgtgaggtctaa

SEQ ID NO: 72340 - protein, 753 aa, Unknown
  Obtained from environmental sample
  SIGNAL (1)...(17)
  misc_feature (1)..(753): Xaa is any amino acid
MTSPSAGLAAFLPCANAMTLSGNSALSPEDEGFAPIVARSALIEAKRFADSTLERLLRLAESWALIGRSVSATRFWALSIALKSVLTSVSAAVVLTTVLTSILASALTSVLTFVVFISALVSALTSVFASVLAFAVLTVALTSVLVLTSDLTSALTAVLTPVLTSVLALAVLTVVLTSGLTSDLTSVLTAALTPVLTSILALAVLTVVLTSDLISLLTVVLTPSINIRFGIRRINRCINIGINVRLDFGINTGIDINLDIRRVNRCINADINISLGICRINGCINVGINISFDISRIIRFINVWINIRLDISRIDGFINIGINIGLDGCINTGINVRLDIRRINICINTGISVRLDIHRINICINAGINVRFDIRRINICINAGINIRLDIRRINICINAGINIGLDISFINRCINIGINIGFDISGINRCINIGLDISRIDSRINCHINTGINIGLYVSLINRWVNIGINISLDIGLTNRCVNIGININLDIGLINPCVNIGINISLGIGFINPCVNIGININLDISLINRWVNIGINADLDISLINSCINAYINVGLDIGFGFRLDIRLNVRFIDNRINIRINLHGLCAARLVSLAQRRLEYLRLDGAQFHSRPLKVGHLGLPAYNLPNAVGGGGQFFSYKVAEGAHGVGYRHAQVGGVDGLRNTGGGSGVAILGHFLGDHAADANQPEGHVHAELLGTQSGGEFGEFGGVLFGLYVGYRALHAVGGHRHVRNLGVGAHVYTVVGHFYREV

SEQ ID NO: 72341 - DNA, 1257 bp, Unknown
  Obtained from environmental sample
  misc_feature (1)..(1257): n is a, c, g, or t
ttgacatttcccgtattgacggttttattaacatcgggattaacatcggtcttgacggttgcattaacaccggaattaacgtcaggcttgacattcgtcgtattaacatttgcattaacaccggaattagcgtcaggcttgacattcatcgtattaacatttgcattaacgccggaattaacgtcaggtttgacattcgccgcattaacatttgtattaacgccggaattaacatcaggcttgacattcgtcgtattaacatttgtattaacgccggaattaacatcggccttgacattagttttattaaccgttgtattaatatcgggattaacatcggttttgacattagcggcattaaccgttgtattaacatcggtcttgacattagtcgtattgacagtcgtattaattgtcatattaacaccggaattaacatcggcctttacgttagccttattaaccgttgggttaacatcgggattaacatcagccttgacatcggccttactaaccgttgcgttaatatcgggattaacatcaaccttgacatcggccttattaacccttgtgttaacatcgggattaacatcagccttggcatcggctttattaacccttgcgttaacatcgggattaacatcaaccttgacatcagccttattaaccgttgggttaacatcgggattaacgccgaccttgacatcagccttattaacagttgtattaacgcctatattaacgtcggccttgacattgggtttggcttccgccttgacatccgtcttaacgttcgctttattgataaccgtattaacatccgaatcaatcttcacggactttgcgccgcccgtttggttagccttgctcagcgccgccttgagtatctccgacttgacggtgcccaattccacagccgccctctcaaggtcggtcatctcggcttgcccgcgtacaatctgcctaacgcggtcggcggaggcggacagttcttctcttataaggttgctgaaggcgctcacggtgtcggctaccgacatgctcaggtcggcggggttgacggcttgcggaataccggtggcggttccggcgtcgctattctcggccattttctcggcgatcatgccgctgacgccaatcagcctgaaggccatgtccatgcggaacttctcggtacgcagagcggcggcgaattcggagagttcggcggcgttctgttcgggctctatgtgggctatcgggctctccatgccgtag

SEQ ID NO: 72342 - protein, 418 aa, Unknown
  Obtained from environmental sample
  SIGNAL (1)...(21)
  misc_feature (1)..(418): Xaa is any amino acid
MTFPVLTVLLTSGLTSVLTVALTPELTSGLTFVVLTFALTPELASGLTFIVLTFALTPELTSGLTFAALTFVLTPELTSGLTFVVLTFVLTPELTSALTLVLLTVVLISGLTSVLTLAALTVVLTSVLTLVVLTVVLIVILTPELTSAFTLALLTVGLTSGLTSALTSALLTVALISGLTSTLTSALLTLVLTSGLTSALASALLTLALTSGLTSTLTSALLTVGLTSGLTPTLTSALLTVVLTPILTSALTLGLASALTSVLTFALLITVLTSESIFTDFAPPVWLALLSAALSISDLTVPNSTAALSRSVISACPRTICLTRSAEADSSSLIRLLKALTVSATDMLRSAGLTACGIPVAVPASLFSAIFSAIMPLTPISLKAMSMRNFSVRRAAANSESSAAFCSGSMWAIGLSMP

SEQ ID NO: 72343 - DNA, 2088 bp, Unknown
  Obtained from environmental sample
  misc_feature (1)..(2088): n is a, c, g, or t
atgtcaagcctgacgctaattccggtgttaatgcaaatgttaatacgacgaatgtcaagcctgacgttaattccggtgttaatgcaaccgtcaagaccgatgttaatcccgatgttaataaaaccgtcaatacgggaaatgtcaagacggatgtttatccaaacgttaataaaacggataatacggctaatgtcaaagctgatgttaatcccgacgttaatacaaccgttaatacggcaaataccaaggctgatgttgatatcggcgttaatacaacggttcacacgacgaatgtcaaggttgatgtcaataccggtgttaataccgaagtcaagtctgacgttaatcccgatgttaatgcaacggttaatacgacgaatgccaaaccggatattaatactcggcgttaatacaacggttaatagcgaaatcaagtccgatgttaatacaacggttaatacggcgagtgccaagattgatgttaataccggcgttaatgcggctgttaataccgaagtcaagtctgacgttaatcccgatgttaatacaacggttaatacggcgagcgccaagactgatgttaataccggcgttaatacagctgttaatgccgaagtcaagtctgacgttaatactaatactgatgttaatgcaacggttaatacggcgaatgccaaaacggatgcgaataccgacgttaatgccgagaccaaggccgatataaatacgacgaatgtcaaaacagatgtcaaagccgacgccaagattgatgttaataccgtcgttaatacaaccgccgccgatacggatgtcaacaccgattttaaggcaattgacagagcccaaaagcgcgtcgccgacacagatctaccgataagcgcccacgactccgcgagccgtaaaaggcgctcaagcgtagagtccgcgaaccgtttggcctcgatgagcgccgagcgcgcgacgatgggcgcgaagccctcgtcttcaggcgacagcgccgagttgccgctgagcgtcatggcgttggcgcacggcaggaaagcggccaaacccgcggacggcgaggtcaagaaggcatcaaccgagccgcagacgcaggcacaggcgaagagttcgcttgccgacggagagacggccgaacttccagtgagcgtaatggagtctattgagaagaagcaaacggcgaagaagggtcacgccggtcatacgagcgttgcgaaagccgccgctaaagccgccgccgcgagcgccgtcggcgccgcgatggaagccgacgccgccaagacggaaacaaccgccgcgaataaggctgccgacgaggcctttgtggcgaagctcaagcaggcggtggaggtgggcgggctgataaagaacatatccgccaaatcctccggcgcgtcgtccgccaaagccgccgctccggagaagtccgcaaacagcgcttcgttggcaaataattcgttaaacagtatagaatccaacgccgacgccgacctctcggttgacagcggtgaagaatccggcacgagcggcgtagggtcggtcggttccgcaagctccagattgaccgcgtccgccggacacgcggagaaagccgaggcccccgcggtctctcaggacgatcgctttgaggtgatccgtcagatcagcgataaactgaacaacgccgtccgctccggggccaacgaaattcgcatggtgctgcgtccggagtctcttggcgaaatgagaatgagcataagagtccaaggcgacgtggtcttcgcccgtatgcaggtggagaacaaacaagtcaaagctatagtagagagcaatcttcaatcgttaaaagattctctcaacaggcaaaacttagagttcggcgccatagacgtagaggtaggcgcccaatcggacggcgacaagtcgcccagagagctatggcaagagatggccgaccgttcggaggcgcatggtttcagacccgacaacggcatagcccccgacggaacgccgatagacgccgcctcggacggcttcgtcagcatcccgatgggtagcgatacgggcaggcgtttcggagacaatacgtttgaatatttcgcgtag

SEQ ID NO: 72344 - protein, 695 aa, Unknown
  Obtained from environmental sample
  DOMAIN (485)...(631): Flagellar hook-length control protein
  misc_feature (1)..(695): Xaa is any amino acid
MSSLTLIPVLMQMLIRRMSSLTLIPVLMQPSRPMLIPMLIKPSIREMSRRMFIQTLIKRIIRLMSKLMLIPTLIQPLIRQIPRLMLISALIQRFTRRMSRLMSIPVLIPKSSLTLIPMLMQRLIRRMPNRILILGVNTTVNSEIKSDVNTTVNTASAKIDVNTGVNAAVNTEVKSDVNPDVNTTVNTASAKTDVNTGVNTAVNAEVKSDVNTNTDVNATVNTANAKTDANTDVNAETKADINTTNVKTDVKADAKIDVNTVVNTTAADTDVNTDFKAIDRAQKRVADTDLPISAHDSASRKRRSSVESANRLASMSAERATMGAKPSSSGDSAELPLSVMALAHGRKAAKPADGEVKKASTEPQTQAQAKSSLADGETAELPVSVMESIEKKQTAKKGHAGHTSVAKAAAKAAAASAVGAAMEADAAKTETTAANKAADEAFVAKLKQAVEVGGLIKNISAKSSGASSAKAAAPEKSANSASLANNSLNSIESNADADLSVDSGEESGTSGVGSVGSASSRLTASAGHAEKAEAPAVSQDDRFEVIRQISDKLNNAVRSGANEIRMVLRPESLGEMRMSIRVQGDVVFARMQVENKQVKAIVESNLQSLKDSLNRQNLEFGAIDVEVGAQSDGDKSPRELWQEMADRSEAHGFRPDNGIAPDGTPIDAASDGFVSIPMGSDTGRRFGDNTFEYFA

SEQ ID NO: 72345 - DNA, 1020 bp, Unknown
  Obtained from environmental sample
  misc_feature (1)..(1020): n is a, c, g, or t
ttggctaaaaataagaatccgatgaggagtcagttcattattttttcatgcgtgctgtttcttgttatccttgtggtgggcagtctggcgtttttcttatctatgcggcagattgtgaggacgaataggactaatgagttgtcgcagatgcttgaaatcaagcggataaatctggaaacctacgtcatgaacgagattgccatcgtcaaaaagatggccggttccccgcttatcaaggattatttggccgaccctaccgaagagcacctgagaaagcaagccattaaggagatagccgcctaccgcgcggcgttcgagaataagtcggtgttttggataagcgatagagataagatattttacagcaacgacaacgcgccgtacttggttgatccggattccccggataattattggtataacctgactctctacaagacggaagtatataatttcaacatcaattacaaccccgacctcgacatgattaacctctggataaacgcgccggtttttgacgacgacaagaagcctctggggatggtgggcaccggccttgagttatccgcgtttgtgagcgcgcttttcagcaatttggacgatagaatggaactttattatttcaacgccgccggagaaatcaccggcgcgaagaatattgagttcatctcctcaaagaaaaatataggcgatgtgtcaataggcgtgagcgacgatgttttgacgattgcggccaaagaaaatatatacggcgcaacggacataaagcgtgtcgccttgaaggggaagattgacgacgaggtcgccctcgggcgttttggccgtggcgaaaagccttttgcccggcgaaatgcgggcgctttccgtgccgcacgggaatcttgtaatcagcacgataccgcaactcaagtggtacgctatcgcgtttatgccatacagtatagacgactacaaaacctctatgtccacgctgtttcttgtggtgctggtcgtcatattgctgatattcatcatctttaa

SEQ ID NO: 72346 - protein, 339 aa, Unknown
  Obtained from environmental sample
  SIGNAL (1)...(27)
  misc_feature (1)..(339): Xaa is any amino acid
MAKNKNPMRSQFIIFSCVLFLVILVVGSLAFFLSMRQIVRTNRTNELSQMLEIKRINLETYVMNEIAIVKKMAGSPLIKDYLADPTEEHLRKQAIKEIAAYRAAFENKSVFWISDRDKIFYSNDNAPYLVDPDSPDNYWYNLTLYKTEVYNFNINYNPDLDMINLWINAPVFDDDKKPLGMVGTGLELSAFVSALFSNLDDRMELYYFNAAGEITGAKNIEFISSKKNIGDVSIGVSDDVLTIAAKENIYGATDIKRVALKGKIDDEVALGRFGRGEKPFARRNAGAFRAARESCNQHDTATQVVRYRVYAIQYRRLQNLYVHAVSCGAGRHIADIHHL

SEQ ID NO: 72347 - DNA, 939 bp, Unknown
  Obtained from environmental sample
  misc_feature (1)..(939): n is a, c, g, or t
ttgacgacgaggtcgccctcgggcgttttggccgtggcgaaaagccttttgcccggcgaaatgcgggcgctttccgtgccgcacgggaatcttgtaatcagcacgataccgcaactcaagtggtacgctatcgcgtttatgccatacagtatagacgactacaaaacctctatgtccacgctgtttcttgtggtgctggtcgtcatattgctgatattcatcatctttaacgtgtttgtctccgattttctcaagtcccagcacaagacgatggcgtctctcgaacacgccagaaacgaggcggaaatagccaataggagcaaatcgaattttctcgccaccatgtcccacgagatccgtacgccgatgaacgcgatcatcggtatagcgcagatacagttgcagcgcgatgatttgccggacgactacgccgccgcgtttcggcggatatacagttccgccaacaaccagctcggtatcgtcaacgatattctcgatatgtccaagatagaaacgggcaggatggaactgaaccccgtggaatacgacgtgccgaacctgataaacgacgcgatccaactcaatgtggtccgaataggggagaaactgattgagtttatagttgacgttgacgaaaatttgccgtcgaaactatacggcgacgagttgcggatcaagcaaatacttaacaacctgctctccaacgcgataaagtacacagacgaggggtgcgtgcggctgtcggtaggctgtttgacggacagcgacagcgtaacgctgagtattgtcgtggaagataccggacaaggcataaagccggatgataangcgcggctcttttcggagtacagcgcttcaacgcgaanccaaccgcgcaccgaagggacggggctcggtttaatatcacaaaaatctggtggaatgatgggcgtancatag

SEQ ID NO: 72348 - protein, 312 aa, Unknown
  Obtained from environmental sample
  DOMAIN (220)...(312): Histidine kinase-, DNA gyrase B-, and HSP90-like ATPase
  misc_feature (1)..(312): Xaa is any amino acid
MTTRSPSGVLAVAKSLLPGEMRALSVPHGNLVISTIPQLKWYAIAFMPYSIDDYKTSMSTLFLVVLVVILLIFIIFNVFVSDFLKSQHKTMASLEHARNEAEIANRSKSNFLATMSHEIRTPMNAIIGIAQIQLQRDDLPDDYAAAFRRIYSSANNQLGIVNDILDMSKIETGRMELNPVEYDVPNLINDAIQLNVVRIGEKLIEFIVDVDENLPSKLYGDELRIKQILNNLLSNAIKYTDEGCVRLSVGCLTDSDSVTLSIVVEDTGQGIKPDDXARLFSEYSASTRXQPRTEGTGLGLISQKSGGMMGVX

SEQ ID NO: 72349 - DNA, 465 bp, Unknown
  Obtained from environmental sample
  misc_feature (1)..(465): n is a, c, g, or t
atggtttgtgacattttggatcgtcacaatcgcaattcaagcaacctgatcgccattttacaggagattcaggaagcgtattcctatctgccggaggacataatgacctatgttgcaacggctctggaagtctcgccgggcattgtctttggcgttgcgactttttattcacatttcacccttgatccaaaaggcaaatatgttatcaaggtgtgcgacggaacggcctgtcacgttaaaaaatcgatggacatcattaacacgctggaaaaagagcttaagctcaacgaaaagaaaaaaacatcggacgacatgctgtttaccctggaaacggtaaactgcctgggagcctgcggcatcgcgcctgtagttgtaatcaacgaagacgtgtacggatcgatggattcggcgaaaacaaaagcgcttattgaaaaaattcgaaaggaggaatccgcaaatgcctga

SEQ ID NO: 72350 - protein, 154 aa, Unknown
  Obtained from environmental sample
  DOMAIN (1)...(147): Respiratory-chain NADH dehydrogenase 24 Kd subunit
  misc_feature (1)..(154): Xaa is any amino acid
MVCDILDRHNRNSSNLIAILQEIQEAYSYLPEDIMTYVATALEVSPGIVFGVATFYSHFTLDPKGKYVIKVCDGTACHVKKSMDIINTLEKELKLNEKKKTSDDMLFTLETVNCLGACGIAPVVVINEDVYGSMDSAKTKALIEKIRKEESANA

SEQ ID NO: 72351 - DNA, 1920 bp, Unknown
  Obtained from environmental sample
  misc_feature (1)..(1920): n is a, c, g, or t
ttgaaaaaattcgaaaggaggaatccgcaaatgcctgaaaaattgacattagaacaaaggaaggagcaatttgaacaatccgcggcatgtcaaaaaccgcgcattatcatttgcgccggaaccggctgcgtggcgggcggttcattgaaaatttacgaccgtttccgcgaagaattggcaaagcgcaatttgaaagtcgcagtggcgcttgaatcagaacaaggcgattattcaattgcggaaagcggctgtcagggtttttgccaaatgggaccgcttgtaacgataagaccgaaaggcatactttataccaaagtttctcccaatgatgtggaagaaattgtagagaaaacgctcgttaacggcgagtatatcgagcgcctgctctacacaagccccgaccacggcgctccgatgaaggacatgaataaaatacctttctatgaacgacaacatcggctaacgctcggactttgcggcaatatcgacgtaaaaaatttggacgagtacatttatcacggcggttatttcatggcgcgtaaagcgttaacggaaatgaaagacaaagaaatttgcgatctgattttagcttccggtcttagaggacgcggcggcgcaggattcccaacgggacgcaaatgggatttaacccgcgttaatgaaagcgatgtaaaatacgttatctgcaacggcgacgaaggagacccgggcgcgttcatggatcgctgtgtaatggaaggaaaccctcacgcagttcttgaaggaatgatgatcgcggcgcacgcgatacacgccacattcggatacatttatgtccgcatggaatatcccctcgccgtaaaaagattgaaagacgctatcaagcaggcgcaggaagccggcattttaggcgatgatgttttcggcacaggcaaaaaatttaatatcgccataaaagaaggcgcgggcgcgtttgtctgcggcgaagagtccgctcttatcgcctctatcgagggacaccgcggtatgccgacaataaagccgcccttccccgctcaaaaaggtttattcggcaaacctaccgccgtcaataacgtagaaacattggcgacaattccgctcattcttaaaatgggagcggataattacgccaagctcggcacggagacggcgaaaggaacaaaaacattcgcactcacagggcaggttgcaaataccggattaattgaagtgccgttcggcgcgacactgcgcgaaatcatcggcgaaatcggcggcggcgtaacaaacgacgacggaactctttgcggctgtgattttaaagcagtgcagatcggcggaccgtcgggcggctgtctcacacaagaacatctggatatgcctcttgattacgataacttaaaaaaagtcggagcgatggtaggatcaggcggtcttgtcgtaatgaatcaaggcaactgtatggtaaaaatcgcaaggtattttatgcagtttacgcaaaacgaatcgtgcggaaaatgcgtagtatgccgcgaaggtacgcgccaaatgttattgctgttggacgacattatcgaaggcagagccacagcggacactctcacactgcttgaagaattatcgcaggtggttcaaaccggctctttgtgcgcgcttggtaaatcggcgcctaacccggtattgtcaactttaaaacatttcagggatgagtataacgcgcatgtgtttgaaaagcgctgtccgaccggaaactgcaggctgcttacaacctacaaaatcattcccgaaaaatgtaaaggctgttctctttgcgctaagaagtgcccggtacaggcgattagcggcgaacttaaaaacccgtataccattgacactaaaaaatgcaccaagtgcggcgtatgtatgcaaaactgcaaatttgcagccattgtaaaaggatag

SEQ ID NO: 72352 - protein, 639 aa, Unknown
  Obtained from environmental sample
  DOMAIN (614)...(637): 4Fe-4S binding domain
  misc_feature (1)..(639): Xaa is any amino acid
MKKFERRNPQMPEKLTLEQRKEQFEQSAACQKPRIIICAGTGCVAGGSLKIYDRFREELAKRNLKVAVALESEQGDYSIAESGCQGFCQMGPLVTIRPKGILYTKVSPNDVEEIVEKTLVNGEYIERLLYTSPDHGAPMKDMNKIPFYERQHRLTLGLCGNIDVKNLDEYIYHGGYFMARKALTEMKDKEICDLILASGLRGRGGAGFPTGRKWDLTRVNESDVKYVICNGDEGDPGAFMDRCVMEGNPHAVLEGMMIAAHAIHATFGYIYVRMEYPLAVKRLKDAIKQAQEAGILGDDVFGTGKKFNIAIKEGAGAFVCGEESALIASIEGHRGMPTIKPPFPAQKGLFGKPTAVNNVETLATIPLILKMGADNYAKLGTETAKGTKTFALTGQVANTGLIEVPFGATLREIIGEIGGGVTNDDGTLCGCDFKAVQIGGPSGGCLTQEHLDMPLDYDNLKKVGAMVGSGGLVVMNQGNCMVKIARYFMQFTQNESCGKCVVCREGTRQMLLLLDDIIEGRATADTLTLLEELSQVVQTGSLCALGKSAPNPVLSTLKHFRDEYNAHVFEKRCPTGNCRLLTTYKIIPEKCKGCSLCAKKCPVQAISGELKNPYTIDTKKCTKCGVCMQNCKFAAIVKG

SEQ ID NO: 72353 - DNA, 1986 bp, Unknown
  Obtained from environmental sample
  misc_feature (1)..(1986): n is a, c, g, or t
atgaaaaatcaaactgtaataattgacagcgcaaccgttcccatagagggagagcgcaatttgctggaactttgccgcaaggcgggtattgaccttcctactttctgttatcattcggaaataagcgtctatggcgcgtgccgtatgtgtatggtagaagtagacggaaagggtatacttcccgcctgctccaccaaagcggaagacggcatggtgatacataccaacacaaaacaagtcagaaacatacgcaagatgatcatcgaattaatgctcgcgagccatgatcaggattgtaccacctgcccgaaaagcggcgattgcagacttcaggcaatcgcaaagcagctggacataaccaaagtgcggttcaaaaaaatgccacatgaggacccgatagattattcttcgctcgccatattgcgcgatccgggtaaatgtatactctgcggcgactgcgtgcgcgtatgcgaagaaattcaatccgtaggcgcgttaggtttcgcgtaccgcggagcaagagcgcatgttgtaacttgtttcaacaaaggactcggcgaaattgaatgcgtgggctgcggtcagtgcgcgaaagtttgtcccgtcggcgctcttactccaaaacatcaaatcagcgacgtttggaacgctatcaacgataaaaccaaaaccgttgtggtgcaggtcgcccccgcggtgcgcgtcgctttaggcgaatacttcggaaaagaccccggttctctccacatgggaagaatcatcaccgccatgcgccgcatgggttttgaccgcgtttatgacacttgtttcggcgcggatttcaccgtaacggaagaaggaaaagaattcctggaacgcaaaaaatccggcgaaaacctgccgatgttcacatcatgctgtcccgcgtgggttaaatttgccgagcaatattatcccgatttcctgaacaacttgtccacctgccgctcgcctcagcagatgttcggttctctttgcaaggaatatctttgtaaggaattaaatatcacccgtgaaaatttggtggtggtgtccgtaatgccctgtaccgcgaaaaaattcgaagctaaccgcgacgaattcaaaacgaacggaaacccggacgtggattttgtaatcaccagcaacgagcttgcgcagatgatgaaagaaaacggcatcgaattcgacaaaatggaacttggctcctttgatatgccgttcggttattccacaggcggagccgttattttcggctcctcaggcggagtcagcgaagcggtgctcagattcgcgggcgatgtactggaaaaaggttccgcaaaagaattcaaacagttacgcggcgaagacggaattaaaacgtcagaaatcgcggtcggcggacaaaaactgcagttggcggttgtcagcggtctttcaaacgcgagaaatttaatcgaccgtatccgcaagggcgaagtccactacgatttaattgaagtcatggcttgctgcggcggctgtgtcaacggcggaggtcagccgattacagacgacaggactgcgattccaaaacgtgcaaaaggactttttgaaaacgataaacagatgcaattccatatttcatccgagaacccctacttgcagcaaatttacgccgaaggcttgaatcatgagaaagcgcacgagttattgcatacaacttatgaaaaccgcaagagaatcacgcaggaagattttatgcttggagaatccacaggcaaaaaagaagttactttggaaatctgcttcggaaccagttgtttcttacgcggcgcgcaggacctttacaaagagcttatgggttatatcagagaaaataaacttgatgacgcgattgagtttaaggctactttctgcggaaaacactgcaaaaagggacctgtactgaacgtgaacggaaaaactctggaacgctgtacttttgataacgcgaaggctgaaataaataccgtactgaaaaggtaa

SEQ ID NO: 72354 - protein, 661 aa, Unknown
  Obtained from environmental sample
  DOMAIN (510)...(566): Iron hydrogenase small subunit
  misc_feature (1)..(661): Xaa is any amino acid
MKNQTVIIDSATVPIEGERNLLELCRKAGIDLPTFCYHSEISVYGACRMCMVEVDGKGILPACSTKAEDGMVIHTNTKQVRNIRKMIIELMLASHDQDCTTCPKSGDCRLQAIAKQLDITKVRFKKMPHEDPIDYSSLAILRDPGKCILCGDCVRVCEEIQSVGALGFAYRGARAHVVTCFNKGLGEIECVGCGQCAKVCPVGALTPKHQISDVWNAINDKTKTVVVQVAPAVRVALGEYFGKDPGSLHMGRIITAMRRMGFDRVYDTCFGADFTVTEEGKEFLERKKSGENLPMFTSCCPAWVKFAEQYYPDFLNNLSTCRSPQQMFGSLCKEYLCKELNITRENLVVVSVMPCTAKKFEANRDEFKTNGNPDVDFVITSNELAQMMKENGIEFDKMELGSFDMPFGYSTGGAVIFGSSGGVSEAVLRFAGDVLEKGSAKEFKQLRGEDGIKTSEIAVGGQKLQLAVVSGLSNARNLIDRIRKGEVHYDLIEVMACCGGCVNGGGQPITDDRTAIPKRAKGLFENDKQMQFHISSENPYLQQIYAEGLNHEKAHELLHTTYENRKRITQEDFMLGESTGKKEVTLEICFGTSCFLRGAQDLYKELMGYIRENKLDDAIEFKATFCGKHCKKGPVLNVNGKTLERCTFDNAKAEINTVLKR

SEQ ID NO: 72355 - DNA, 1707 bp, Unknown
  Obtained from environmental sample
  misc_feature (1)..(1707): n is a, c, g, or t
atgcagcagcagacaatttataccattacggctaattgtcaggattgttatcgctgtgtgcgcgaatgtccggtaaaagcgataagcatcaacaacggacaagcgcacgttgaagacggtttatgcatcaaatgcggaacttgcgtgcgggaatgcccccagcacgcaaaaaccgtccgtcccgatttagaagaagcaaaggcactgcttggcggcggcaaaactgccgccgccagcgtagcgccctcgtttgccgccatgtttcccggcgctctaagcagacgtattccttccgcgttacgccaattaggttttaagtatgtcagcgaaacagccgaaggcgcgaagtatgttacggaacaatcttttataacgccgcagaaaggaagcatttgcacagcctgtcccgcagttgtcaaccttatcgaaaaataccacagcgaatatttagacgcgttaattcccgttgtctccccaatgatagcccacggcagaataataaaagaacaacagcctgactgcgccgtaatttttatcggtccctgcgcggcaaaaaaacaggaaattttaagaccggaaaacgcaggcgcgatagacgttgttataacttttacggaacttttagagtggctttcatccgaaaacattcaaatagaaaactgttccgaaagcagttttgatcaattttatgaaaccggcgacgcgcgtctgttccccattcagggcggaatgttaaagaccggcagtattcaaagcgacggaacgcaggcgaacgtattgcacttaagcggcgcggaagacattttagagttattttccggcaatattgatttagacggcaaactgattgagccgttattttgcaaaggcggctgtatcggcggaccttgctacggcaatgaagaaaaaccagccgctcataatctttttacaagacgggagagcgtaatacggtacgccgaagcggcgggtaaaaacgacaaaaaatttcctccgcggaaaattaattatcagcctgtttttacgacggatgatcaaaaacaaactgaggtaacggaaaatcaaatccacaaagtgctggaacttacgggaaaaatcgaccctgagcttcagcttaactgcggcgcgtgcggttacaaaacctgtctggaaaacgccgccgcggttgttcgcggcatggctgaacctgaaatgtgtattccctatatgcgccgcctcgctcaacagcgcacggacagagttatagacacaacgcctaacggggttgtggttttagacagcgaattgtgcatagtaaaaatgaatccggctttccaaaaaatgtttacatgtaacaacggtattttgggaagacgcatttcctatcttgtgaacgcggacggttttgaaaccttacattccggcgcttcggaaaaatgcgagtctattcaaacaaagtacggtatcaagtaccatgaaattctctatgcgttacgcgaagaaaaccagtatgtcggcatttattcggatatttcaagaatcaaatatgacgccgggcagttggatacgataaaaacgcaaaccttaatgcacgcgcgggaattcttgaatcatcaagtgcgttttgcgcaggaaatggcgcactatctgggcaaaagcacagcccaaagcgaagaaatcgcaaaacgtctgattggtctctacgaagaggacggcgattcggcgtag

SEQ ID NO: 72356 - protein, 568 aa, Unknown
  Obtained from environmental sample
  DOMAIN (371)...(402): Putative Fe-S cluster
  misc_feature (1)..(568): Xaa is any amino acid
MQQQTIYTITANCQDCYRCVRECPVKAISINNGQAHVEDGLCIKCGTCVRECPQHAKTVRPDLEEAKALLGGGKTAAASVAPSFAAMFPGALSRRIPSALRQLGFKYVSETAEGAKYVTEQSFITPQKGSICTACPAVVNLIEKYHSEYLDALIPVVSPMIAHGRIIKEQQPDCAVIFIGPCAAKKQEILRPENAGAIDVVITFTELLEWLSSENIQIENCSESSFDQFYETGDARLFPIQGGMLKTGSIQSDGTQANVLHLSGAEDILELFSGNIDLDGKLIEPLFCKGGCIGGPCYGNEEKPAAHNLFTRRESVIRYAEAAGKNDKKFPPRKINYQPVFTTDDQKQTEVTENQIHKVLELTGKIDPELQLNCGACGYKTCLENAAAVVRGMAEPEMCIPYMRRLAQQRTDRVIDTTPNGVVVLDSELCIVKMNPAFQKMFTCNNGILGRRISYLVNADGFETLHSGASEKCESIQTKYGIKYHEILYALREENQYVGIYSDISRIKYDAGQLDTIKTQTLMHAREFLNHQVRFAQEMAHYLGKSTAQSEEIAKRLIGLYEEDGDSA

SEQ ID NO: 72357 - DNA, 1143 bp, Unknown
  Obtained from environmental sample
  misc_feature (1)..(1143): n is a, c, g, or t
atgaaattctttgatgattttctttgtcaaaaaaataaaaaaaatcatgatgtctgcggagactactgtctttacgagcgtaccgccgccggcatggtttacgtgttatgcgacggagtcggctccggtatttacgcgaatatttcagctatcacctgcgccaaccgtattctggaactgatccggtgcggaatgtctatcagaatgacctgcgaaatggtggcggcgtcaatgcaccgcgcgcggaaagaagatatcccgtttgccgctttctcggcggtttcaatttcacctgacggtcaatataccgtttattcctatgaatcgccgaacccgattttattaaaaaacaaccacgcgacggttcttactccgcgtttttacacaaccggctttgaagtaatcggcgaatctaccggtatgcttaatatgggagattctcttttaatgttttccgacggcgtaagtcaagccggactgggacacgggcacggcatgggtatcggctcagacggagtttcctcttttataaaccttaactacaaaacaaacgatattatcagcaacctgccgtggcggattgtggagatgtgcaaaaccgtatcgggcggaaactgcgaagacgacactacccttgctctgctccactgccgtgaagcgaaagaattaacattgcttacaggaccgccttcaaatcgttccatgaatcatacttacgcgcttaattttatgaatatgtcaggcaaganagctatatgcggctctacaactacggatattgtggcggaggaattaggtttaaaagtggaaaccgtatctatgggtaaatcttacggacaactgccggaatatcgtattgaaggaattgatttagtttcggaaggcgcaatcacattgaaccaagttaataatattttggatgaacctgtagaacggctgtccgaaaattccgtagcggaacgtctatgttttatgctgcacaccgcggatattattaatttgatgattggaaacgcggcaaattccgcgcatgacgatttgatctttaagcagtcgggcgtaaaaatccgcaaacatgtaatccgccgaattgccgaaaaactgagaatcatgggcaaactggttattgagcataactattaa

SEQ ID NO: 72358 - protein, 380 aa, Unknown
  Obtained from environmental sample
  misc_feature (1)..(380): Xaa is any amino acid
MKFFDDFLCQKNKKNHDVCGDYCLYERTAAGMVYVLCDGVGSGIYANISAITCANRILELIRCGMSIRMTCEMVAASMHRARKEDIPFAAFSAVSISPDGQYTVYSYESPNPILLKNNHATVLTPRFYTTGFEVIGESTGMLNMGDSLLMFSDGVSQAGLGHGHGMGIGSDGVSSFINLNYKTNDIISNLPWRIVEMCKTVSGGNCEDDTTLALLHCREAKELTLLTGPPSNRSMNHTYALNFMNMSGKXAICGSTTTDIVAEELGLKVETVSMGKSYGQLPEYRIEGIDLVSEGAITLNQVNNILDEPVERLSENSVAERLCFMLHTADIINLMIGNAANSAHDDLIFKQSGVKIRKHVIRRIAEKLRIMGKLVIEHNY

SEQ ID NO: 72359 - DNA, 462 bp, Unknown
  Obtained from environmental sample
  misc_feature (1)..(462): n is a, c, g, or t
ttggacaggtttatgatgaagctggctttggggtatcccgaccgcgaagcggaacttgccattcttgaagaaaatcccgccgaagaggggcttgcgaaactccagcctgttatccgcgtaagcgaatttatcgcggcgaaaaaagcggcggccggtgtcttttgccacaaggcaattaaagaggctatcgcggacataatcagggacacgcgcattcataaaaattttagtcttggggcaagccccagagccgccctgcattttttggcggcggtaaaggcgcgcgcgtttgtaaagggcagggattatgttattgatgaagatatagccatccttgccgcgcctgtgcttgagcaccgggtaaagcttcgcgatccaagatcatcgggcgaaaaaatcatccgcgagatctgccttgccagaattgacggtttggtaaccgatggaaaagagaaaagttaa

SEQ ID NO: 72360 - protein, 153 aa, Unknown
  Obtained from environmental sample
  misc_feature (1)..(153): Xaa is any amino acid
MDRFMMKLALGYPDREAELAILEENPAEEGLAKLQPVIRVSEFIAAKKAAAGVFCHKAIKEAIADIIRDTRIHKNFSLGASPRAALHFLAAVKARAFVKGRDYVIDEDIAILAAPVLEHRVKLRDPRSSGEKIIREICLARIDGLVTDGKEKS

SEQ ID NO: 72361 - DNA, 1350 bp, Unknown
  Obtained from environmental sample
  misc_feature (1)..(1350): n is a, c, g, or t
atggaaaagagaaaagttaagcgcgccgcggttttttatccatgtacgatgggcgtgtttatcctgcttattatcatcctttcttttaccgccggagcgatcaggcgcgaacttgttcttacgcttacaggcgcggtagttctggcgatatgggcatactgccttgttatgactttgcttctcgcgcttatgtaccgcagacgcgcgaaaaatatctttatccggcttgagcctgaaaaaattgtacgcggcggattgacaaacgcggtatacacggagaacaacccggtttacgccggaaagaatatttttcagtttccgggcatccttgtccgcttaaggataattttaaaaacagaagacgggcggcgtgtaacttatgattttaagccggaaaataaaaataacacgaggcaaaattttcaggtaaaaaaacggggagcgtatttttccgcctatgatgaattcgccgtttttgacattcttggatttttccgtttcgcgtaccgcataccgactgttgatgccgaggaaaacagcggcgcgaaaagcgcggcacgcctgcttgtaagcccggacgccggcgcagagcctttgcctgtgagggcgaagggcggagagacgataaggcaggattcttccgcgcttgaaagaaccgattaccttattgatcaccgtccttatgtgcccggagatgatcctcggcgcattaactggaaactgtacagccacggcggagagcttattgtccgtcagggagaacgcgaaccgccgccttcttccagcatgacaattttgattgatacccaatacgattcgctttattcaacaaataatgaagcggcaaacagcggcgcagaagctgtggatttgctttgtgaaaacgcgcttgctattatcaacaatatcgggaaggagataaatgttcaaattggttatacaaccggctgcgcagcaaacagcggcgcattaagcggtaattcattgactcaggcggatttgggattttttttatcttacccggcggcgcttcccatggaaggcgaaacggcggcgccaacggcggcgccaacggcgaaacttcccgccgtcacggaagacaggggaattattattttagcgctgccaaggattaatacaggaaatatcgcagcaagcagcggcgcgctggagaaatttttagcggataacgctaaccgttcgatagaactgatttttatttacgccgccggagaaaacgccttgcgcgaaaagttggcggaagcgtcgcagcaagcagcggcccggacatgcgcgggtttttataacaggcattacggcgtaaaagcgcaaattgcggaggcgcagtaa

SEQ ID NO: 72362 - protein, 449 aa, Unknown
  Obtained from environmental sample
  DOMAIN (144)...(256): Protein of unknown function DUF58
  misc_feature (1)..(449): Xaa is any amino acid
MEKRKVKRAAVFYPCTMGVFILLIIILSFTAGAIRRELVLTLTGAVVLAIWAYCLVMTLLLALMYRRRAKNIFIRLEPEKIVRGGLTNAVYTENNPVYAGKNIFQFPGILVRLRIILKTEDGRRVTYDFKPENKNNTRQNFQVKKRGAYFSAYDEFAVFDILGFFRFAYRIPTVDAEENSGAKSAARLLVSPDAGAEPLPVRAKGGETIRQDSSALERTDYLIDHRPYVPGDDPRRINWKLYSHGGELIVRQGEREPPPSSSMTILIDTQYDSLYSTNNEAANSGAEAVDLLCENALAIINNIGKEINVQIGYTTGCAANSGALSGNSLTQADLGFFLSYPAALPMEGETAAPTAAPTAKLPAVTEDRGIIILALPRINTGNIAASSGALEKFLADNANRSIELIFIYAAGENALREKLAEASQQAAARTCAGFYNRHYGVKAQIAEAQ

SEQ ID NO: 72363 - DNA, 4029 bp, Unknown
  Obtained from environmental sample
  misc_feature (1)..(4029): n is a, c, g, or t
atggaaaaaagatttgccgttgccttccgttccgccgcggtttttttaattcttttccagatacggcttatcgcggcggatcttgctgacacttcggtttttaccgtcaccctgcttgcgggattttcagccgccgctcttctttctgtttttaagacaggcggcaaacagattaacgccgtcgcatcgcagcaagcagcggcggtcatttccatcgcgcttattccctgggccggcaggtttttggtcgccataccccggttttttattcccgacaggccggacgccccggcgattctttttgactccatgctgcttaatctggacaggaataattttgtttcactgtttccgtattactggagcgcggttacgacgttttttgccgtccgctcgcggaaatttttaagggcggtaattattgcggatgtttccatacttatatttatttccagcgtcacgcacacaggcagaattgaaatctaccgctggcctattgtgatgatagttatttttgccggaattgttttttttcaggcgcttgccctgctcttttccatgccgcccgaaacaaaattatcggtaaaagaaaaacttttaagtattgcggcgcttcttgtaattattgttacgggcggttttttattcataaaaccaatacaggaacaggcggcccaaatgggcggcggccttttggagccgaagtttttcagttttgatttttccaggctgttaaaacttgatcccgaaatttcaataaaaaacgatttaattcttatcgtaaaaaaagagaacgacggtcatattcttctgcgccgcgcggtgctttcgggttacagcaggagaaacggtttttatcaaattgaggaacttgacgaaaaaacgcatccgcagaggcttcccggcagacaggtttcctttaatccaaccgcgtttaaggaagcccgtctttcgccgcaggaatattttttggtaaatgcggaaagcaccgcttttataggcatgaaagagcctgttaaagttaccccttacgaaaactgggacgcttcgtctttcaaagccgcttatgccgttaccagccttgtcagcgacgcggatatttatgatctgataataagcacagttaaatggccttcgttttccgagcttggattaagcgagaatgaatttaaaatttatacggaatacggaaacgacgagagcatacgctctcttgcggggcttataacggaagactgcataacttacacggaaaaggttatagccgtgtacaattatcttaaagacggcgaataccgctacagtttaaaaccgggcatagcgccggacggggaccagcttggatggtttctctttaaatcaaaaaaaggctattgttcatactacgcgtttgcgatgacgctgcttttgcgctctatgggaattcccgcccgtttagccgccggcttttttacagagcaggatacaaacacttttgactattatcctgtgcgttccgacatggcgcacgcgtgggtcgagattgcttttcccggttacggctggattgaatttgatcccactacgcaaaatcttgccgaggacgaagaactgcgtttttcggcgggtcttgatcccgcgctgtttgaaaaactgatgcgcgaaattcttgaaaaccgtttcagcatgagagcaaaagaagaagcggatgatattgaaataatttcaggcaataactctgccgctaaaaacgcgtatattcttcttaaaaacaacgggcttttgctgtttgtttttgttttggttgttctctctctttacatacgctgcggcttattcctttccgttttcattacgcgaaacacaagaaaaaaagctatccgtcttttcaaacatgcctgccgtctcctgcgccttgcgggattgcgcgcggcacagcggcgcggcaacagtctgacctctgctctttccgaaccggaatgggcgttacagcttaataacgtattcaacggtatttatccgctgtaccaatccgccgccgccgcccgtttctcccttaagttttcagaacaggagcttgagcttcaaacggcaaactacaggtgtttccgctcttcatacaacgcgaatgtttcgcttccgcggcgcataaaggtgtggatttttccgctgtctgtaattacaccgggaaaaattttaacagtttttcttttacttggattatttgcgggatcgcaatcgcagttggttaaggcgcaggacgcgcaggacgcgcagagcgcgcagagcgtgcagagcgcgcctaacggcggcggcgaggaaacaataagcgcggacgctctgttccgggaagcttccgacgccgattattcggaacattgggagcgcgcgatagaattatacagaaaagggataaaaacatttccggtcgacgcgcggtttccctggtcgctgggaaatctttattacggccgttctcttttcaatcttgcgtgggacgaataccggaaagttgaagctctttctccttatgacgcgcctgtccttatcaggcttgcgagaaccgccgcataccttaaccgcaacgcggaatcggctagtctttatgagcgcgtgcttgaaattgagcctgataacatggaagtaataggcagtctgggctggatgtatttcaaagtccacagaaccgcggacggggaaaggcttcttaattccgccgtagaacgtttcggctataacccggatttatcaatgacgcttggaaccatttactcagatatgtaccgttataatgacagcaaatactggtacggcaaatccatagaattgggagaagaatacaaagacaatgaatatacctctatagcgtggtataacctttcaattctggaatcgcgtttttacctttacgatttatgcatgtacgcgaccgattcggcgataaaattgtataaccgcgcttccggccaccttgcccgcgcggaactcctgaaacaccagctgaaactgacagaagctcaaagggagtgcgggatcgcttatgaaaccgacacttccccgctttccaaattaaggcttgcgcatattttccaaaaatccggccggcttgaagaggcgcggctttacgcccaggactgtcttaaagacagtaataattcatggatgttaaatttcggcatagacccggaccgttataaaagagagattcatcatacgctggctaaaacatattccggtcttcttaatacagaacggtatttgccgagggaaactccaaaagaaaaaatgttatctcttttcagaacaatctcgtttatgttaaaaaaggaagtaaattataaactatacagaaaatactgtctggcctctgcaaacgcgtacgcgaaaaccttttcaaacagcggcgcagcaagcagcggcgcagcaagcagcggcgctgtaaacaacggcgttaataacgacgtaaacctggattcgctttcgcaatattacaacgcgtttaaggactatccgcgccgcgctttcacttatcttgataaagcgcgcgcttttgaaacagagcttattcccgcgtcaattcctttttatgattatgaagaaggggttttacttaacaaaaaaagccttatagaaaaagcgatgcgggaatatgatcctttctgggaaaaggaatatattgccgactgttataaaacattgaaaaacagcgaagaactctttgcgatgaaccgcggagcgctgaatcaggaaggaatgaaacttcccgtgtacatggatttattttttgaagaaacgtcaaattcgaacaaacatcttgaaagggcgctcttaaaagcgggctttaaaaaagaaacaataacggcaaggttcaggctggccttaagaattcacggcactcaggaaaacggctactcggcgttatgcgaacttgttgacacaaaaggtgaaacggaaacactttggtattctttccccttacgcgagccgacaagggctgagtattacaaattggcaagagatgtcagaaataagatatttaccgttgattag

SEQ ID NO: 72364 - protein, 1342 aa, Unknown
  Obtained from environmental sample
  SIGNAL (1)...(25)
  DOMAIN (839)...(872): Tetratricopeptide repeat
  misc_feature (1)..(1342): Xaa is any amino acid
MEKRFAVAFRSAAVFLILFQIRLIAADLADTSVFTVTLLAGFSAAALLSVFKTGGKQINAVASQQAAAVISIALIPWAGRFLVAIPRFFIPDRPDAPAILFDSMLLNLDRNNFVSLFPYYWSAVTTFFAVRSRKFLRAVIIADVSILIFISSVTHTGRIEIYRWPIVMIVIFAGIVFFQALALLFSMPPETKLSVKEKLLSIAALLVIIVTGGFLFIKPIQEQAAQMGGGLLEPKFFSFDFSRLLKLDPEISIKNDLILIVKKENDGHILLRRAVLSGYSRRNGFYQIEELDEKTHPQRLPGRQVSFNPTAFKEARLSPQEYFLVNAESTAFIGMKEPVKVTPYENWDASSFKAAYAVTSLVSDADIYDLIISTVKWPSFSELGLSENEFKIYTEYGNDESIRSLAGLITEDCITYTEKVIAVYNYLKDGEYRYSLKPGIAPDGDQLGWFLFKSKKGYCSYYAFAMTLLLRSMGIPARLAAGFFTEQDTNTFDYYPVRSDMAHAWVEIAFPGYGWIEFDPTTQNLAEDEELRFSAGLDPALFEKLMREILENRFSMRAKEEADDIEIISGNNSAAKNAYILLKNNGLLLFVFVLVVLSLYIRCGLFLSVFITRNTRKKAIRLFKHACRLLRLAGLRAAQRRGNSLTSALSEPEWALQLNNVFNGIYPLYQSAAAARFSLKFSEQELELQTANYRCFRSSYNANVSLPRRIKVWIFPLSVITPGKILTVFLLLGLFAGSQSQLVKAQDAQDAQSAQSVQSAPNGGGEETISADALFREASDADYSEHWERAIELYRKGIKTFPVDARFPWSLGNLYYGRSLFNLAWDEYRKVEALSPYDAPVLIRLARTAAYLNRNAESASLYERVLEIEPDNMEVIGSLGWMYFKVHRTADGERLLNSAVERFGYNPDLSMTLGTIYSDMYRYNDSKYWYGKSIELGEEYKDNEYTSIAWYNLSILESRFYLYDLCMYATDSAIKLYNRASGHLARAELLKHQLKLTEAQRECGIAYETDTSPLSKLRLAHIFQKSGRLEEARLYAQDCLKDSNNSWMLNFGIDPDRYKREIHHTLAKTYSGLLNTERYLPRETPKEKMLSLFRTISFMLKKEVNYKLYRKYCLASANAYAKTFSNSGAASSGAASSGAVNNGVNNDVNLDSLSQYYNAFKDYPRRAFTYLDKARAFETELIPASIPFYDYEEGVLLNKKSLIEKAMREYDPFWEKEYIADCYKTLKNSEELFAMNRGALNQEGMKLPVYMDLFFEETSNSNKHLERALLKAGFKKETITARFRLALRIHGTQENGYSALCELVDTKGETETLWYSFPLREPTRAEYYKLARDVRNKIFTVD

SEQ ID NO: 72365 - DNA, 909 bp, Unknown
  Obtained from environmental sample
  misc_feature (1)..(909): n is a, c, g, or t
atgaggttattaaccagatccgattttgacggcctggcttgcggggcgcttttagtatatttgggactcatcgacgaatggaaatttgtacatccaaaagatattcaggacggtctgattgaagcctcggataatgatatattagccaatattccctatattaagggctgtaaactctggtttgaccatcattccagcgaatccgacagattgggaaaaaacatatattttgagggagtatcgaaacccgcccccagctgcgccagggtagtttacgaatattacggcggcgacgccaaactgggtaaattcgcggagatgattcattatgtagacaaagttgattccggcaaccttacccccgatgaaattttagaccccaaaggctgggtgcttcttggttttatcatggatccgcgcaccggtcttggacgtttcaggaattttaccatcagcaactacgatttaatgaaagagcttgctttagcctgcaccgaaaaaaatattgatgaaatacttgccatgcctgacgtaaaagaacgcctggatttgtattttgaacagacaaacaattataaagagatggttcttaagcacgccaagcctatggataatgtcattatgatagacctgcgtaatgttgatacaattttcgccgggaacagattctttatttacacgcttttccccgatcagaatatttctgtctgggttgtggacggcagaaacaaagtaaacgtcgccgttaccgtcggctacagcataataaaccgtaccgcgaccgtagacgtaggcgccctcctgctctgctacggcggcggcggccacaggcaagtaggaacctgccaagtcccctacgacgacgccgacagagtaatcgccgagattctagagaagcttaaacactaa

SEQ ID NO: 72366 - protein, 302 aa, Unknown
  Obtained from environmental sample
  misc_feature (1)..(302): Xaa is any amino acid
MRLLTRSDFDGLACGALLVYLGLIDEWKFVHPKDIQDGLIEASDNDILANIPYIKGCKLWFDHHSSESDRLGKNIYFEGVSKPAPSCARVVYEYYGGDAKLGKFAEMIHYVDKVDSGNLTPDEILDPKGWVLLGFIMDPRTGLGRFRNFTISNYDLMKELALACTEKNIDEILAMPDVKERLDLYFEQTNNYKEMVLKHAKPMDNVIMIDLRNVDTIFAGNRFFIYTLFPDQNISVWVVDGRNKVNVAVTVGYSIINRTATVDVGALLLCYGGGGHRQVGTCQVPYDDADRVIAEILEKLKH

SEQ ID NO: 72367 - DNA, 780 bp, Unknown
  Obtained from environmental sample
  misc_feature (1)..(780): n is a, c, g, or t
atgaagcgcaggctttctgttttgtttttatttaccttatgtattccctgtgttttttcgctaacgcttgaggaacttacgggggcggaaacggcgaaacgtctgcaatcgggcgctgtttccgaaactcagcttgggaaacccgcgcttaaatttctgcccgccttgcctgaattgcggcaatttgtctccaattccatgaattcccttgagccgacccttgctgtcgagacgctttatctttacaaaaaacctgattccgccgcaaattggaacgatagccttaaaaccgcgttatttaaccaaatgacggccttaagcacccttaccggaatcgaatatttttccgtaacccgcaatacaatgaggactttttatgaatattcctcggttatagacggacagacatccaaaaaaccgcttcccgaccctgtttttaacaaaccgcccgcccaatatacgcttttagcaaggcaaaaagaccttactttcggggataatatctaccgttacgaatacagagcggcagaaagcgctttgttttttattcaggaaaacatgacatccatgaattacggaataattcccgcggtaggcaaaaacaagctcagatccgttctggcggtaattgactgcggcgactctctgttaatctacgccgtttccatggcaaaagccgcctctgtcccaggaatgacggacagaataggcaattcattcaaaaatcgcgcggacgcggtctataaatggtttgtttcaggcgcggataagctgttttaa

SEQ ID NO: 72368 - protein, 259 aa, Unknown
  Obtained from environmental sample
  SIGNAL (1)...(20)
  misc_feature (1)..(259): Xaa is any amino acid
MKRRLSVLFLFTLCIPCVFSLTLEELTGAETAKRLQSGAVSETQLGKPALKFLPALPELRQFVSNSMNSLEPTLAVETLYLYKKPDSAANWNDSLKTALFNQMTALSTLTGIEYFSVTRNTMRTFYEYSSVIDGQTSKKPLPDPVFNKPPAQYTLLARQKDLTFGDNIYRYEYRAAESALFFIQENMTSMNYGIIPAVGKNKLRSVLAVIDCGDSLLIYAVSMAKAASVPGMTDRIGNSFKNRADAVYKWFVSGADKLF

SEQ ID NO: 72369 - DNA, 729 bp, Unknown
  Obtained from environmental sample
  misc_feature (1)..(729): n is a, c, g, or t
atggaatttgaatttgaaggccgcaccgaaaaagaggcaatcgacaacgcggcgaaagaactgggactggaaaaagacgattttgacgtggaaattctggagacccagaaaaacggccttttcaaaaaaggctatgtacggataagggttcataccggaaatacggcaattcaaagaaacgcgtctcatggaaacgaatctttttcggaacaggatgcaaggcaaaggaccgggggaagcaaggcgatcttcggggagccgattccgcaaaatgaatttgagcaaaaaatggcggaatttacattgggtatcattgaaagaatgggatatccgggcaaggttacgattcttttcagggagaagcataaaatcgggataaaaatcgattctgaacattcatccattctgattgggaaaaagggcaaaaatctggacgcgcttcagctcctgcttaatatttacgccggcaggctgggcagggaagacatgcgcgtgattcttgataccgaaaattaccgcatccgcagggaagagtcccttgtgcgccttgcgtacagcgtggcggaaaaggtccgcgaaagccgcgattccatcctgcttgaacctatgaatccttttgacaggtggcttatccatacgacattaaatgatatcaacgatgttgaaaccaaaagcgagggagaaggtttatataagcaggtaagggttttttaccgcggattaaaataa

SEQ ID NO: 72370 - protein, 242 aa, Unknown
  Obtained from environmental sample
  DOMAIN (184)...(239): R3H domain
  misc_feature (1)..(242): Xaa is any amino acid
MEFEFEGRTEKEAIDNAAKELGLEKDDFDVEILETQKNGLFKKGYVRIRVHTGNTAIQRNASHGNESFSEQDARQRTGGSKAIFGEPIPQNEFEQKMAEFTLGIIERMGYPGKVTILFREKHKIGIKIDSEHSSILIGKKGKNLDALQLLLNIYAGRLGREDMRVILDTENYRIRREESLVRLAYSVAEKVRESRDSILLEPMNPFDRWLIHTTLNDINDVETKSEGEGLYKQVRVFYRGLK

SEQ ID NO: 72371 - DNA, 1743 bp, Unknown
  Obtained from environmental sample
  misc_feature (1)..(1743): n is a, c, g, or t
gtgttctttccgccaaagaagaacgcgcagcaatcagcggcgcagcagaatgttcagccgccggtaacaactgttgcgccggattcgcagattgtccaacaaacgggagagccggcaaaggagcaacaggccgaagagcggcaaactgtggtgcagcaaactgcgtcgcaggccgatttggatgccggacctaaggaattacagtacataatagttgatactgaatttatgaccgtcgctcttacaaatgctggcggcaatattgtttcttggaaacttaaggggcataaagacaaagaagaaaattttgacatgatccttgctggtgataaagaggcgcaggctttttccgtagcgtttggcggcatggacgctcagcccgttacatctttgttttatgtaaataaaatatcggagtattcaatagaattttaccgtgacttttcaaacaatgcggacggaaaattccgcctgatcaaacggtacgattttaaacccagagattatatgttcgaactgacgataactcttgacggcggatattcaatgtccggctttaattttgctggtagcgcgtatactcttacattcgggccgcagattggtcccaagtttgtaaaactggataaccgttacgactaccgtaactatttaacatttgcaaacggaaaaagaaaaaacgctaaagttaacgatattatcgacacccgtccgtcatgggcggcaatttccggcaagtattttgcttttattgcgattccctatcttgctcaatacagcgttgttttttcggacaagcctgaacaggggcttccttccgcttcaaggcttagtattatccgccctgcaataaccgcgtccaaagccgcggatacataccgtttttatctgggaccaaaaacacaggaagctctttccgtctataacacaggcagaaatgaattcggacttaaagacacccatcttgaagaagcggcaagtacgcgcggaattttatctccgctggaaaaagtgttaaaatggctgctcattattttttataaaattgtgcctaactacggcgtcgctattatcctgcttacgctatttataaaaattctctttttcccgcttacaaaaaaaggctcggaagccactttgcgaatgcaggcgcttgcgcccaaaatcaaggaaatacaggaaaaatacaagaataatccgcagaaacagcaggttgaaatgagtaatttttacaaacaggaagggtacaaccctatttccggctgtcttcccatgcttttgcaaataccgatttttcttgccatgtataatttgtttaacaaccattttgatctgcgcggggccgcgtttattcccggctggataccggatctttccgtgcctgagtatatatggaattttcccgatggtttcagcctgccgcttttacactggacggcgctcagggctttgccgtttatctatgtcggctctcagttaatttacggcaaggtaacgcagacgcccggacagcaggcaagcgcgggaaacatgaagatgatgttatacgtcatgcctatagcgttcttcttcattctttatgacgtgccttccggattgttaatatactggattttttccaacattcttaccctggtacagcaggtgataataaacaggtatattcacgcgaagaatgagcaggttataaaccagccggaagaaaagacggttatcgctcccaaaaaaaagaaaaaccggtag

SEQ ID NO: 72372 - protein, 580 aa, Unknown
  Obtained from environmental sample
  DOMAIN (351)...(556): 60Kd inner membrane protein
  misc_feature (1)..(580): Xaa is any amino acid
MFFPPKKNAQQSAAQQNVQPPVTTVAPDSQIVQQTGEPAKEQQAEERQTVVQQTASQADLDAGPKELQYIIVDTEFMTVALTNAGGNIVSWKLKGHKDKEENFDMILAGDKEAQAFSVAFGGMDAQPVTSLFYVNKISEYSIEFYRDFSNNADGKFRLIKRYDFKPRDYMFELTITLDGGYSMSGFNFAGSAYTLTFGPQIGPKFVKLDNRYDYRNYLTFANGKRKNAKVNDIIDTRPSWAAISGKYFAFIAIPYLAQYSVVFSDKPEQGLPSASRLSIIRPAITASKAADTYRFYLGPKTQEALSVYNTGRNEFGLKDTHLEEAASTRGILSPLEKVLKWLLIIFYKIVPNYGVAIILLTLFIKILFFPLTKKGSEATLRMQALAPKIKEIQEKYKNNPQKQQVEMSNFYKQEGYNPISGCLPMLLQIPIFLAMYNLFNNHFDLRGAAFIPGWIPDLSVPEYIWNFPDGFSLPLLHWTALRALPFIYVGSQLIYGKVTQTPGQQASAGNMKMMLYVMPIAFFFILYDVPSGLLIYWIFSNILTLVQQVIINRYIHAKNEQVINQPEEKTVIAPKKKKNR

SEQ ID NO: 72373 - DNA, 927 bp, Unknown
  Obtained from environmental sample
  misc_feature (1)..(927): n is a, c, g, or t
gtgaaatttctaaaaagtttttcattattaattgtattggtcggcgtccttaactcaggagcgctagccgcggacgagttgatccatgttgtcggaaagggagataccatttattctctttctcgtttttatcatgtaacagcggaagaactcatgagagccaacggtatttccgacccctccaaaatcagcgtcgggaaaaaattgataataccggtttcaggcgacggttccgctttgccgggaactgcggtaaatgttcctgtcgcggctgcaagtaacacaatgacgctggtcaattacaaagcggtaaaaggcgacacgctttacagtatagcgcgcagtaataacattaccttgcagaaattacaggaaataaacaacttttcttccggtcatgtgcttaaagtaggcgatgtaatcaaagtgccgggaaaagtttcttccgaagcgcaaataaccattacaaatacagcgtcggtaaaaccggctgtgccggcaaagtcaacggcatcagctaagtcaacgcagccggctaagcccgcggcggggatttataccttacgctggcctgtaacgccgaaagatatttcttacatgacggggcagatgggcgttgttgtagagggcgaacagcttgaatcagtgaaaagtttaacacaggggaatgtggtatccgctggtccctggcggaagtttggcagagttgtaattgtagagacccaaggggggtattactacatgtacggcggctgtgaaactataactgtaaatgtaggcgacagaataacgccgggaatggaattgggaaaattaggcgtcaacgccgtttcggtgaaacctcagctctttttcatggttttccgaaatgacaatcccatggatccggctttagctccgagagcgggaaataatcaaaggacatag

SEQ ID NO: 72374 - protein, 308 aa, Unknown
  Obtained from environmental sample
  SIGNAL (1)...(23)
  DOMAIN (201)...(296): Peptidase family M23
  misc_feature (1)..(308): Xaa is any amino acid
MKFLKSFSLLIVLVGVLNSGALAADELIHVVGKGDTIYSLSRFYHVTAEELMRANGISDPSKISVGKKLIIPVSGDGSALPGTAVNVPVAAASNTMTLVNYKAVKGDTLYSIARSNNITLQKLQEINNFSSGHVLKVGDVIKVPGKVSSEAQITITNTASVKPAVPAKSTASAKSTQPAKPAAGIYTLRWPVTPKDISYMTGQMGVVVEGEQLESVKSLTQGNVVSAGPWRKFGRVVIVETQGGYYYMYGGCETITVNVGDRITPGMELGKLGVNAVSVKPQLFFMVFRNDNPMDPALAPRAGNNQRT

SEQ ID NO: 72375 - DNA, 990 bp, Unknown
  Obtained from environmental sample
  misc_feature (1)..(990): n is a, c, g, or t
atggaagcaggactagagaaagcggttaaacgctccagaaaaccgatagaaaaagctcataaaaaagtaaaagcgcagaaggaatcagaccctttggcgttgtacttcaggcaaatttcaaggtttcctcttttaactttgcaggaagaacaaataatcggcgaaaagataataagcctgcgcgcaaaacttaaacaactggaatccgacaaaaataaaaacaaaaataccgactacagcaaagaaaaaacagcccttgacagcgcgcttcttcactacaaaaattccatgataaacgctaacctgcgtcttgtcgtctctatcgccaaaaattaccagcatcgcggtttgtcgcttttagatttaatcgacgagggaaatatcggtcttattgaggcggttgagcgttttgattacacaagaggctgccgtttctccacctacggcacttggtggattaggcaggctattatcaagagcataggggataaggggcgcgttatccgcataccgattcacatgcttaacacgattaagaaatgttactatgtagccaaacaacttacgcaggatttgggacgcgaccccaacgaagaagaattgtccgagtacttggatgttcctgtttccaaagttaaagaaatagtgaaactgtctcaggaaaccacaagtttggacaccattgttgacgacgggaatcttacgcgccttgccgatttaatcaaagacgacgccagagccgaaccgtttgaaatggttttctccatgacactgcaggaaaccatcggcgggatactttctcagttgtcagaaagagagatgaagataatccaactgcgttttggtttaacaggagaaaatccgcttactttggaagagaccggaaaatatttaggcatcacccgcgagcgcgtccgtcaaattcaggaaaaagccgtctggaaacttcgcacccttcatgaactgcgcgaattaagagagacttcgtaa

SEQ ID NO: 72376 - protein, 329 aa, Unknown; identical to SEQ ID NO: 66616
  Obtained from environmental sample
  DOMAIN (29)...(65): Sigma-70 factor, region 1.2
  misc_feature (1)..(329): Xaa is any amino acid

SEQ ID NO: 72377 - DNA, 3072 bp, Unknown
  Obtained from environmental sample
  misc_feature (1)..(3072): n is a, c, g, or t
gtgcagatgaagaagcctaaaacctctttacgtaaaatggtttggggtgaacataaaatttctctgcgctttcgttttataaatatcgcgctttttctgctgacttccctaattatggcggtagttttattaagcgtacttcaaaatataacaaaacaggtatctgtggactatgccagatattttgccgccaatgccgcgggaacattcggagcccatctttccaaggaaatagcgctcgtatcaaaaaccgtaagttcgcatgaaatcattgaatggtttcttgatgagaataattaccaaaaaaaactcatggcttatgatgaaatgatgggaactataaatcaattagccagtaataatttatatatcgccatacaaaaaacattgaatgagtttacactcgctaaaaactccgatattgacgatataagggcggttggaaatcttgatcccgattattatgacgacgcgtggtattttgagtgtatagcttctaattttgagtatgtcttaaatgtggatattgataaagttttccatagaaaactggtatggcttaattacaaagttacccataacggcgttccaatcggcgtattttgcgcgggtcttaattttgccgatgtagtcgaagagttgttttctcactatgacggttcaaaaatacgcagtcttattattgacgcggacggcgtcattcaaatggacagttctttgttaaataccgattttcttaaatacgatgacgaaatcagaattgaagaagaatttaaagacccgaaacttatcgaggctgttaatacatggcttgaaggcattaccggttattttgaaataggagacgaacccgcaatagttgagctgtcaagcggtttaaaccgcagaggcttaagcagcaacgacaaataccgttacgcgacaatagctcctatcggttctacaaattggtcggtagtcactctatttgactcttcatcgttgttcagtctgtcaaaactaatacctttgtttatattaatgggcgttttatttatcgctttcgcgtttgttaccagcattatgagttaccggttcttatacaaacccgcggtggaattagctcgctccaaagacgattttctggcgaaaatgagccatgaaatacgcacacccatgaacgctatcacgggcatggcggaacttgctttacgcgaaaatgtgccggacgccgctcaggaacatatcattacaatcaaacaagcgggcgctaatcttttatctatcataaatgatattcttgatttttcaaaaattgaaagcggaaaattggaaatcattcccgtaaaatatatgctgtcgtctttgattaacgacacagtcaacatcattcgcatgcgttttaaagaaaaaccattgaggttttttaccaacatagacgggactattcccaacgacctttacggagacgaaccgcgtctgcggcaaattattcttaaccttctgaccaacgcggtaaagtattcggaaaaggggcatatcggtttgatcattaccataaacaagcgtaacgacaaacgagtctggcttaagatagtagtaaccgacaccggaaaagggataaaaccggaagatcagaaaaaacttttcggcgaatttgttcaggtagacacgcggaaaaacaaggggatagaagggacgggacttggactcgctattaccaaacgcctttgtctcgccatgggcggagatataagcgtaaaaagcgaatacggcaagggaagcgaattcacggtaattgttccccagaacattgaatcgcaagagccttttgccgacgtagaagaaccgtggagaaagaaagtgctggtctatgaaggcagatctgtctacgccaacgctgtctgctggtctttggaaaatatgaaagttccctataccatggtaaaaaataaagaagattttgccgccgccctgtaccgggaagaatggtcttatgtgttttcaggctatggtctttatgaaaatattaaaccgcttatggaaaaaagcgattcatttttctgcggaggcaaaaagccgcctatggctttgatggtagaatggggaacggaagcctacatacccggcgtacgttttctgtccataccggtacagtcccttgccattgccaatattttaaacggtcgtgaagacatcaaaggatacaataaaagttccggcactgtccgattcacctttccccgcgcgcggattcttgttgttgacgatatcgcgacaaaccttaaagtagccgagggtcttcttgctccctaccatacaacagtagatacaagccttaccggtttgcagtcattggaaatggtaaaacgaaacgaatacgacatagtattcatggatcacatgatgcccggaatggacggagttgaaaccacagccgccatccgcgcatgggaaaaagaacaacatgaaaaacacaagcgaattcctattatcgccctaactgctaacgctgtcgtcggcatgagagaaatgtttttagaaaacggctttgatgattttatctccaaacccatagatatttccaagttagatgaaatgcttgatcgctggataccgaaagaaaaaagagaaaagaattcagctcaacccattcaacaagatcagggtacggattcagaactatctcagaaagaagagcaaaacgcgccggttgagtccgccgaaacgaacgacttttacattcccggcgttgatacggcaaaaggcattgccctgaccggcggagttttggaaacctataagcaactgttgttcatgctcagtaaagacattgatgaacgactgcaattttttatgaaagatataaccactgacactctgcccgactttgtaacccatgttcactctttaaaaagcgcgtccgcttctatcggagcggaggaaatatcgtctcttgccgcgggacttgaagcaataggcaagtccggagacgccgcctttatccgtgaaagtctgcctgattttataaaaaaacttgaagaacttaaaaaaaatattttctccggtctggctcacataagcatagtgtaa

SEQ ID NO: 72378 - protein, 1023 aa, Unknown
  Obtained from environmental sample
  DOMAIN (929)...(1012): Hpt domain
  misc_feature (1)..(1023): Xaa is any amino acid
MQMKKPKTSLRKMVWGEHKISLRFRFINIALFLLTSLIMAVVLLSVLQNITKQVSVDYARYFAANAAGTFGAHLSKEIALVSKTVSSHEIIEWFLDENNYQKKLMAYDEMMGTINQLASNNLYIAIQKTLNEFTLAKNSDIDDIRAVGNLDPDYYDDAWYFECIASNFEYVLNVDIDKVFHRKLVWLNYKVTHNGVPIGVFCAGLNFADVVEELFSHYDGSKIRSLIIDADGVIQMDSSLLNTDFLKYDDEIRIEEEFKDPKLIEAVNTWLEGITGYFEIGDEPAIVELSSGLNRRGLSSNDKYRYATIAPIGSTNWSVVTLFDSSSLFSLSKLIPLFILMGVLFIAFAFVTSIMSYRFLYKPAVELARSKDDFLAKMSHEIRTPMNAITGMAELALRENVPDAAQEHIITIKQAGANLLSIINDILDFSKIESGKLEIIPVKYMLSSLINDTVNIIRMRFKEKPLRFFTNIDGTIPNDLYGDEPRLRQIILNLLTNAVKYSEKGHIGLIITINKRNDKRVWLKIVVTDTGKGIKPEDQKKLFGEFVQVDTRKNKGIEGTGLGLAITKRLCLAMGGDISVKSEYGKGSEFTVIVPQNIESQEPFADVEEPWRKKVLVYEGRSVYANAVCWSLENMKVPYTMVKNKEDFAAALYREEWSYVFSGYGLYENIKPLMEKSDSFFCGGKKPPMALMVEWGTEAYIPGVRFLSIPVQSLAIANILNGREDIKGYNKSSGTVRFTFPRARILVVDDIATNLKVAEGLLAPYHTTVDTSLTGLQSLEMVKRNEYDIVFMDHMMPGMDGVETTAAIRAWEKEQHEKHKRIPIIALTANAVVGMREMFLENGFDDFISKPIDISKLDEMLDRWIPKEKREKNSAQPIQQDQGTDSELSQKEEQNAPVESAETNDFYIPGVDTAKGIALTGGVLETYKQLLFMLSKDIDERLQFFMKDITTDTLPDFVTHVHSLKSASASIGAEEISSLAAGLEAIGKSGDAAFIRESLPDFIKKLEELKKNIFSGLAHISIV

SEQ ID NO: 72379 - DNA, 1527 bp, Unknown
  Obtained from environmental sample
  misc_feature (1)..(1527): n is a, c, g, or t
atgtccggtcttcttaaaccctacgaaggttatgagcttgtaaaagcaatcaaaaaggtgacagacttaccgattgaaatccacacccatgccactacgggtatgtccgtagcgactcttaccaagtgcgccgaagcgggagcggagattttagacactacaatttcatcaatgtcgatgggaacaagtcatagcccaacggaaacaatggtggaaattttaaaaggcactgagtacgacacaggactggacaccgccctgttactcgaaattgccgcgtatttccgcgaagtccgcaaaaactacaaaaaattcgagtcgagcttcctcggcgcggatacccgtatcctcgcaagccaggttcccggcggaatgttaagcaacctggaaagccagcttaaagaacagggcgcttcggataaaatcgacgacgtacttaaagagatcgccgttgttcaaaaagactcaggctatccgccgcttgttactcccacaagccaaattgtcggaacacaggctgtgtttaacgtactgttcggcagatacaacaaactttcaggcgagttccaagaccttgtcgccggaaaatacggcgcctgccccgctcccaaaaatcccgatgtagtaaaaaaagctcttgaagctttaaaaatggaaaaagaaatcacccaccgcccggcggatgatattcccgctgaatattcaaaacttgaagacgaaaccaaaaaacttttgggcacaagcacagttacaacggaagacgttttaacctacgccatgttcccgaaagtcgctccggacttcttcaaaaaacgcgccaacggtcctgtggtctttaaacccgaagccgaaggagcagccgctcccgccgcgccgggacaagccgcgcgttactcaataaacgtaaacggcgcgaattacgacgtagttgtcgcacccgccggaacagtagccgtagctcccgcagccggcggcgctcctgctcctgcagccgctcctgtcgcgtcaagcggcggatttggcactataacggttccggctcccgtagccggcattgtgcttcgctatgcggtctctgagggcgctgaagtaaagaacggtcagacaataataattttagagtccatgaaaatggaactggaaataaaagcaaacgcgtccggcaaaatacattttatcgctcccacaggcacgaatgttgtaggcaaacagcctgtagccgaaatcagcggagccggtattgccgctcccgcgcctgcggctgctcccgccgcgcctgcccccgcgcctgcggcggtcccctctgccggcggcggcggaacgatagtcggcgcgccggtcgcgggtattgttttacgttactccgtaaacgaaggcgatacagtctccaacggtcaaacaatcgctattatcgaatccatgaaaatggaactggaaataaaggcaaacgcgtccggcagagtgcatttcattgcggcgcttggaacatcgcttgtctctaaacagcctatagcggaaataagttag

SEQ ID NO: 72380 - protein, 508 aa, Unknown
  Obtained from environmental sample
  DOMAIN (343)...(409): Biotin-requiring enzyme
  misc_feature (1)..(508): Xaa is any amino acid
MSGLLKPYEGYELVKAIKKVTDLPIEIHTHATTGMSVATLTKCAEAGAEILDTTISSMSMGTSHSPTETMVEILKGTEYDTGLDTALLLEIAAYFREVRKNYKKFESSFLGADTRILASQVPGGMLSNLESQLKEQGASDKIDDVLKEIAVVQKDSGYPPLVTPTSQIVGTQAVFNVLFGRYNKLSGEFQDLVAGKYGACPAPKNPDVVKKALEALKMEKEITHRPADDIPAEYSKLEDETKKLLGTSTVTTEDVLTYAMFPKVAPDFFKKRANGPVVFKPEAEGAAAPAAPGQAARYSINVNGANYDVVVAPAGTVAVAPAAGGAPAPAAAPVASSGGFGTITVPAPVAGIVLRYAVSEGAEVKNGQTIIILESMKMELEIKANASGKIHFIAPTGTNVVGKQPVAEISGAGIAAPAPAAAPAAPAPAPAAVPSAGGGGTIVGAPVAGIVLRYSVNEGDTVSNGQTIAIIESMKMELEIKANASGRVHFIAALGTSLVSKQPIAEIS

SEQ ID NO: 72381 - DNA, 6717 bp, Unknown
  Obtained from environmental sample
  misc_feature (1)..(6717): n is a, c, g, or t
atgctgaccagcagttttacgaggattggcaataacactaacaaattcacaggcgtgtatgacgggggcgagtatgccataaccaatttgagcatgactatcgccagcagttatacaagtttattcggctatatcggcgcaagcggcacggtgaaaaacgtaaatgtaacaagcggcacgataagcgtaagcacgggaagctatgtgagtatcggaggcattgcgggcgaaaacgaaggcactattgacaactgctcctttagcggaactttgagcgtcagcccgcacgatcagattggcggcattgtcggacagaataacggcacggtgaaaaacagcagaaacttcgccaatgtaaccggcggaaatcaggtcggcggcattgcgggaacgaatcagggcaaactcgacaatagttacagcgccggaacagtcagaggaagccagcaagtcggcggtatcgccggtactaatgtcggcagcggtaattatataaagaactcctataacacgggcaatgttaccagcaccgccggaacaagctctaatgtcggaggcattgtcgggtttaaccaagcaaacacggcggtagacttctgctacaataccggcaatgttaccggatcaaccgcagtcggcggcatagtagggaactccagcggcagtagagtagtagacaacgtatcgctcggcttactgataaccggcactggcagtctcggtcgtgtagccggaattgccaatggcggaactatgatcgacagaaacaaatcccgtgcggatatgaaactcggtacaagcggttcagagacgacaataccaagcggatcaaccggggcaaataacgtatacggcgcggatgtcgctttgaatacgtcattagcaaccgttttcgatacaagcaggtgggacaccacgctttggaatatcaacggcaatttgactataggcaacgaattacccacgctcataccaaatacgcaacacccggctcccttgcttccggggtctaacccgtcgcccggcacggcggctaatcccttcctcgttaccaacgaaaccgatctccgcaaagtcggaaccggcactgacggctggacgctttcggtgcactacaaacagacacaggacatcacgctgaccagtaacttatccgtgattggcacaaacattaataagttcacaggttcgtatgacgggaacgaaaaaaccatttccggcttgaccatgacacgtaccagcgttagttattttggattattcggctatatcggatcagacggcgttgtaaaaaatgttaccgttaccaacggctcgataaccggaaccgcaagcagttatttcggaggcattgccggacagaacgaaggcacgattgaaaactgctcctttagcggaaccgtcaacggcgacacaaccagcgatgatgtaggcggcattgtgggacggaataccggcacgataataaacagcagaaacaccgcaacggtaagcggcaggacacgggtcggcggcattgccggagagaatcagggcaaaatcgacaacagttacaacacgggagccattaccggcagtcagcaagtcggcggtatctccggtggtaattcctccagcggtaattatataaagaactgctataacacgggaaatgttatcagtaccaccgttaccaccacatctaatgccggcggcattgtcgggcaatcaagcgcactggtagaatactgctacaataccggcaatgtttcgggaaccggcggggtcggcggcatagtgggatacaccaacaccggaagcaccgtgcgatactgcgtatcactcggcgcaagggtaaccggcggaaacaatacctgccgtgtagtgggagttatgtcgggaacaacaactctcaccaacaacaaagcccgtgcggatatgaaagtcggcgtaagcggatcggaggcaataccaactataaatataggagcaaatgaaagagagggcgagagtgtcagtttgggtgcggcacagaattctgttttcagcagtttctttactaccacaatttggactttaggcagtactttgacagtaggcggcaatttgcccatactccagatgaatacgcaaagccccgctcccactctgccgggatcgaacccgacgttaggcacggcggctaatcccttcctcgttacaaacgaaaccgatctcaagaaggtaggaaccggcactgacggctggacgctttcggcgcactacaaacagacacagaacatcaccatgacgacaagcaactttacgccgattggcaatgacgcaaacagattcaccggcacgtatgacggggacggaaaaaccattagcggattgaacataaccggcacgggaaataatttaggtttattcggcgttatccactcagccggcacggtgaaaaatgtgagcgcaagcggcacggtaacaaataccggaaccggaactgttatggagtatgtcggcggcattgccggagcgaataacggcagtatcgaaaactgctcatttagcggaacggtaaacggcggaagcggcaacgataatatcggcggcattaccggatggaataacggcacggtgataaacagcagaagctccgcaacggtaagcggcagaaccgatgtcggcggcattgccggacgaaattccggcacgattgaaaacagttacaacacgggagccgtcagcggcagaaacagagtcggcggtatcgccggtattaatctcaacagtggcgctaatataaagaactgctataacacgggcgatataaacgcctcccataccggcgcttcctttgccggagccggaggcattgccggagtgaaccaaacaagcgcaacggtagaatactgctacaacactggcaacgttaccattttaagtacagtcgccggaggcatagtgggacacaacgatagcggaagcaacgtgcgaaactgcgtatcgctcggcgcaagagtaaccggcactgataatatcggtcgtattggtgttaattccggcgttttcaccgacaacaaatctcgtgcggatatgaaaaccggcgcaagcggcgcagagacgacaaaaaccggaacaggagacagtccaaacggagggtctaacaccattggtacggcacagacttcctttttcctcggatgggattccacgatttgggctatcagcggaactatgaccataaacgtcaatctgcccacgctcaaaacaaacacgcaaagccccgcacccacgcttccggcaacgtacactgcgcccggcacggcggacaatcccttcctcgtctccaacgaagccgatctccgcaaggtcggcactgaaaccgccgccggaggctggacgctttcggcgtactacagacagacggcgaacatcacgctgacaacaggcagtttcccgacgattggcacaaacagcaccaactcattcacaggctcgtatgacggggacggaaaaaccattaccggattgagcatgaccggcactgccaataatctgggattattcggctatatcggcgcaggcggcacggtgaaaaacgtgaacgcttccggcacaataacccaaaacggaaccacaaatgccggaggcattgcgggcgcaaacgcaggcacgattgacaactgttcctttagcggaaccatcagcggcggcgcaagctccaatcagttcggcggtattaccggatataatctcgacacgataaaaaacagcagaagcagcgcaacaataaacggcaataattatgtcgggggcattgccggagtgaataacggcactatcgacaacagttacaacaccggagccgttagcggaaaccagtatgtcggcggtatcgccggatcaaataccggaagcggtaattacataaagaactgctataacacgggcaatattaccgccagcgcaacctcaaacacctatgccggaggcattgtcggggctaatcaatcaaacgcactgatagaatactgctacaatatcggcaacgtttccggtccggctagtgtcggcggcatagcgggaaccaacgacactggatgcaccgtgcaaaactgcgtatcgctcggcgcaagaataaccggaacaggcacttccagtataggtatcagtcgtgtgtcaggaacttatggaagcggaagcactctcatcaacaacaaagcccgcgcggatatgaaagtcggtttaagcggcgcagaggcaacagcaacaggcgcgtcaaataacggaaacggcgcagatattactgtaggcagtactacgacacagacctctgttttcagcggttgggatattggcggctggaatacatctacgatttggactctaaatgccactttacttttaagcggtagcgatttacccacgttcaaatcgcctaatcagcaaagccccgcacccacgcttccggcggcgtactctccgctcggctcggcggataatcccttcctcgttaccaacgaaaccgatctccgcaaagtcggcacagaaaccacagccggaggctggacgctttcggcgcactacagacagacggcgagcatcaccatgatgggcggtaacttcctgaggattggctcaagcaccaccccattcaccggcacgtatgacggagacggaaaaaccatcaccggctttacaattaatggcactaatgcttatatggggctttttgctagtatcggcgcaacaggcacagtgaaaaacatgaacgtctcaggcacgataacccaaacaggcggagcgactgcgacgaataccggcggcatagctggcggtaatgacggcacaattgacaactgctcctttagcggaaccgtcaacggtggtacaaccagcgattatatcggcggtattacagggcagaataacggcacggtgaaaaacagcagaagcgccgcaacggtaagcggcagaacttctgtcggcggcattgccggagtgaataacggcacgattgaaaacagctacaacacgggaaacattaccggcacaaatcaagtcggcggtatcgccggagctaattccggcactggcagttttataaagataaggaacagttataacacgggcgatattaccgccactactacctccaccgccaatgccggaggtattatcggaatgaaccaatcaagctcaacggtagaatactgctacaataccggcaatgttaccggatcaactgcagttggcggcatagcaggagcaaatcaaagcggaagcaccttgcaaaactgcgtatcgctcggcgcaagggtaaccggaaccggcagtaccaatcgtgtgattggtattgctaacggcaatatgaacgacaacaaagcccgtacagatatgaaaatcggcgcaagcggcgcagaggcgacagtatcaggaactgcaactaactcaaacggcgcaagtgtaactgtaggtacggcaatgtctacctttttcagcggttgggataccacaacgatttggaatacgggcggcaatctgtccgtaggcgtcaatttgcccacgctcaaaacaaacacgcaaagccccgctcccacgcttccggcgacatactttgtactcggctcggagggaaatcccttcctcgtcgccaccgaagccgatctccgcaaggttggcactgaaaccgcaacaggaggctggacgctttcggcgtactacaaacagacagcgaatatcaccgtaacatcgactaacaactgtccggcgataggaaataactccaacagattcaccggcacgtatgatggggacggaaaatccatcaccggcttgacccaagttaccacgagcagttattcaggtatctttggttatatcggcgatggcggcacggtgaaaaacgttacagttatcaacggcacgataacccaaaacggaagcaacacttcgttcaccggcggcattaccggatataatctaggtacgatagacaactgttcctttagcggaaacgttaacggcaacacaaccaatgatgtaataggcggcattgccggaaggaataacggcacggtgataaacagcagaagcaccgcaacggtaagcggcagaatttgtatcggtggcattgtcggagagaataccggcaagattgaaaacagttacaacacgggaaacgttagcggcacaaatcagataggcggtatcgccggagctctttccggcagtagttcatacataaagaacagctataacacgggcaatgttaccgcaactgacagcacctccaatgtcggcggcattgccgggaattgcacgacaggctcattggtagaatattgctacaataccggaaccgtttccggcgcacaatatgtcggaggcatagttggaaccggcggctcaacagttaccgtgcaatactgcatatcactcagcacaagggtgataaccaccactaacagcacctatgccggacgcataagtggaattcaaggcgtaaccatgaccggcaacaaagcccgttcagatttgctgctcggaccaagcactcaaaccacaccggtaacaacaggcacaggatcaaacaaagacggcgaaaatgtcagtttaggtacgacagtgatgaacgttttcaccagctttgatgcgaatatttggtatatatggaacacacccatgaatacaggcggtgatttgcccacattaaggaagaaagagcaaagccccgcccccaagcttccgtga

SEQ ID NO: 72382 - protein, 2238 aa, Unknown
  Obtained from environmental sample
  DOMAIN (121)...(146): The GLUG motif
  misc_feature (1)..(2238): Xaa is any amino acid
MLTSSFTRIGNNTNKFTGVYDGGEYAITNLSMTIASSYTSLFGYIGASGTVKNVNVTSGTISVSTGSYVSIGGIAGENEGTIDNCSFSGTLSVSPHDQIGGIVGQNNGTVKNSRNFANVTGGNQVGGIAGTNQGKLDNSYSAGTVRGSQQVGGIAGTNVGSGNYIKNSYNTGNVTSTAGTSSNVGGIVGFNQANTAVDFCYNTGNVTGSTAVGGIVGNSSGSRVVDNVSLGLLITGTGSLGRVAGIANGGTMIDRNKSRADMKLGTSGSETTIPSGSTGANNVYGADVALNTSLATVFDTSRWDTTLWNINGNLTIGNELPTLIPNTQHPAPLLPGSNPSPGTAANPFLVTNETDLRKVGTGTDGWTLSVHYKQTQDITLTSNLSVIGTNINKFTGSYDGNEKTISGLTMTRTSVSYFGLFGYIGSDGVVKNVTVTNGSITGTASSYFGGIAGQNEGTIENCSFSGTVNGDTTSDDVGGIVGRNTGTIINSRNTATVSGRTRVGGIAGENQGKIDNSYNTGAITGSQQVGGISGGNSSSGNYIKNCYNTGNVISTTVTTTSNAGGIVGQSSALVEYCYNTGNVSGTGGVGGIVGYTNTGSTVRYCVSLGARVTGGNNTCRVVGVMSGTTTLTNNKARADMKVGVSGSEAIPTINIGANEREGESVSLGAAQNSVFSSFFTTTIWTLGSTLTVGGNLPILQMNTQSPAPTLPGSNPTLGTAANPFLVTNETDLKKVGTGTDGWTLSAHYKQTQNITMTTSNFTPIGNDANRFTGTYDGDGKTISGLNITGTGNNLGLFGVIHSAGTVKNVSASGTVTNTGTGTVMEYVGGIAGANNGSIENCSFSGTVNGGSGNDNIGGITGWNNGTVINSRSSATVSGRTDVGGIAGRNSGTIENSYNTGAVSGRNRVGGIAGINLNSGANIKNCYNTGDINASHTGASFAGAGGIAGVNQTSATVEYCYNTGNVTILSTVAGGIVGHNDSGSNVRNCVSLGARVTGTDNIGRIGVNSGVFTDNKSRADMKTGASGAETTKTGTGDSPNGGSNTIGTAQTSFFLGWDSTIWAISGTMTINVNLPTLKTNTQSPAPTLPATYTAPGTADNPFLVSNEADLRKVGTETAAGGWTLSAYYRQTANITLTTGSFPTIGTNSTNSFTGSYDGDGKTITGLSMTGTANNLGLFGYIGAGGTVKNVNASGTITQNGTTNAGGIAGANAGTIDNCSFSGTISGGASSNQFGGITGYNLDTIKNSRSSATINGNNYVGGIAGVNNGTIDNSYNTGAVSGNQYVGGIAGSNTGSGNYIKNCYNTGNITASATSNTYAGGIVGANQSNALIEYCYNIGNVSGPASVGGIAGTNDTGCTVQNCVSLGARITGTGTSSIGISRVSGTYGSGSTLINNKARADMKVGLSGAEATATGASNNGNGADITVGSTTTQTSVFSGWDIGGWNTSTIWTLNATLLLSGSDLPTFKSPNQQSPAPTLPAAYSPLGSADNPFLVTNETDLRKVGTETTAGGWTLSAHYRQTASITMMGGNFLRIGSSTTPFTGTYDGDGKTITGFTINGTNAYMGLFASIGATGTVKNMNVSGTITQTGGATATNTGGIAGGNDGTIDNCSFSGTVNGGTTSDYIGGITGQNNGTVKNSRSAATVSGRTSVGGIAGVNNGTIENSYNTGNITGTNQVGGIAGANSGTGSFIKIRNSYNTGDITATTTSTANAGGIIGMNQSSSTVEYCYNTGNVTGSTAVGGIAGANQSGSTLQNCVSLGARVTGTGSTNRVIGIANGNMNDNKARTDMKIGASGAEATVSGTATNSNGASVTVGTAMSTFFSGWDTTTIWNTGGNLSVGVNLPTLKTNTQSPAPTLPATYFVLGSEGNPFLVATEADLRKVGTETATGGWTLSAYYKQTANITVTSTNNCPAIGNNSNRFTGTYDGDGKSITGLTQVTTSSYSGIFGYIGDGGTVKNVTVINGTITQNGSNTSFTGGITGYNLGTIDNCSFSGNVNGNTTNDVIGGIAGRNNGTVINSRSTATVSGRICIGGIVGENTGKIENSYNTGNVSGTNQIGGIAGALSGSSSYIKNSYNTGNVTATDSTSNVGGIAGNCTTGSLVEYCYNTGTVSGAQYVGGIVGTGGSTVTVQYCISLSTRVITTTNSTYAGRISGIQGVTMTGNKARSDLLLGPSTQTTPVTTGTGSNKDGENVSLGTTVMNVFTSFDANIWYIWNTPMNTGGDLPTLRKKEQSPAPKLP

SEQ ID NO: 72383 - DNA, 2376 bp, Unknown
  Obtained from environmental sample
  misc_feature (1)..(2376): n is a, c, g, or t
atggaggaaacaaaattggttaaaaattttaccacgaaccacactaacaacacgaataaagagaaaagcatgaatatcaaaaccttatccttaaccgcgttatacttgttattcgctgtattatttttggcaattgccggatgcagccagcctttctttcccgatcccttttatgtacgggtagcgtctattgaaggcgtaccggaaacaggcgcggctggtacgcctcttacacttacgggaataatcagacccgcttttgcgagtaacgttgatattatttggtctgtcaaagacgcgggaactaccggagctgttataagaggaaatatcttaaacaccaacgctgatgggagggttgttataacggcaagaattccaaacggcaaagcggaaggaaaggattatactcaggattttattattgttatcggtacgggtattcctcctattataaaagaagaccaagaatatactatcgaaattcttatgctcgacaatgtaacaggcgacacggtaacagcctccccaaacaaaggtatcgcaggcactacggttacgcttatctatacagtcgcgaacgtggcgcataacaaccaactggacttcggaggcgttaacgccgcaatcgcttctgtagccagctacggaacaggcacaagaacctataccataaacgccgccgactcctcgaacagtgttatcacaattaccgctgtctttactcataccgatttggaaattgaccatatcgcttttagcgagcatgacggcggacatataaccaagaatgacggcgacccgccgtttaccaacgccattaccggcgcgcacaaaggaaccggcgcaataacctatcacagcagtgatgaaagcgtcgccacagtggacagtgccggaacggtaaccattcatgcagtcggttccaccgtcatttccgcagagaaagcggctgacgataaatacgcccacgctataacaacttacactctgacggttaattacaagcccggttcggaagaaaatcccttcctcgtcgccaacgaagccgatctccgcaaggtcggaacaggcacagacggctggacgctttcggcgcactacaggcagatagcggacatcgccatgacgggcggcggctttacgacgattggcgataacaccaacagattcataggcgtgtatgacggggacgggtatgccatcaccggcttgaccgtaaccgccacgacctataatcaaggtttattcggcgttatcggcgcagacggcacggtgaaaaacgtgaaccttagcggcacgataacccaaagcggagacaataatggtgtgggaaccggcggcattgcgggcttaaactatggcacggttgacaactgcgtctttagcggaaccgtcagcggattaaccagtaatcaggttggcggcattgtcggaagtaatcaaagcacgggcacggtaaaaaacagcggaaacaacgcagtggtaaacggcagaaataataccggcggtgttgtggggctgaatcaaggcggcactatcgaaaactgttacaacaccggagacgttatcggcatcagtacggtcggcggtattaccaataacagcagcggcggcacggtgataaacagcagaaacaccgcaacggtaaccggcaatactaatgtcggcggcattgcgggaataaatcaggcgaagattgacaactgttacaacacgggagccattaacgccgccgaacaagccggcggtatagcagggggtaataccggaagcggtgtttatataaagaactcttataacacgggcaatgttaccagctccgatagctccaccagcgccggaggcattgccgcagtgaaccaatcaggcgcaacggtagaattctgctacaataccggcaacgttaccagcggcagaattgccggcggcattgtgggaagcagttcaagcggaactactgtgcaaaactgcgtatcgctcggtgcaagggtaaccggcggctatagcacaggtcgtgtggttgcaagtattggcggcactttcgccaacaacaaagcccgaatggatatgaaaatcggcgcaagcggagcagaggcaataccaaccacaagcatagcggcaaacggaggcaacggcgcagatgtctctgtttcgggaatgataccgcagttcggcgttttcgccggctgggattcctcgctttggaatatcagcggcgatttgacaataggcgacaatcttcccacgctcaaaccgaatacgcaaatccccgctcccacgcttccgggcggcgtactctgcgcccggcacggcggaaaatcccttcctcgttaccaacgaagccgatctccgcaaggtcggaaccggcactga

SEQ ID NO: 72384 - protein, 791 aa, Unknown
  Obtained from environmental sample
  DOMAIN (552)...(577): The GLUG motif
  misc_feature (1)..(791): Xaa is any amino acid
MEETKLVKNFTTNHTNNTNKEKSMNIKTLSLTALYLLFAVLFLAIAGCSQPFFPDPFYVRVASIEGVPETGAAGTPLTLTGIIRPAFASNVDIIWSVKDAGTTGAVIRGNILNTNADGRVVITARIPNGKAEGKDYTQDFIIVIGTGIPPIIKEDQEYTIEILMLDNVTGDTVTASPNKGIAGTTVTLIYTVANVAHNNQLDFGGVNAAIASVASYGTGTRTYTINAADSSNSVITITAVFTHTDLEIDHIAFSEHDGGHITKNDGDPPFTNAITGAHKGTGAITYHSSDESVATVDSAGTVTIHAVGSTVISAEKAADDKYAHAITTYTLTVNYKPGSEENPFLVANEADLRKVGTGTDGWTLSAHYRQIADIAMTGGGFTTIGDNTNRFIGVYDGDGYAITGLTVTATTYNQGLFGVIGADGTVKNVNLSGTITQSGDNNGVGTGGIAGLNYGTVDNCVFSGTVSGLTSNQVGGIVGSNQSTGTVKNSGNNAVVNGRNNTGGVVGLNQGGTIENCYNTGDVIGISTVGGITNNSSGGTVINSRNTATVTGNTNVGGIAGINQAKIDNCYNTGAINAAEQAGGIAGGNTGSGVYIKNSYNTGNVTSSDSSTSAGGIAAVNQSGATVEFCYNTGNVTSGRIAGGIVGSSSSGTTVQNCVSLGARVTGGYSTGRVVASIGGTFANNKARMDMKIGASGAEAIPTTSIAANGGNGADVSVSGMIPQFGVFAGWDSSLWNISGDLTIGDNLPTLKPNTQIPAPTLPGGVLCARHGGKSLPRYQRSRSPQGRNRH

SEQ ID NO: 72385 - DNA, 1266 bp, Unknown
  Obtained from environmental sample
  misc_feature (1)..(1266): n is a, c, g, or t
atggcggaaaaaacgaccgattacaagtctatcatcggcttgaataccgagttcaacaagattcaggacctcgatctgcttttggagcgcatcctctttcaggcgcgccgcgtggtcagggcggacgccggttccatttacgtcaaagataagatctacgatggcgacaaaccgatggacgtgctcatcataaagtacgcccagaacgacaccctgaccaaagccgtcccccacgggcaaaagatgaactactcggtattcgcgaggcctgtctccttgccgataaacgagaagtcgctcgccggctactgcgcgctcacccgcgacatcgtcaacgttccggatatgtaccacatccccaaagaggcgtcgtactccttcaactccgccatagacaagcagagcggctacaagacggtatcgtcgctcacctttccgctgatctcgaccgacgggctgctgctcggcgtcatacaggtgctcaacgccatggacgacgagcggaacatcgttccattctccaccgaggacgagtttttgatcacgcacttcgccacgaacgccaccatcgcgctgcaacgcgccatagaaaatcgggctatgatcctgcgcatgatgaagatgtccgaactgcgcgacccaagggagaccggcgcccacgtgaaccgcgtcgccggctacgcgctcgacatatacgaccgctgggcgtctaaacgccagataccggccaccgagcgggagcgcttccgcgacatactgcggataggcgccatgctccacgacgtgggcaaggtcgccatctccgacaccatactcaagaagccggcgcggctgaccccggaggagttcgcggtaatgcaggggcacacgctctacggcgccgccctattcgacgacccgcactcgcccaccgactttctggccggcgagatagccctcacccaccacgaaaactgggacggcaccggctaccccggctgggtggaccccgcgacaaacgccgtcgttaaagccgacgaaaacggcaggcccatgggcaggaggggcgaggagatcccgctggccggaaggatagtggctatcgcggacgtctacgacgcgctctgctcgaagcgggtatacaaagaaccgtggggcgaaaaagagacgcttgacgaaatgcgcagattgtccggaaccaagtttgatccggaactcatagatatcttctttgaagtgctgcccaacattaaacagacgcagaagcagtttacggaatcggagtaa

SEQ ID NO: 72386 - protein, 421 aa, Unknown
  Obtained from environmental sample
  DOMAIN (23)...(192): GAF domain
  misc_feature (1)..(421): Xaa is any amino acid
MAEKTTDYKSIIGLNTEFNKIQDLDLLLERILFQARRVVRADAGSIYVKDKIYDGDKPMDVLIIKYAQNDTLTKAVPHGQKMNYSVFARPVSLPINEKSLAGYCALTRDIVNVPDMYHIPKEASYSFNSAIDKQSGYKTVSSLTFPLISTDGLLLGVIQVLNAMDDERNIVPFSTEDEFLITHFATNATIALQRAIENRAMILRMMKMSELRDPRETGAHVNRVAGYALDIYDRWASKRQIPATERERFRDILRIGAMLHDVGKVAISDTILKKPARLTPEEFAVMQGHTLYGAALFDDPHSPTDFLAGEIALTHHENWDGTGYPGWVDPATNAVVKADENGRPMGRRGEEIPLAGRIVAIADVYDALCSKRVYKEPWGEKETLDEMRRLSGTKFDPELIDIFFEVLPNIKQTQKQFTESE

SEQ ID NO: 72387 - DNA, 1017 bp, Unknown
  Obtained from environmental sample
  misc_feature (1)..(1017): n is a, c, g, or t
ttgaagtgctgcccaacattaaacagacgcagaagcagtttacggaatcggagtaaacggtctaactcgctgacctccgcaacggggcggagattctctttttcggggcgcggcgctatgaacgcaaaaaaatacacacacgtacctgccgccgcgtcaatcctaatcataacgctgacactattaatcgcccctacgaccgccgccgcgacaaacgacgacgaggacttcaaatggcaggagacctcaaacgaactcgacgccctgcccttctcgcaagcatacatcgactccgtaagaaaagccgtcgtcggcgcgccgtcgaaacaaagcggcctgcgcaacgtggaatcgggacgcttcgctaacggcgagaccttagtcttcgaggtcggctggagcgtcttcaaggccggctacctaatactctccacagcgcatatacgcagccgcggcctcatccgcgtaagcgcaaagaccatgaccggcaacgccgtgagcaaaatatacaaggtacgaaaccacgaaatatcatggatcgacgccgacggcctctaccccgtcttcttcgaacaacacgcccgcgaaggcaagaaatataaagccgacaactacataatctacgacaacatcgccgataaactcttcttcaaaagaaagaatttgcaagaattcgaaacaccgaagttcacacacgactacatatccataatacactacgtacgctcgatgccgctaaaaccgggcgacacgtttgaggcgttcatattctcaaaacccaaaacataccctatgaagttcaaggcacacgagaaaaaagaaaccgtacaagtcggcgaaaaaagctacaactgcataaagatcgagccggctctggttggggaagggcgcgtgtttacaaaaaaggataagatggaggtgtgggtcacggacgatgaaaatcattatccggtggcgctcaaatctaaggctaagatcgggtcgcttaacgctaagttggttcagattattaagtag

SEQ ID NO: 72388 - protein, 338 aa, Unknown
  Obtained from environmental sample
  misc_feature (1)..(338): Xaa is any amino acid
MKCCPTLNRRRSSLRNRSKRSNSLTSATGRRFSFSGRGAMNAKKYTHVPAAASILIITLTLLIAPTTAAATNDDEDFKWQETSNELDALPFSQAYIDSVRKAVVGAPSKQSGLRNVESGRFANGETLVFEVGWSVFKAGYLILSTAHIRSRGLIRVSAKTMTGNAVSKIYKVRNHEISWIDADGLYPVFFEQHAREGKKYKADNYIIYDNIADKLFFKRKNLQEFETPKFTHDYISIIHYVRSMPLKPGDTFEAFIFSKPKTYPMKFKAHEKKETVQVGEKSYNCIKIEPALVGEGRVFTKKDKMEVWVTDDENHYPVALKSKAKIGSLNAKLVQIIK

SEQ ID NO: 72389 - DNA, 381 bp, Unknown
  Obtained from environmental sample
  misc_feature (1)..(381): n is a, c, g, or t
ttgagcggctttgttgatttgattcattggaataatataatttatttcaataaggagggttccatgaaaaattacgtacttgcctacatcaccgccaaagacaaatcccaagcgttatcaataggccgcgccttggttgaggaacgtttggccgcgtgtgtcaatgttattgataacatgacctcaatctaccgctgggagggcgagatcaacgaagacagtgaagcggtattgatagccaagacatcggccgaaaatttcaatgcgctcacagaacgcgtcaaacaactccatacatacacctgcccgtgcgtcatatcaataccgataaccggcggtaataaagagtacctaaattggttaagcatggagttgaattaa

SEQ ID NO: 72390 - protein, 126 aa, Unknown
  Obtained from environmental sample
  DOMAIN (25)...(126): CutA1 divalent ion tolerance protein
  misc_feature (1)..(126): Xaa is any amino acid
MSGFVDLIHWNNIIYFNKEGSMKNYVLAYITAKDKSQALSIGRALVEERLAACVNVIDNMTSIYRWEGEINEDSEAVLIAKTSAENFNALTERVKQLHTYTCPCVISIPITGGNKEYLNWLSMELN

SEQ ID NO: 72391 - DNA, 3864 bp, Unknown
  Obtained from environmental sample
  misc_feature (1)..(3864): n is a, c, g, or t
ttgggatttgtctttggcggtgatgtaggcaagtacgtaatttttcatggaaccctccttattgaaataaattatattattccaatgaatcaaatcaacaaagccgctcaaaatctacccatatacgaaaaacgggttgaaatcataaacgctcttaggagtcaccaggttattgtcgtggccgggcagaccggatccggcaaaaccactcagcttccgtttttctgcttggacgccggacgcggacgcaagggacggatcggatgcactcagcctcgacgcatcgcggctacgtctatcgcggcgcgtgtggcggcgcagttcgggtgccggatcggcgggcgggtcgggtataaaatacgctttgcggccaaggagtcggcggatacggttatcaagtttatgaccgacgggatcctcctcgccgaggccgaacacgatcgattcttttcgcagtacgataccataatcatcgacgaggcgcacgaacgcagcctcaatatcgactttctgctcggatacttacggaagatactccgcaaacggcccgacctgaagatcataatctcatcggctaccatcgacgccgagagcttctcggcttgcttcaacaacgctccgataatcgaggtgtcgggacgcctcttccccatcgaggtgctgtaccgaaattctgagaacgaggagggcgacgacgcggccgggtcggggtacgtggaaaacgccgtcgccgccgccgtagacctgcttgactgctacgggcccggcgatatgctcgtctttatgccgacggaacgcgacatccgcgaaacgtgcgagaaactgggcggagcgctcattcggcgcgacgtgcagatactgccgctcttttcgcggctgacaagggcggatcaggaggcgatattcaatccctccgacaggattcgcgtcatagtttgcacaaacatcgccgagacctccgtaaccgttccgaatatcagctacgtggtggacacggggctcgcccgtatatcgcggtacgcgccgaggctgcgtaccaaccgcctgcccatagaaccgataagccgcgccagcgccgaccagcgaaaggggcgctgcggacgcgtgcaggacggcgtctgcatacgcctgtattcggaagaggactacaactctcgcgacgctttcacgctgccggagataaaacgctccaacctcgccggagtcatactcacaatggcggcgcataaactgggggcgattgaggattttccgttcatcgccccgccgtcgaaacaggcgatatccgagggctacgcgcagcttaaagagctcggggcgattgacaatgaaaagaagctcacgagaatgggcgccgagatggcaatgctgcctttcgacccgcacatatcgcggatgattatcgccgcccgtagggagaacgcgctacgcgaggtgaagatcatcgccgcggcgctctccatcgtagacccgcgtgaaagaccgctggaaaagcaggtggaagcggacgcggcgcatgtcaaattcgttgacaaaggctccgactttctgacatacgtgaacctctgggacgcctataggaacgagtgggacacgctcaagacgcagggcggtttgcggcgcttttgcaaggggcacttcctctcgtttacacggatgcgagagtggcacgacgtctatatgcaattagacgagacgctctcacggatgaagggctacgaacagaacccgacgcccgcctcctacgacgcggtacacaggtcgctgttgacggggcttttagccaactgcgcctaccttgacaaaaacggaaaatacaaggccgccggagggaaagaggtgctgatattccccggttcggcgctggccaggaagaaatgcgattgggtggtatgccacgagatagtggaaacaagccgcgtattcgccagaacggtcgcggcaatcaaaccggagtggctggaggagctggccgccgatttttgcaagcggacattcgagaccccgttcttcgacgccgagagcgggtgcgtaagagcggtggaacgcgtcacgctcttcggacttccgctcgccgtcaaaaataactccctatatagcaaagcggaaccggaggcggccgcggaaatatttatccgagacggattggtcgaagagaatctggtatgccgccacaaattttacgagcacaacaagaaactgaaacaaaaaatcctctcatacgaggcgaagctgaggtcaaggaattattacaagggcgacaaggcgattatcgatttttacgagaaacgtttgccgagcgtggcatccgtacacgaattaaataaggcgataagaaccgccggaaacgataaattcctatatatgcgcgaagaggacatcatagaggaatcaatcccgaaagaggcccacgcttacccagaccacgtgaatatcggcaatcagaatttcgcgctaaaatacgcgttcaaccccggcgccgaagacgacggggtgacgctggcgctaccgcaaaaggtattgccgttcatcgcgaaggagacaatcgggtggttactgccggcgctgtggcccgctcagataaaaagcctgttgcaacaactgccgcgcagccggcgaaaagtattcgtaccgctcggcgaagccgcccaaaaacttgccgacaacataacggcgcagccggcgacgcacgaatcgttcgcggcggaattgtcagcggctatcaaaaaaatttacggcattgatatcgatccgacactgttagattccgacaaaaccgacccgcacctagacctgaagatcgaggtgcgcgacgagaaaaacagcatagtcgccaaaggcaggagcggcgacctgttcagacgaatgaacgatacggaaccggcggaaggtacggacgttgatacggatataacaagcgcatcaattaatacggcgacaggctccccctgggacggcgccttcgcgtcctaccgaaaatcgggtctcgcatcatggccggaagaagacctgaacaaaccgctcgacataggctcaaacaaaggcggtttcgccgtacgcggatacccggcgctggtaccgagcggcgcggttattaccggatcgcttcgctacgctcgcaatgacggtcattgcgaggagcgaagcgacgaagcaatccagaattttgaccttacaaatcacgacaactgcgttgatttggttctcttcccgtcaaaaacaaaaagcgatatcgcccaccgctacggggttcgcaaactgctggagataacgctgatgaaagacttggcctggaccgaacgcgatatatccttctccaaagaggtaaaggtgatgtgcgccccgttcgcgtccggcgacgaattctcggcgagattatacgatatgatctgcgattcaatactggatttcgacgaggcgccgaggagcaaagagggattcgatgagctggccggaaaggttaaagaatcattacgcgggataagcttccgcgtcctctccgtatttgaggaatcactgagaatatttacggacgacaccgcccgcctgtcgtcgtcaaagaagaaaataccgcccgatattcacaaggagctgacaaccgggctaaacggattcttcaacgatatcttggacgggcaaacgacgcttgaaatctttttcctatacccgcgctacctgaaggtcttcgcgacgatcatagaaaaagcctccttcgaaccgttcaagtaccgccaaaagcgggccgaggtcaaccaatatgcatcgatatataacgatttacaagagaaaagcgccaaaccggaaaacgcccatcaccataagcggctgtttgagagatttggcgcttacgatacgggagtttga

SEQ ID NO: 72392 - protein, 1287 aa, Unknown
  Obtained from environmental sample
  DOMAIN (42)...(199): DEAD/DEAH box helicase
  misc_feature (1)..(1287): Xaa is any amino acid
MGFVFGGDVGKYVIFHGTLLIEINYIIPMNQINKAAQNLPIYEKRVEIINALRSHQVIVVAGQTGSGKTTQLPFFCLDAGRGRKGRIGCTQPRRIAATSIAARVAAQFGCRIGGRVGYKIRFAAKESADTVIKFMTDGILLAEAEHDRFFSQYDTIIIDEAHERSLNIDFLLGYLRKILRKRPDLKIIISSATIDAESFSACFNNAPIIEVSGRLFPIEVLYRNSENEEGDDAAGSGYVENAVAAAVDLLDCYGPGDMLVFMPTERDIRETCEKLGGALIRRDVQILPLFSRLTRADQEAIFNPSDRIRVIVCTNIAETSVTVPNISYVVDTGLARISRYAPRLRTNRLPIEPISRASADQRKGRCGRVQDGVCIRLYSEEDYNSRDAFTLPEIKRSNLAGVILTMAAHKLGAIEDFPFIAPPSKQAISEGYAQLKELGAIDNEKKLTRMGAEMAMLPFDPHISRMIIAARRENALREVKIIAAALSIVDPRERPLEKQVEADAAHVKFVDKGSDFLTYVNLWDAYRNEWDTLKTQGGLRRFCKGHFLSFTRMREWHDVYMQLDETLSRMKGYEQNPTPASYDAVHRSLLTGLLANCAYLDKNGKYKAAGGKEVLIFPGSALARKKCDWVVCHEIVETSRVFARTVAAIKPEWLEELAADFCKRTFETPFFDAESGCVRAVERVTLFGLPLAVKNNSLYSKAEPEAAAEIFIRDGLVEENLVCRHKFYEHNKKLKQKILSYEAKLRSRNYYKGDKAIIDFYEKRLPSVASVHELNKAIRTAGNDKFLYMREEDIIEESIPKEAHAYPDHVNIGNQNFALKYAFNPGAEDDGVTLALPQKVLPFIAKETIGWLLPALWPAQIKSLLQQLPRSRRKVFVPLGEAAQKLADNITAQPATHESFAAELSAAIKKIYGIDIDPTLLDSDKTDPHLDLKIEVRDEKNSIVAKGRSGDLFRRMNDTEPAEGTDVDTDITSASINTATGSPWDGAFASYRKSGLASWPEEDLNKPLDIGSNKGGFAVRGYPALVPSGAVITGSLRYARNDGHCEERSDEAIQNFDLTNHDNCVDLVLFPSKTKSDIAHRYGVRKLLEITLMKDLAWTERDISFSKEVKVMCAPFASGDEFSARLYDMICDSILDFDEAPRSKEGFDELAGKVKESLRGISFRVLSVFEESLRIFTDDTARLSSSKKKIPPDIHKELTTGLNGFFNDILDGQTTLEIFFLYPRYLKVFATIIEKASFEPFKYRQKRAEVNQYASIYNDLQEKSAKPENAHHHKRLFERFGAYDTGV

SEQ ID NO: 72393 - DNA, 624 bp, Unknown
  Obtained from environmental sample
  misc_feature (1)..(624): n is a, c, g, or t
atgaacaaaaaaatcgcgataattgactacaaggccgggaacgctccaagtgtgatgcatgctgtggagcgtttggggcatgaggcggcttttgcccggggggcgggggatatcgagggggcctcgcatattattctgccgggggtcgggagcgcgggggctactatgtcttctctgcgggagatggggttgattccggcgctggaagaggccgtcttacgcgggaggaaggcgctctttttggggatatgcgtggggctgcaggtgctctttgagcatagcgacgaggacgatgtggattgcctggggtggctgggcgggagggtcgtcaagtttgacgcctctaaggtcagggttccgcagatggggtggaatcaagtgaagtttacgcggcgggcggatatagatacgccggaacagggggattatttttactttgtcaactcttatcacgcaaagcccaaagatgaatccgtcttgtggggggtagcggagtatgagggggcgttcacggcggcggttcataaggataatatatacgccacgcagtttcacgcggagaagagcggtgaggcggggctggcgctattggggggatttttgcgtaggggtatatcatgctga

SEQ ID NO: 72394 - protein, 207 aa, Unknown
  Obtained from environmental sample
  DOMAIN (34)...(193): CobB/CobQ-like glutamine amidotransferase domain
  misc_feature (1)..(207): Xaa is any amino acid
MNKKIAIIDYKAGNAPSVMHAVERLGHEAAFARGAGDIEGASHIILPGVGSAGATMSSLREMGLIPALEEAVLRGRKALFLGICVGLQVLFEHSDEDDVDCLGWLGGRVVKFDASKVRVPQMGWNQVKFTRRADIDTPEQGDYFYFVNSYHAKPKDESVLWGVAEYEGAFTAAVHKDNIYATQFHAEKSGEAGLALLGGFLRRGISC

SEQ ID NO: 72395 - DNA, 789 bp, Unknown
  Obtained from environmental sample
  misc_feature (1)..(789): n is a, c, g, or t
atgctgacaaaacggttgatagcctgcttcgacattgtcgacggcatggtgactaaggcggtgcggtttcaggataacatccgcgtcgctccggcggtagaactggcggggaccatgtatgaggagcagattgacgaactgatattttatgacatcacggccagcgccgagaagcgcggtatcgatatcaagagcgtgaaggaggtcgcggggcgcgtgttcataccgtttaccgtgggcggcgggctcaagagcttggacgatatgtacgaggcgctcaaggcgggcgccgagaaggtcagcgtggactctatggcggtgcggaatccgcagatcatagcggaaggggcaaaggccttcggctcgcagtgcgtggtgctctccacgcangtaaagaggacggcggggatgcccagcggctacgaggtgtacatagacggcgcgcggacggcgaccggcatggacgccatagagtggataaaacgcggccaagacctaggcgccggagaagtctgcctaaacagcatagacaacgacggcacgctgggcggctacgacatagaactaatgaaactggccggctccgccgtatcgctcccactgatagcctcaggcggggccggaaaaccggaacacctaaaaaccgtcttcacagaaacggaaacccaagccgccataataagctcaatgctctactcgcccagaatggagagaaactatccggtcagggaactcaaagagtatctggcggaaaacggggtgaacgtcagacctattcgggaagggtga

SEQ ID NO: 72396 - protein, 262 aa, Unknown
  Obtained from environmental sample
  DOMAIN (5)...(237): Histidine biosynthesis protein
  misc_feature (1)..(262): Xaa is any amino acid
MLTKRLIACFDIVDGMVTKAVRFQDNIRVAPAVELAGTMYEEQIDELIFYDITASAEKRGIDIKSVKEVAGRVFIPFTVGGGLKSLDDMYEALKAGAEKVSVDSMAVRNPQIIAEGAKAFGSQCVVLSTXVKRTAGMPSGYEVYIDGARTATGMDAIEWIKRGQDLGAGEVCLNSIDNDGTLGGYDIELMKLAGSAVSLPLIASGGAGKPEHLKTVFTETETQAAIISSMLYSPRMERNYPVRELKEYLAENGVNVRPIREG

SEQ ID NO: 72397 - DNA, 426 bp, Unknown
  Obtained from environmental sample
  misc_feature (1)..(426): n is a, c, g, or t
atgataacgaccagtccaactgcgataaagtacggcaggttatacgattggagtacggcgatgaagatttgtttgagcggttggcatttgccgtcacgtgctgagtggggtgctttggctatcgcagccggtggtaccggtacgtatggttctagcggtactgcggcggtgaagttgaaatcgaagagtggttggaacaataacggcaatggaacggatgattttgagttttcggcgttgcccggcggcgtctgctactccgatggcagtttctcctctggcaactacggcggctggtgggcggctacggaatacactagtgatctcgcctaccgccgggacatgagttccagtaaagaccacgtcgaggagaactactacaccaagaggggttacgggtattctgttcgttgtgttgaggactaa

SEQ ID NO: 72398 - protein, 141 aa, Unknown
  Obtained from environmental sample
  misc_feature (1)..(141): Xaa is any amino acid
MITTSPTAIKYGRLYDWSTAMKICLSGWHLPSRAEWGALAIAAGGTGTYGSSGTAAVKLKSKSGWNNNGNGTDDFEFSALPGGVCYSDGSFSSGNYGGWWAATEYTSDLAYRRDMSSSKDHVEENYYTKRGYGYSVRCVED

SEQ ID NO: 72399 - DNA, 576 bp, Unknown
  Obtained from environmental sample
  misc_feature (1)..(576): n is a, c, g, or t
atggaaagaaccggttataaatttggcgggtggaatacaaacagttccggcacaggaactaactactccgttaatttatcttacactgttaacggtaatgttaccctttatgcgaaatggacggctataacttacacggtgacagtttcaagcatcgggacaaatcattccggcacaggtgattacgcggctggcgctgaggttaacataaaggcgggaacgccgttggatggtcagcagttcaaaaattggacgtcttcaagctacggggtgacatttgctgacgctaatagtgcggcgaccacgttcacgatgcctacgaacgttgtgacggtgacggcgatctttgaggcgactaaaaatatgttcaccgatgctagggacggtaaaaagtatatgtatgtaaagataggtcgtcagaggtggatggcggaaaatcctaagtatcaaacatcaagcggatcttggtgttatgataacgaccagtccaactgcgataaagtacggcaggttatacgattggagtacggcgatgaagatttgtttgagcggttggcatttgccgtcacgtgctga

SEQ ID NO: 72400 - protein, 191 aa, Unknown
  Obtained from environmental sample
  misc_feature (1)..(191): Xaa is any amino acid
MERTGYKFGGWNTNSSGTGTNYSVNLSYTVNGNVTLYAKWTAITYTVTVSSIGTNHSGTGDYAAGAEVNIKAGTPLDGQQFKNWTSSSYGVTFADANSAATTFTMPTNVVTVTAIFEATKNMFTDARDGKKYMYVKIGRQRWMAENPKYQTSSGSWCYDNDQSNCDKVRQVIRLEYGDEDLFERLAFAVTC

SEQ ID NO: 72401 - DNA, 357 bp, Unknown
  Obtained from environmental sample
  misc_feature (1)..(357): n is a, c, g, or t
ttgagaagaaataggcgttttggctttcatattgccgaaaatcaaactagggatactaacaaaaacaacgagaatgctttgtgggtaaacgggaaattaacccccctgccgccggtgcggattacggcgaccgaagggattggcgctaattggatcattcaggatgttgagggcatggttgatttgacgtttactcctaaggaaccggataatagcggcgtaaaattgatgtttacaagagccgattttaacgtttttttgggcttttataacgggatgttagtcaactccgaaggggaaaaaattactattaaaaacctttttggagttggagaaaaactttatttacgggtgtga

SEQ ID NO: 72402 - protein, 118 aa, Unknown
  Obtained from environmental sample
  misc_feature (1)..(118): Xaa is any amino acid
MRRNRRFGFHIAENQTRDTNKNNENALWVNGKLTPLPPVRITATEGIGANWIIQDVEGMVDLTFTPKEPDNSGVKLMFTRADFNVFLGFYNGMLVNSEGEKITIKNLFGVGEKLYLRV

SEQ ID NO: 72403 - DNA, 2961 bp, Unknown
  Obtained from environmental sample
  misc_feature (1)..(2961): n is a, c, g, or t
atgagcggaacagcgttgaaaaaaggtcaaagattagacagcggttttgtaattcttgacatagttgatcttgaagaacttaaagctcagggcatttgggctaaacatgaaaaaacaggcgtagaagtttttcatgtgttaaacgatgatatagaaaacttgttttctttttctttcgccacctttcccgaagacaacacaggcgtggcgcatattttggaacattccgtactttgcggctccgagcgttatccgctaaaggacgcgtttatcgttcttgcgcagggaagcctgcaaacatttttaaacgcgattactttccccgacaaaacagtttatcccgcaagctcgacaaacgagcatgactatttcaatcttatgtcggtatacggcgaatcggttttccgtcctctgcttcccgaatggacattcatgcaggaaggacacagaatggagtaccagaacggaaaactttccatcaccggcgtcgtctacaacgaaatgaaaggcgcttattcatcgcttgatacttacgcgggtcattggtctgttaaagcgattatgccgaacactccctacgattttgaatcgggcggcgacccgcaggcaattccgcaattaacatgggacggtttaaaagaatttcatcgcagccgttattcacccgctaactgtaaaatttttcttgcgggcaatattcccacggaaaagcagcttgcgtttttaaacgatgaatttttttccgaattggaaggcggtaaggcttgcgaccccatcgtaaaaacacaacgttggaaagagccgaaaaaattccatgtgccctgcccctccggaaacgaacgtaaatcgacaatttttctttcatggctttgttccgatgttaccgatatttacgaaggtcttgcgctggcggcgcttactgaaattcttttgggacacgacggctctccgcttacaagagcgttaattgagtccggtcttggagaggatattactcccgtctctggactggagagcgagatacgggaagttttatttgtagcgggattaaggggcgttaagggaaatataaaacaaaaaagcgaagcgatagaaaaattgataatgggagaactgcgcaggcttgcgaccgaaggtattccgccggaagaaatagaagccgctcttttggcgctcgaattttcccaacgtgaaattcgccgttcagggggaccgttctctcttgtttggatgcgccgctctttacgcgcgtggcttcatggctgtaaaccgtgggaaggacttttaatttcctgtcagatcgcaaaaattaaagaaaatctttcgcgcgataaaaaatattttgaatcattaatcaaaaaatattatcttgataacccgcaccgcgcccttgttattcttgaaccaaaagataacttcatgttaaatcaggagaaagagcttttaaaagaattaaaaaacactcaaaaaaagttaagcaaagaagaacaacagcaaattattgataaatccaaaaagttggaaaaaatacaaagcgaggcggacagtcctgcggcgcttgcggcaatccctcatctttcgcgtaacgatcttgccgtttacgaagatattattccgcgccgtcaggaagatttaaaaggcgttcccgctctgtgccacgagctttacacaaacggcattacatatctggattttgctttccccgtagatgttttccctcccgaagattattcatggctgccgtttttctccagagcgattacttccgtagggcttcccggcatggactacggagaagtgtcgagtttgcttgcccgcacagtcggcggctttaacgcggttcttcacaccgcatcggctgtaaaaaatacccccccttttctgcaaaccgcttcggggagtttcgatttgtcggggcgcgattggctgttcctgcggttaaaatgccttgatgaaaaaatagcgccttccgttgatattgccatgcgtgtgatttgcgacgctgatttttcagaccgcaggagaataaacgatcttgttttggaaatgaaaaatgaaattgactccagtcttgcgccgatggggcatatttattcttcaagcagaacatgccgatttaattcgcgttcaaaaagcgtggaagaaaaatactcaggtatctcgcagattgaatttgttaatcagcttgcaaagtatgatattggggaaataatcaaaaaactgcaatacattcgggaaaaaattgttaaggcgggattgattgtaaacattacgggaaccgccgttaattccgccgttgcggaaacagcgcaaagattcagccgctttggcgcgcctgtgcctcggctttctgcggagataagcggcaaaacacccgcgcctgaagtttttgcttcgcgctccttgcaagtgggctttgcggcattaacgttaaatgccgcgccttatgacacattggaacaaaccgcagaaattgttttgtctcatcagttgagtaccggggcgttatgggaagttatccgcatgaagggcggcgcttacggagcgttcatcaacagcaacagccttgataactgcctgactttcgccacttaccgcgatccaaatcctctgcgctcgttagatgttatatcatcaatttttaaagacaactcttacggaaaatgtacggaagactatcttgtaaaatcaataatcggctgttactcgaaagaaacgcgcccgcaaaccgccgctgaaaaaggattaatcgactttaacagattcctttacggtattgatgaaagttaccgcaaaaaaaggcttgaacggttaatctccctttcaacctccgacattgaagcgatttttaattctttcagttcaagagtaacatcgccgcccgtaataatcgccgatgtaaaaaacgccgagcaagccgcaaaagcgcttggcgttaatgtgcagatgttaaaaatttaa

SEQ ID NO: 72404 - protein, 986 aa, Unknown
  Obtained from environmental sample
  DOMAIN (206)...(392): Peptidase M16 inactive domain
  misc_feature (1)..(986): Xaa is any amino acid
MSGTALKKGQRLDSGFVILDIVDLEELKAQGIWAKHEKTGVEVFHVLNDDIENLFSFSFATFPEDNTGVAHILEHSVLCGSERYPLKDAFIVLAQGSLQTFLNAITFPDKTVYPASSTNEHDYFNLMSVYGESVFRPLLPEWTFMQEGHRMEYQNGKLSITGVVYNEMKGAYSSLDTYAGHWSVKAIMPNTPYDFESGGDPQAIPQLTWDGLKEFHRSRYSPANCKIFLAGNIPTEKQLAFLNDEFFSELEGGKACDPIVKTQRWKEPKKFHVPCPSGNERKSTIFLSWLCSDVTDIYEGLALAALTEILLGHDGSPLTRALIESGLGEDITPVSGLESEIREVLFVAGLRGVKGNIKQKSEAIEKLIMGELRRLATEGIPPEEIEAALLALEFSQREIRRSGGPFSLVWMRRSLRAWLHGCKPWEGLLISCQIAKIKENLSRDKKYFESLIKKYYLDNPHRALVILEPKDNFMLNQEKELLKELKNTQKKLSKEEQQQIIDKSKKLEKIQSEADSPAALAAIPHLSRNDLAVYEDIIPRRQEDLKGVPALCHELYTNGITYLDFAFPVDVFPPEDYSWLPFFSRAITSVGLPGMDYGEVSSLLARTVGGFNAVLHTASAVKNTPPFLQTASGSFDLSGRDWLFLRLKCLDEKIAPSVDIAMRVICDADFSDRRRINDLVLEMKNEIDSSLAPMGHIYSSSRTCRFNSRSKSVEEKYSGISQIEFVNQLAKYDIGEIIKKLQYIREKIVKAGLIVNITGTAVNSAVAETAQRFSRFGAPVPRLSAEISGKTPAPEVFASRSLQVGFAALTLNAAPYDTLEQTAEIVLSHQLSTGALWEVIRMKGGAYGAFINSNSLDNCLTFATYRDPNPLRSLDVISSIFKDNSYGKCTEDYLVKSIIGCYSKETRPQTAAEKGLIDFNRFLYGIDESYRKKRLERLISLSTSDIEAIFNSFSSRVTSPPVIIADVKNAEQAAKALGVNVQMLKI

SEQ ID NO: 72405 - DNA, 1215 bp, Unknown
  Obtained from environmental sample
  misc_feature (1)..(1215): n is a, c, g, or t
atggggaatatagtacgacacggcgtcgatatgtacaaacaaaccatgaaattgccgtcttccggcggcggcgcaagcaacggcgcagacagcggcgtaaataacggcgcgaatattcccgccaaacgccctccccaaaatcctcccgcggttttttacaaagaaacagaaaaaccaaaacttcccgttcccgctcccaaaggagagccttcgcaggattcaaagtacagacgggttgcgaaatttcttattttaatcggcagcgagcaagcggcggaaattttatcggaacttgaccccgaacaaatcagcgagatatcaaaagaaatcgccttagttaatgttattaagccggaagaaaaagaccaaatacttgaggaattttattctctgtcttccaagccgtttaattattacggttcttcgcgcggcggaatagaaaccgcgcgccgtattctttacgcggcgaaaggtcctgaggaaggagaggaaatccttaacagggcgattccaaaatcgaaggaaaatcttttcggctttttggaagagtattccgcggaacagcttgtaacgcttttaaaagacgagacggatcaaattgcggcgcttttactttccagaatgacggctaaactttccgcggaaacattgagtaagcttctgccgcaccgcaaggctttaatcttaaaacggatagcgcatcaaagcgaagtcgcgccggaagtgcttgaacaagtatccgccgcgatgaaagaaaaaatcaggaatgtcagcgccatttccaacgatataaaaattgacggtatgcaaactctggcggcgattttaaagcaaggggattattctttcggcgacaaattaataaatgagatagaaaaaaaagacccgttaatcgggcagaatttaaaagaaaaactttatacgcttgacgatgttttactcgcagttgatcgtcccattcaggataaattatctactatgacggatcatgacattgccgttttattgaaaggcagaggaaatgaattctatgaaaaaataatgtcttgtgtttcggcgggacgcagaaaagtaatccgtgaagaaagcgaagttataggcgcggttccaaaacgtgattgcgattcagtcgccaaagaatttcttacatggtttagatttgcccgcgaaaacggagaaattttactttacagtgacgaggatgtggttgtatga

SEQ ID NO: 72406 - protein, 404 aa, Unknown
  Obtained from environmental sample
  DOMAIN (288)...(397): FliG C-terminal domain
  misc_feature (1)..(404): Xaa is any amino acid
MGNIVRHGVDMYKQTMKLPSSGGGASNGADSGVNNGANIPAKRPPQNPPAVFYKETEKPKLPVPAPKGEPSQDSKYRRVAKFLILIGSEQAAEILSELDPEQISEISKEIALVNVIKPEEKDQILEEFYSLSSKPFNYYGSSRGGIETARRILYAAKGPEEGEEILNRAIPKSKENLFGFLEEYSAEQLVTLLKDETDQIAALLLSRMTAKLSAETLSKLLPHRKALILKRIAHQSEVAPEVLEQVSAAMKEKIRNVSAISNDIKIDGMQTLAAILKQGDYSFGDKLINEIEKKDPLIGQNLKEKLYTLDDVLLAVDRPIQDKLSTMTDHDIAVLLKGRGNEFYEKIMSCVSAGRRKVIREESEVIGAVPKRDCDSVAKEFLTWFRFARENGEILLYSDEDVVV

SEQ ID NO: 72407 - DNA, 918 bp, Unknown
  Obtained from environmental sample
  misc_feature (1)..(918): n is a, c, g, or t
atgaaaaaaatatttaaattatttgccataatgtttatttttaccgcatgtaatattttttcatttggcaaaaaacaggttgaacaggaacctgttcccgaagagccgattattccaataccgacaagagcggaactggtaatgaaagcgctgtatgacgcttaccgcgaacaaatcgataaagtggaattccaaaacgacgactggactctccttatgaaggacaaatggtattattatgccggcggaagaatattgcctgaaaatcagctggaaaactcggcaatgtacagaccatatcaattttatcaatatcccgcggaactgccgccgttgacggaacgtactccgcaggatatagaaaggtttaaaaattggacaagtcaaagaggtcaaaatacgcttaaacgatccggtttttttattgatgagcttatgtccgccgctactcgcgcggaaacggaacgccagcttgaaagtataaaatttctcggaaagaccacaagggttcataagttgattaaacaaaaacttacgcttatagaaaatgatattataactttagcgaagaccgatgatacagttcaaccatggataaacaacttaggctcattggaagggtacggttggagaaatatagcgaatactcaatcgcgatcatatcactcatacggacttgcggttgatttacttccaaaatcgttaggcggcaaacaaacatactggctttggacttccaattacagaaacgactggtggaatgtttcgtataacgatagataccatccgccggacgcggtgataaaaatttttgaatcctatggttttgtctggggcggcaagtgggttatgttcgataccatgcattttgaataccgccccgaagtattttaccttatcggaataccgccgagataa

SEQ ID NO: 72408 - protein, 305 aa, Unknown
  Obtained from environmental sample
  SIGNAL (1)...(23)
  misc_feature (1)..(305): Xaa is any amino acid
MKKIFKLFAIMFIFTACNIFSFGKKQVEQEPVPEEPIIPIPTRAELVMKALYDAYREQIDKVEFQNDDWTLLMKDKWYYYAGGRILPENQLENSAMYRPYQFYQYPAELPPLTERTPQDIERFKNWTSQRGQNTLKRSGFFIDELMSAATRAETERQLESIKFLGKTTRVHKLIKQKLTLIENDIITLAKTDDTVQPWINNLGSLEGYGWRNIANTQSRSYHSYGLAVDLLPKSLGGKQTYWLWTSNYRNDWWNVSYNDRYHPPDAVIKIFESYGFVWGGKWVMFDTMHFEYRPEVFYLIGIPPR

SEQ ID NO: 72409 - DNA, 924 bp, Unknown
  Obtained from environmental sample
  misc_feature (1)..(924): n is a, c, g, or t
atgaaaaagaaaataaatttattttttattttattgatattttccgcctatagtttattttcttccggaaataaagatatagagcctgagaatacgcttgaagaacttgatcctacgttgataacagatgcggaacttgtaatgaaatctttatacgaagcttttaatgacaaaatagataaagtggaattccgaaaaggcgattgggctgttttgatgaagggcgtttggtattattactccagagggagattgctgcctgaaagagaattaaaaagagctgcaaaatacagaccgtatcaattttataaatatcccgcgaaattgccgccgcagacgaaggcaactcctgaagaaatagaaatgtatattagctggacaaacccaacaggcgcaaatatacttaatcgttccggttttttccttggcgtgctttggaaagcgtccacgcgcaaagtaacggaaaaacaaattgtggatataactttttttgggagaaacgtaaaagttcacaaagggattcagcaaaaacttgcgattattgaaaaacaaattcaagacgccgcaaaaaccgataatgcgattcaagcatggatagacaatcttgattctccgggagggtattattggcgggctatcgcaaaaactaaatcgcgatcatatcattcttacggacttgctattgatttacttccaaaatcgttaggcggcaaagaatcgtattggttgtgggcttctcaaaaaagaagcgactggtgggatgttccgtatagagagagataccatccgccggaagcggtgataaaaatatttgagtcctatggttttgtctggggcggaaaatgggttatgttcgataccatgcattttgaataccgccctgaggtaattattctgaatggactgccgctgaaagaaaaataa

SEQ ID NO: 72410 - protein, 307 aa, Unknown
  Obtained from environmental sample
  SIGNAL (1)...(23)
  misc_feature (1)..(307): Xaa is any amino acid
MKKKINLFFILLIFSAYSLFSSGNKDIEPENTLEELDPTLITDAELVMKSLYEAFNDKIDKVEFRKGDWAVLMKGVWYYYSRGRLLPERELKRAAKYRPYQFYKYPAKLPPQTKATPEEIEMYISWTNPTGANILNRSGFFLGVLWKASTRKVTEKQIVDITFFGRNVKVHKGIQQKLAIIEKQIQDAAKTDNAIQAWIDNLDSPGGYYWRAIAKTKSRSYHSYGLAIDLLPKSLGGKESYWLWASQKRSDWWDVPYRERYHPPEAVIKIFESYGFVWGGKWVMFDTMHFEYRPEVIILNGLPLKEK

SEQ ID NO: 72411 - DNA, 300 bp, Unknown
  Obtained from environmental sample
  misc_feature (1)..(300): n is a, c, g, or t
ttgataagcagcaacataaaacgccttcgctccctgaataatatgtcgcaattaaccctcgctctaaatacggggcttactcataattttattaatgatattgaaaactgcaaaaaaggagtctctgcgaaaactttggcaaaactttcaatggcattaaacgcggagccgtatcaatttttcctgcccgacggtatggcaaataacgagattataagttatgtaaaagattttaacgattctttacaaaaagttgtaagcgacttaacgcatcattacctgagtggcgataaaaaataa

SEQ ID NO: 72412 - protein, 99 aa, Unknown
  Obtained from environmental sample
  DOMAIN (6)...(60): Helix-turn-helix
  misc_feature (1)..(99): Xaa is any amino acid
MISSNIKRLRSLNNMSQLTLALNTGLTHNFINDIENCKKGVSAKTLAKLSMALNAEPYQFFLPDGMANNEIISYVKDFNDSLQKVVSDLTHHYLSGDKK

SEQ ID NO: 72413 - DNA, 1944 bp, Unknown
  Obtained from environmental sample
  misc_feature (1)..(1944): n is a, c, g, or t
atgagtgagaattccggcgataaaaataataaaggcgatcccatgtttcctttcggcggacaaggcggaccgaaaatgcccgattttaaagggtttggcggctggaaatttctgcttgtctatattgtcattcttattatcggaatgagtctttttaattatgttttccttaacaaaatgaatcccgcgatagatttttcggaatttaaaaatcgtatctcgacaggcgaaattaaacgcgttgaattaacagattcttattttaccggttttacaaatcccgaaaaaaaagagtcttcaagaacgctttcgcgctcttacggttcttcagataaagtgtaccgcactgtgtcaatttacgatcccgaatttataaaactattggacgaaaaaaatgtttcctacggcgcggtttcacgcgagggaaacgcggttttaaattttattttcagttgggtgctgcctatagctttcttcatctttatctggcgttttgttttcagacgtttgggaaatatgggcggcaatgtgctttccatcgggcaaaaccgcgcggttattgtcgcggagggggacattgttacgcgattcagcgatgtcgccggcgttgatgaagctaaagaagaacttgtcgaggttgtcgattttttaaagagtcctcaaaagtacaaggagatcggcggcaagatacccaaaggcgtgcttttggtgggaccgccgggaacgggaaaaactttgctggcgagggctgtcgccggagaagccagagtcgcatttttccgtatgagcggagccgactttgtggaaatgtttgtcggcgtaggagcggcgcgcgtacgcgatttattcaaacaggctagaaacaaagcgccctgtattatttttattgatgagttagacgccatcggcaaaagcagaataaacaatatcgcgggcggcaacgacgagcgggaacaaacgctgaaccaactccttgtagaaatggacggctttgacggcactagcgggcttattattctcgccgctacaaacagaccggacgtattagaccctgcgctccttcgccccggacgctttgatcgtcaggtgcttgtggataaacccgatcttaaaggcagagaagcaattttaaaaattcattccaaggacgtaagacttgaccccgccgtaaaccttgaagttgtcgcgcgcataacgtcaggtttttccggggcggatttggcgaatattgtaaacgaagccgcgcttttggcggtaagagcgggacggaaaatggttgtgcagcgcgactttgacgaagcgatagaaaaaaccgtcgcaggcttgcagaaaaaaaccagagtgcttaaacaacaggaaagaaaattgacagcctatcacgaagccggtcacgcgataatcgccgcgtttacacctaacgccgaccccgtgcagaaaatttcgattattccgcgcggttttgctttgggttacaccatgcagcttccgcttgaagaccgttatacggtaaccaagtccgatcttttgggaaggattgatatccttctcggcgggcgtatcgccgaagaaatgatttccggcgaatattccacaggcgcggctaacgatttaaccaaggcgacggacatcgcccgcaaaatgatcaccgattacggaatgagcgaccgtttccgccatgtcgcgctaacatcgcgcggtatgagcatgacaggacaggagcggcaagaaccgtctttccagcgcgagtacgcggaaagcacacagcagtatgtagatgaagaaatcgcccgtattatcgacggcgagtacgctaaagcgaagaaaatccttgaagaacagcgcggaatactggacaatgtttccgccgcgttgctggaaaaagaaactcttgatgaaaaagaattcaaagccctcattggagagggaatatcgattgtggtgtaa

SEQ ID NO: 72414 - protein, 647 aa, Unknown
  Obtained from environmental sample
  DOMAIN (233)...(367): ATPase family associated with various cellular activities (AAA)
  misc_feature (1)..(647): Xaa is any amino acid
MSENSGDKNNKGDPMFPFGGQGGPKMPDFKGFGGWKFLLVYIVILIIGMSLFNYVFLNKMNPAIDFSEFKNRISTGEIKRVELTDSYFTGFTNPEKKESSRTLSRSYGSSDKVYRTVSIYDPEFIKLLDEKNVSYGAVSREGNAVLNFIFSWVLPIAFFIFIWRFVFRRLGNMGGNVLSIGQNRAVIVAEGDIVTRFSDVAGVDEAKEELVEVVDFLKSPQKYKEIGGKIPKGVLLVGPPGTGKTLLARAVAGEARVAFFRMSGADFVEMFVGVGAARVRDLFKQARNKAPCIIFIDELDAIGKSRINNIAGGNDEREQTLNQLLVEMDGFDGTSGLIILAATNRPDVLDPALLRPGRFDRQVLVDKPDLKGREAILKIHSKDVRLDPAVNLEVVARITSGFSGADLANIVNEAALLAVRAGRKMVVQRDFDEAIEKTVAGLQKKTRVLKQQERKLTAYHEAGHAIIAAFTPNADPVQKISIIPRGFALGYTMQLPLEDRYTVTKSDLLGRIDILLGGRIAEEMISGEYSTGAANDLTKATDIARKMITDYGMSDRFRHVALTSRGMSMTGQERQEPSFQREYAESTQQYVDEEIARIIDGEYAKAKKILEEQRGILDNVSAALLEKETLDEKEFKALIGEGISIVV

SEQ ID NO: 72415 - DNA, 342 bp, Unknown
  Obtained from environmental sample
  misc_feature (1)..(342): n is a, c, g, or t
gtgccgtcaaagccgtccatttctacaaggagttggttcagcgtttgttcccgctcgtcgttgccgcccgcgatattgtttattctgcttttgccgatggcgtctaactcatcaataaaaataatacagggcgctttgtttctagcctgtttgaataaatcgcgtacgcgcgccgctcctacgccgacaaacatttccacaaagtcggctccgctcatacggaaaaatgcgactctggcttctccggcgacagccctcgccagcaaagtttttcccgttcccggcggtcccaccaaaagcacgcctttgggtatcttgccgccgatctccttgtacttttga

SEQ ID NO: 72416 - protein, 113 aa, Unknown
  Obtained from environmental sample
  misc_feature (1)..(113): Xaa is any amino acid
MPSKPSISTRSWFSVCSRSSLPPAILFILLLPMASNSSIKIIQGALFLACLNKSRTRAAPTPTNISTKSAPLIRKNATLASPATALASKVFPVPGGPTKSTPLGILPPISLYF

SEQ ID NO: 72417 - DNA, 2226 bp, Unknown
  Obtained from environmental sample
  misc_feature (1)..(2226): n is a, c, g, or t
ttgtcggagtggaaagaatccatgtcgggaaactattccgacgccgaccgtatcaagattggaaatcttaccaacgccagccatattttaaccggctacataagcaaaacagcaaacgcctttatgcttgaacttaccgtgaccgatgtggcaagcggggttcgtaaggcttcgtattcccctacgcctgtgtctccgttcgcgttggaaaatctctcggcaatcaaaatcgcttctgcggaaatacttaggcagttgggcgtaaacctgacaagcgcggcactggcggagcttacgcaggcggcgaatacggcgcgtcttcaggcggagacaatgttagctcgcggcatagcggcgcagaggcggggaacggaggtcgcggcgctcagttacttctatcaagccgccgccattgactcatcgctctttgaagcgtcaaagaggtcttcgataatggccgccaacatttcgagcgggaatatcggcgcggatcttcgcaacgatatagtgtggcgcaaaagttggatagcccgccttgaggagacggagttaactttttatagcataatcaattccgccgatccgccgtatacgctgttttattcaacgggtattcggagagggaacgtaaactatcaacaagaaacggcagacctcagcattcccataaatctgagcgccaacatcgcgtggttcaaatcaatgaccaaggcgctacaggcggttcaagcgatactgaacggcctaaactccacgaacaaaagagacgattgggggctgtcaaattggccgcgggacggcgtgtccaacacaaacccgttcgcctcgtctaagggatacgatattacggtggcctttgaactggtaaaccaacagggacgggtaataggaagccagacaatcaggctgcacccggcttttagaatagcccgcagcaacagtaccggaataaatattgagttcacggaaaacacccacggcaccgtaactttcaacaacgtgaaggcggacgacataagcgacaatctgaccgtccgtatcgcctcaataaacgggggttcgccgcgaaacgcgcggtttgcgataaacgcgctttcggctgaaaaatggaagcaaaataccttcttgcaaatagagaagggcgtagtgctcggatttgacggctcgctttcatccgaccaacgggtgcaataccgcaaccttgtcataccgaaagaaacgtggggtaatccggttaccgatataggggaaagagcgttcgccgataaacaactcaccggcttgaccattcctgacggaattatcttcattagaaatgacgcgttcgcgaataatctacttaccggcgtaactattccgaatagcgtcgcgtccattgggagtaacgcgtttgcaaataatcaactgactaacgtgaccattctcaatagcgccaccaccgtttggacacacgcgttcgcaaacaatctacttaccggctcaatcttgccgggcagagaaacccggatcgaacccagagcctctttaaattcatccgattcaccgagcgatacgcaaacgtacatagcggatacccatgcggaccgtcctaaccgtaagcaaaaaatcaaaagaggcggaggcttcggtatgggagggtactttgccgttgacgagggcggaggagttgattttgtcgagtcggaccggcaggtaacaatgcccaacttcggcgccggcttgcacatttacgtggatcttaagtactgcgatcttttcatcggaggcgccgacaacgccggaaagtgggaagacacctacgccgaccccaaagatcagcccaacttgtcacgcttcaactgcggcgcggccggaaaattcccgttgatcggcataggatcgcttgtaacgctgtacccgctatacggaatcgaatatcaaagattctcggcggactcttcctacataaaatacgcggacggcgaaaaatacccgcttgacggaaaagacggccgcccgtccaaaaaggatatgacgtcgatgtggggcaagttcggcgtcggaatagatctttgcgacgtgggcacgctgtgtttccgcttccaaaccctgtacggtatcagattgtccaacaactatgaaacgcgttaccttgaagaggaaaggcaaaacggccgcgaagctaaggcaatacccggccgcggactgacgttcatactcatggtaggtttttacacttggcactaa

SEQ ID NO: 72418 - protein, 741 aa, Unknown
  Obtained from environmental sample
  misc_feature (1)..(741): Xaa is any amino acid
MSEWKESMSGNYSDADRIKIGNLTNASHILTGYISKTANAFMLELTVTDVASGVRKASYSPTPVSPFALENLSAIKIASAEILRQLGVNLTSAALAELTQAANTARLQAETMLARGIAAQRRGTEVAALSYFYQAAAIDSSLFEASKRSSIMAANISSGNIGADLRNDIVWRKSWIARLEETELTFYSIINSADPPYTLFYSTGIRRGNVNYQQETADLSIPINLSANIAWFKSMTKALQAVQAILNGLNSTNKRDDWGLSNWPRDGVSNTNPFASSKGYDITVAFELVNQQGRVIGSQTIRLHPAFRIARSNSTGINIEFTENTHGTVTFNNVKADDISDNLTVRIASINGGSPRNARFAINALSAEKWKQNTFLQIEKGVVLGFDGSLSSDQRVQYRNLVIPKETWGNPVTDIGERAFADKQLTGLTIPDGIIFIRNDAFANNLLTGVTIPNSVASIGSNAFANNQLTNVTILNSATTVWTHAFANNLLTGSILPGRETRIEPRASLNSSDSPSDTQTYIADTHADRPNRKQKIKRGGGFGMGGYFAVDEGGGVDFVESDRQVTMPNFGAGLHIYVDLKYCDLFIGGADNAGKWEDTYADPKDQPNLSRFNCGAAGKFPLIGIGSLVTLYPLYGIEYQRFSADSSYIKYADGEKYPLDGKDGRPSKKDMTSMWGKFGVGIDLCDVGTLCFRFQTLYGIRLSNNYETRYLEEERQNGREAKAIPGRGLTFILMVGFYTWH

SEQ ID NO: 72419 - DNA, 996 bp, Unknown
  Obtained from environmental sample
  misc_feature (1)..(996): n is a, c, g, or t
atgcagttagagtcccgatccgcgcaagacgggttctgggacgacgcctccgcggcgcagaaggtactcaagagcattaaagacctaaagcgggtcgtggaaccctgggacaaggcgaacgccgacgctagcgacatatccgagctttacgctctggctacggaggagggcgacaaggagacgctcgccgacctatgcggtcaggcggcggagcttgagaaggaggtggcgcggatagagttcatccgcaaaatgggcggcgaggacgacgcggcggacgccatagtcaccatccacagcggggcgggcggcacggaatcgtgcgactggacggagatgctctaccgcatgtacgctcgctacatggagcgccaagggtacacgtacaacatgctggagagctcccccggcgacgaggcggggctgaaatccgttacgctggaggtcaagggcgagtacgcctacgggcacctcaaggccgagacgggcgtccataggctggtacggatctccccattcgactcaaacgcacggcgccacacctcgttctcgtccgtctacgcttacccgattatggacgagatcgaggattacgagttggatgagaaggaaatacgtgtggatacgtacaggtcaagcggcgccggcgggcagcacatcaacaaaacggacagcgcggtacggatgacgcatattcctaccggtatagtggtggcatgtcaaaacgaacggtcgcagataaagaacagatcgacggcgctgaagatactgaaggcgcgggttcgccagcactataaggagttggaggaacgcgagcgggaatctaagcaagcggagaaaaagaagattgagtggggcagtcagatacgttcttacgttctccacccttacaatatggtaaaggaccatcggacggaggcggagaccagcaatacttcggcggtgttggatggggatatcgatatgttcattgaggcttatttgctattgaattag

SEQ ID NO: 72420 - protein, 331 aa, Unknown
  Obtained from environmental sample
  DOMAIN (51)...(161): PCRF domain
  misc_feature (1)..(331): Xaa is any amino acid
MQLESRSAQDGFWDDASAAQKVLKSIKDLKRVVEPWDKANADASDISELYALATEEGDKETLADLCGQAAELEKEVARIEFIRKMGGEDDAADAIVTIHSGAGGTESCDWTEMLYRMYARYMERQGYTYNMLESSPGDEAGLKSVTLEVKGEYAYGHLKAETGVHRLVRISPFDSNARRHTSFSSVYAYPIMDEIEDYELDEKEIRVDTYRSSGAGGQHINKTDSAVRMTHIPTGIVVACQNERSQIKNRSTALKILKARVRQHYKELEERERESKQAEKKKIEWGSQIRSYVLHPYNMVKDHRTEAETSNTSAVLDGDIDMFIEAYLLLN

SEQ ID NO: 72421 - DNA, 564 bp, Unknown
  Obtained from environmental sample
  misc_feature (1)..(564): n is a, c, g, or t
ttgtcaacacttccaaagtacaccaaaatacggtgttcacgttgcggcgactgctgcagtattcccgtcgtccccgtcacgcataaagacgtggcgaggcttatcaaacacaccggcttatccacaagcgcgttggtgcgtttctgcccgtcttccgaaatggcctacgatgaggattccgggctgtggataaaattcaaatcggtcaaacgcgctatggtattgcgcaagcgcggcgaacgctgtatctttcaaacgccggagaaggcttgctccgtctacgaggcgaggccgcaaacctgccggacatttccatacagtatggatttcgaaggcaaaaccgtcacggaaatcacactaaacgaggtgatgaagtgcaacgccataaaatgctctaagggctgtatcgatatcgataccgtcgtcatgaatgtaaagaaggagaatcgggaagacgacgagtatcataaactagtgaagcggtggaattcgtcacattgtacggggaccagtaaaagattttttgaaatttatcgaggttttaatagtataatgtctttatga

SEQ ID NO: 72422 - protein, 187 aa, Unknown
  Obtained from environmental sample
  DOMAIN (10)...(131): Uncharacterised protein family (UPF0153)
  misc_feature (1)..(187): Xaa is any amino acid
MSTLPKYTKIRCSRCGDCCSIPVVPVTHKDVARLIKHTGLSTSALVRFCPSSEMAYDEDSGLWIKFKSVKRAMVLRKRGERCIFQTPEKACSVYEARPQTCRTFPYSMDFEGKTVTEITLNEVMKCNAIKCSKGCIDIDTVVMNVKKENREDDEYHKLVKRWNSSHCTGTSKRFFEIYRGFNSIMSL

SEQ ID NO: 72423 - DNA, 2760 bp, Unknown
  Obtained from environmental sample
  misc_feature (1)..(2760): n is a, c, g, or t
atgaacgaaaaaaaactatacatagtagacggctacgctttcgcctaccgcgcctactacgccttgatccgcagcccgctcataagttccaagggctttcccaccggggcgatttacggctttaccaactatctgctgcgcctcatagaggcctacggctgcccgtacttggcggtggctatggacagctccgtccccacattccgccatgcggcctacgcgccgtacaaggcgaatcgggaggcgatgccggacgatctcaggcagcagatgccgcgcatattcgaactgctcgacgcgttcaacatccccgtcgtcaaaaaggacggctttgaggcggacgacatagtcgcttcgctcaccaaactggcgctggcggaggggtttgaggtgttcttggtgactaaggacaaagacctcatgcagcttatcggcccgagcgtgacgatgctagctccggacgggtcgggtgtcttctccccgatggggccgcgtgacgttcttgacaagatgggggttccgccggagaagatcttggactacctggcgcttgtcggggactcgtccgacaatatccccggggtgcatgggatcggcgtcaagggcgccatacagattctggagacggcgactgtcgaccaattattggaggatccgtcccgcatagaatcggtaaagcacgccaataaaatccgcgaacacaaggagacgctcgctctatcgaagatgctcgccacgctgcgcgacgatgttgagctcgatttctcgttagacgatctcaaacgcagggattttaacgtctcacgctccagggaactgctaaacgagtttgagtttttctccatgctgcgaaacccgctcttcggcgcaaggaaaaagtttgaaccggttatgcgggcggtcaactcaatcgctcaattacgtgaactcgcggaaacgataagcaaacgtggcgaggtctctatcgacgcggcactggcgggaaaccatccaagaatagcgaagatcagaggaatcgtgcttgccgttgaccccgcggaggcgtttttcgttcgtattgattgcgacggccgccgagcggaatcaaagacggactccgacattgccattaacttgtttgacggcttggacgggcacggcgaggtagacaaaagcggctcggcggacaagagtatatcgcttgacaggggcgaggcgctgaaaattcttaccggcgtgtttgagtcgccgcaaataggcaagataggccacaacctaaagcgcctctcattggcgtttaggaacgacgggattacgctgcgcggcgttacttttgacgcaatgctcgccgcctacgtgatagatcccgggaaacgccgttacgacctcgccgaacttgccggagagcatttgggcgtcgacataaaaaccatcggcgattggcgggacgacagcggattcaccgacccgctcgccaaccacacgccgttcgccgacactgcctgcgccgccctgctcctacgggaaaaactcctgcccgttatggacgaacgcggttgcgcaaacttgtttagagacatcgaactctcgctagaggcggtattggcggagatggagtggaacggggtgcttatcaatatcgagctgctgtcgaggctctcctccgaatacgccgccgagatcgagcggattacgcgtgagatacacgccttcgccggtgaggaatttaacctcaactcgcctaaacaattggcggagatactcttcggcaagctcggcttgcacggcggcaaaaagacaaagggcggttcacaatcaacacgcgtggaagtgctggagaacttagccgccgaccaccccgtggtgatgtccatacttgactaccgcgaaaaacagaagctgctttccacctacatagacgcgataccggcgcagatactgccgcagacagggcgcgtccacacctctttcaaccaagcggtgaccgccacaggccgcctatccagcacaaatcccaatttgcagaatatccccatacgcaccgagagcggacgcaaaatcagagaggccttcatcgtacctaaaggctgcctgctggtctccgccgactactcgcaaatcgaactgcgcgtgctggcgcacttctccggcgacccgtcgctggtacaggcgtttacagacgacaaggacgtccacgcccaaaccgcgtccgccatctacggcgtgcatccggaatttgtaacgccggagatgcgccgcgccgcaaagaccataaacttcggcctcatgtacggcatgggcccgatcaacctatccaagcagatcggcatctcctttacagaggcgaaaaaattcatagaatcatactttgaccaattcccctccatcaggacattcatagacaccgcaatacaaaaaacacgcgactgcggttactcggaaacgatattcggacgcaaacgatacctgccggagatcaactccacgaaccgaacaataagggaagccgccgaacgcacggcaatcaacactccggtacagggcacagccgcggatataataaaagtcgcaatgatcaatttatacaaaaatatgccggacaagtggccgtactccaagatgctgctgcaagtccacgacgaattagtatttgagacgccggcggagaacgctgaggaatttgcgcagtgggcgaagggggagatgagcggggcgtgcgaactcaaagtgccgttgaaagtcgacgcgggtgtaggcaaacattggggggaagcgcattaa

SEQ ID NO: 72424 - protein, 919 aa, Unknown
  Obtained from environmental sample
  DOMAIN (333)...(509): 3'-5' exonuclease
  misc_feature (1)..(919): Xaa is any amino acid
MNEKKLYIVDGYAFAYRAYYALIRSPLISSKGFPTGAIYGFTNYLLRLIEAYGCPYLAVAMDSSVPTFRHAAYAPYKANREAMPDDLRQQMPRIFELLDAFNIPVVKKDGFEADDIVASLTKLALAEGFEVFLVTKDKDLMQLIGPSVTMLAPDGSGVFSPMGPRDVLDKMGVPPEKILDYLALVGDSSDNIPGVHGIGVKGAIQILETATVDQLLEDPSRIESVKHANKIREHKETLALSKMLATLRDDVELDFSLDDLKRRDFNVSRSRELLNEFEFFSMLRNPLFGARKKFEPVMRAVNSIAQLRELAETISKRGEVSIDAALAGNHPRIAKIRGIVLAVDPAEAFFVRIDCDGRRAESKTDSDIAINLFDGLDGHGEVDKSGSADKSISLDRGEALKILTGVFESPQIGKIGHNLKRLSLAFRNDGITLRGVTFDAMLAAYVIDPGKRRYDLAELAGEHLGVDIKTIGDWRDDSGFTDPLANHTPFADTACAALLLREKLLPVMDERGCANLFRDIELSLEAVLAEMEWNGVLINIELLSRLSSEYAAEIERITREIHAFAGEEFNLNSPKQLAEILFGKLGLHGGKKTKGGSQSTRVEVLENLAADHPVVMSILDYREKQKLLSTYIDAIPAQILPQTGRVHTSFNQAVTATGRLSSTNPNLQNIPIRTESGRKIREAFIVPKGCLLVSADYSQIELRVLAHFSGDPSLVQAFTDDKDVHAQTASAIYGVHPEFVTPEMRRAAKTINFGLMYGMGPINLSKQIGISFTEAKKFIESYFDQFPSIRTFIDTAIQKTRDCGYSETIFGRKRYLPEINSTNRTIREAAERTAINTPVQGTAADIIKVAMINLYKNMPDKWPYSKMLLQVHDELVFETPAENAEEFAQWAKGEMSGACELKVPLKVDAGVGKHWGEAH

SEQ ID NO: 72425 - DNA, 1209 bp, Unknown
  Obtained from environmental sample
  misc_feature (1)..(1209): n is a, c, g, or t
atgtattgttgtatatttatgttttgcgttcgtgatggtttgtgtggttcgtggtcaattattttttttggacactctatgctaaaatcaaacctcgtaatcacagtccccgacggcctgtgcccgttcctaaagaccgaggtagagtccctaggcctgcccgtgacctccgtcacgcctaccagcctctctaccgagggagcgtccgctgaggctatgctgcttaatttacatctacgcaccggacatcatgtgctctttcaggtcgccgcgtttcgttgccgcgatgccgacgaactttacaaggagctctctaagatactttgggagactatcataccgtcggatgagtatcttactgtggtctcgaatgtccgcaatccgacgattcgcgacgctcgctttgcgaatatgcgttgcaaggacgcgattgtggatcgcattcaagcgcgcaaaggacgccggcccgactccgggcccgaacagacgggtgcggtcgtcagcctctattggcgcgacgagcgttgcacggtttacttggacacgtccggcgagccgctgtcaagacgcggttaccgccgcataccgctgggcgcgcctatgcaagagacgcttgcggcgggcgtcgtcatggcgtcggaactgaagaacggcgacaactttgtcaatcccatgtgcggcagcgggaccatggccatagaggcggcgttgtcgctgagcggcagggtgccggggcttacaaggcaaaacttcggattcatgcacctcttagggtttgacatgagagcgtgggaggagatgaaagccgccgccaaaggcaaggtgctgaaaaccataccgtcgcaaatcatcgccaccgataataatgaaaaggccatagaggccgcccgcaaaaacgccgcgacggccggcgtggagcagcttatacgctttgaagtatgcgactacgcggacacgccggtcccgccgtcacccggcgcggcgatactgaaccccgcctacgggatgaggctgggcgacgacaaggaacttatagagacctaccgaggcataggcacattcttcaaacagaagtgcaaaggctatcgaggcgggatattcacggcaaacaccatgctggcggggcaggtcgggttgaaagccaagcggaaaataccgtttgttaatgggaagatagagtgccggctctacgtctatgacctatactga

SEQ ID NO: 72426 - protein, 402 aa, Unknown
  Obtained from environmental sample
  DOMAIN (190)...(398): Putative RNA methylase family UPF0020
  misc_feature (1)..(402): Xaa is any amino acid
MYCCIFMFCVRDGLCGSWSIIFFGHSMLKSNLVITVPDGLCPFLKTEVESLGLPVTSVTPTSLSTEGASAEAMLLNLHLRTGHHVLFQVAAFRCRDADELYKELSKILWETIIPSDEYLTVVSNVRNPTIRDARFANMRCKDAIVDRIQARKGRRPDSGPEQTGAVVSLYWRDERCTVYLDTSGEPLSRRGYRRIPLGAPMQETLAAGVVMASELKNGDNFVNPMCGSGTMAIEAALSLSGRVPGLTRQNFGFMHLLGFDMRAWEEMKAAAKGKVLKTIPSQIIATDNNEKAIEAARKNAATAGVEQLIRFEVCDYADTPVPPSPGAAILNPAYGMRLGDDKELIETYRGIGTFFKQKCKGYRGGIFTANTMLAGQVGLKAKRKIPFVNGKIECRLYVYDLY

SEQ ID NO: 72427 - DNA, 1974 bp, Unknown
  Obtained from environmental sample
  misc_feature (1)..(1974): n is a, c, g, or t
atgattatggccgaacagcatgcaacttcctctaaccctgccctggtgatatccacctttcgggaatatgtcggcagtttgccgcaccagtgggttttagacaaccttatatcgggcgcgtccggcccgtcggacgggtcgcggcgtattgtgtcgtcggccatggtcaaggaggctgtggcggcgtttgcggccaaggggtcgctgaccaagcggtttaaggcgttgccgccggcgttgcggtttcggtgcgcgcaggtttacctgatgggggccgcgggattgtcgctgtctgacctgaacgcttaccgcaaggagccgattttgtcgtcgctcttggtctttgccgccgctcagggcgggccgggggcgggggcggccaagttgtttgggttcagcgagtttgagccggcgctacggccgcttttggccgaatcgctattgggtttcggcgatgccggagagtgctcgccgtccgcgcatgcggccgcctttccgctaaggccgctaagcgatatcgcggtcgtctgctcccttgcggcgcaggggcagcttactcgcagtgttcacggcgggctttcgcgttcggccttaaacgcgctcaaacgtctcgtccacgacccgacgctcaccggcagaggcacacccggcggagggcccggatatccggccggctttcttatcggccactgcctcaatgaggggcttatcatagacacagagaccgaatacgccatagaccggcaagcgttctccgcttggcgcggcaggagcgtgaaggagcgcctgaatagactaagcgattacgtcgaggagtttttggagggggcggggctcgagcttgcgcgggagctgttaaaacgcgccgacggccgttggatcgccgtgaaccagatacttccggaaccggataggcagacgctcatccgcgcgttgggcgtctttgagttcttggggcgcgtgcaaacgacgcactcgcacggcggcctctggttctcaccctgccgagcggacgacgacggcgcgctacgaaccgacgaaccggcgcgcgataccgtgataatgccggatttctccgtcatcataccgcaggaggtaacgcccgccgagctatttgagttttccgtgataggcatactctccgctttcgacaaggtgtacaacggacagataacgaaggagtccgtttcaaacgcgctaagcgccggtgtcgacgccgacctattacgcggctggctgcggaaacacaacgcggcggcaaacgtcgtgaagaccgttgacgagtggatacgggaattcagccgcttgtatgtctgcagcggcgtcgcgctcgcctcctgcgacgagacggtcacgcggcagattgcggcgcttgaaccgctgcgcaagcacctgacggaggtgaaggcgcacaccgtcttcatggtcaagcacggtagcgaacacaaggtgctcaacatgttggaaagactgggtttcgatacgcgtatgccgggcggaaaggcggtaaaggtcaataagaatcaacgcgatacgtatcccccgcccgacgacgtcgaaacacccgccgaggaagaggaatccgcatggcaggatgatgatacggacgatacccaggaccggcaaacgtcgggcgggggcgtgagacgcttcgcgccgctaacggacttcagcgccgcgccggagtcgccgagaaaatcggccgggatgaaccggacaaagtacggctccggcttaaaggcgctcgaaccgagcgagatgatacacgtggtcgactacgcgatgctgacaaaccaagcgctggtcatagactacgacggcagcgcgtacatcaagcggaatatttatacggtagtgccgttaggccttgataagggaatagacgcggcggtggaggcggaaattccttacgtgcggggacggaaacagttttacttagataagataaaacggatagcggtagtggcgcagtag

SEQ ID NO: 72428 - protein, 657 aa, Unknown
  Obtained from environmental sample
  misc_feature (1)..(657): Xaa is any amino acid
MIMAEQHATSSNPALVISTFREYVGSLPHQWVLDNLISGASGPSDGSRRIVSSAMVKEAVAAFAAKGSLTKRFKALPPALRFRCAQVYLMGAAGLSLSDLNAYRKEPILSSLLVFAAAQGGPGAGAAKLFGFSEFEPALRPLLAESLLGFGDAGECSPSAHAAAFPLRPLSDIAVVCSLAAQGQLTRSVHGGLSRSALNALKRLVHDPTLTGRGTPGGGPGYPAGFLIGHCLNEGLIIDTETEYAIDRQAFSAWRGRSVKERLNRLSDYVEEFLEGAGLELARELLKRADGRWIAVNQILPEPDRQTLIRALGVFEFLGRVQTTHSHGGLWFSPCRADDDGALRTDEPARDTVIMPDFSVIIPQEVTPAELFEFSVIGILSAFDKVYNGQITKESVSNALSAGVDADLLRGWLRKHNAAANVVKTVDEWIREFSRLYVCSGVALASCDETVTRQIAALEPLRKHLTEVKAHTVFMVKHGSEHKVLNMLERLGFDTRMPGGKAVKVNKNQRDTYPPPDDVETPAEEEESAWQDDDTDDTQDRQTSGGGVRRFAPLTDFSAAPESPRKSAGMNRTKYGSGLKALEPSEMIHVVDYAMLTNQALVIDYDGSAYIKRNIYTVVPLGLDKGIDAAVEAEIPYVRGRKQFYLDKIKRIAVVAQ

SEQ ID NO: 72429 - DNA, 714 bp, Unknown
  Obtained from environmental sample
  misc_feature (1)..(714): n is a, c, g, or t
ttgacctttaccgcctttccgcccggcatacgcgtatcgaaacccagtctttccaacatgttgagcaccttgtgttcgctaccgtgcttgaccatgaagacggtgtgcgccttcacctccgtcaggtgcttgcgcagcggttcaagcgccgcaatctgccgcgtgaccgtctcgtcgcaggaggcgagcgcgacgccgctgcagacatacaagcggctgaattcccgtatccactcgtcaacggtcttcacgacgtttgccgccgcgttgtgtttccgcagccagccgcgtaataggtcggcgtcgacaccggcgcttagcgcgtttgaaacggactccttcgttatctgtccgttgtacaccttgtcgaaagcggagagtatgcctatcacggaaaactcaaatagctcggcgggcgttacctcctgcggtatgatgacggagaaatccggcattatcacggtatcgcgcgccggttcgtcggttcgtagcgcgccgtcgtcgtccgctcggcagggtgagaaccagaggccgccgtgcgagtgcgtcgtttgcacgcgccccaagaactcaaagacgcccaacgcgcggatgagcgtctgcctatccggttccggaagtatctggttcacggcgatccaacggccgtcggcgcgttttaacagctcccgcgcaagctcgagccccgccccctccaaaaactcctcgacgtaa

SEQ ID NO: 72430 - protein, 237 aa, Unknown
  Obtained from environmental sample
  misc_feature (1)..(237): Xaa is any amino acid
MTFTAFPPGIRVSKPSLSNMLSTLCSLPCLTMKTVCAFTSVRCLRSGSSAAICRVTVSSQEASATPLQTYKRLNSRIHSSTVFTTFAAALCFRSQPRNRSASTPALSAFETDSFVICPLYTLSKAESMPITENSNSSAGVTSCGMMTEKSGIITVSRAGSSVRSAPSSSARQGENQRPPCECVVCTRPKNSKTPNARMSVCLSGSGSIWFTAIQRPSARFNSSRASSSPAPSKNSST

SEQ ID NO: 72431 - DNA, 507 bp, Unknown
  Obtained from environmental sample
  misc_feature (1)..(507): n is a, c, g, or t
gtggaaccgattacggaattaggcgcgcttatggattcgcaaagcgctctgttaactgaaattccgagtatctggcccgtaaaaggcggaatcggacacatcacaatgttctttggtcagaatattcacccgattacaggtcaatggcacattcacagaggtatcgatattgcaacttaccgctcaggcgatccgatagtcgcaagcgcggacggtcaggtagtaacagccgagtacacttacgattacggcaattttatcattataagacataaacacggatattatacgcgttatgcgcacatgcttcgttttaacgtaagcgttggtcagcgaattcaacagggagaagtaatcggatatatcgggaataccggtatttccacaggtccccacctgcattatgaagttcacataggttctgatgttgtagacccttatagatacattactatccgcaatagcctcgccaaacaagggacgttaaaaaccgatgccccaagatag

SEQ ID NO: 72432 - protein, 168 aa, Unknown
  Obtained from environmental sample
  DOMAIN (50)...(146): Peptidase family M23
  misc_feature (1)..(168): Xaa is any amino acid
MEPITELGALMDSQSALLTEIPSIWPVKGGIGHITMFFGQNIHPITGQWHIHRGIDIATYRSGDPIVASADGQVVTAEYTYDYGNFIIIRHKHGYYTRYAHMLRFNVSVGQRIQQGEVIGYIGNTGISTGPHLHYEVHIGSDVVDPYRYITIRNSLAKQGTLKTDAPR

SEQ ID NO: 72433 - DNA, 435 bp, Unknown
  Obtained from environmental sample
  misc_feature (1)..(435): n is a, c, g, or t
atgccccaagatagttccgattattcaattaacacgataataggtcccaatactaatctgacaggcgatgttgaaaccggaggttttacgcgcattgacggaagtatccgcggaaatgtaaaggcgaaaggcagagtagtaatcggcgagcgggcaagagtaaaaggcaatgttacgggaacaaatatcactatcggcggagtagtatgcggaaatattatttctgacggacatcttgtaattctttctacagcgatagttatcggcgatattatcacccggcgtatacaggctgacgacggttgttttataaacggcatggtttccgtatgctccagcgatgaaagctggacaaagacaatgtcggagcacaaagacgcgcagggtataaaatcggctcttcctgttttccatcatcataaagcctatgtctaa

SEQ ID NO: 72434 - protein, 144 aa, Unknown
  Obtained from environmental sample
  DOMAIN (2)...(114): Protein of unknown function, DUF583
  misc_feature (1)..(144): Xaa is any amino acid
MPQDSSDYSINTIIGPNTNLTGDVETGGFTRIDGSIRGNVKAKGRVVIGERARVKGNVTGTNITIGGVVCGNIISDGHLVILSTAIVIGDIITRRIQADDGCFINGMVSVCSSDESWTKTMSEHKDAQGIKSALPVFHHHKAYV

SEQ ID NO: 72435 - DNA, 549 bp, Unknown
  Obtained from environmental sample
  misc_feature (1)..(549): n is a, c, g, or t
atgtctaaagttgacggaacagacccttccatctacatgaatcccggcacttatagccaggttaaagaagaaaaaaaatccaaaggaatacgccgggacggaaaaacagaattctcaactatttttaatgaccttcgtggtaaaacagcggataatattggtccactgcggaatcttcccgcgtcggacgaatcggttaatattttaatggacgaagttcgcgacgccggggacaggttaaaaacccgccccttcggcgaagaaataatgcgttacaaacaggctgttcgcaattttataaattatgtggtacagaactgctattccaaggaatatgaggaaggcattttaaataaatttaaaccgagttttaagggacggcgcggcacgccggaagcgacagaacgaaaacattatgttaaaatacaagtgatagataaaaagctggaagacttggcggcaatgcttttatccagtcagtcgccccaaatggagttggtttcacggcttgaggaaattaaaggtcttctggtagacttgttacagtag

SEQ ID NO: 72436 - protein, 182 aa, Unknown
  Obtained from environmental sample
  DOMAIN (8)...(182): Protein of unknown function (DUF327)
  misc_feature (1)..(182): Xaa is any amino acid
MSKVDGTDPSIYMNPGTYSQVKEEKKSKGIRRDGKTEFSTIFNDLRGKTADNIGPLRNLPASDESVNILMDEVRDAGDRLKTRPFGEEIMRYKQAVRNFINYVVQNCYSKEYEEGILNKFKPSFKGRRGTPEATERKHYVKIQVIDKKLEDLAAMLLSSQSPQMELVSRLEEIKGLLVDLLQ

SEQ ID NO: 72437 - DNA, 945 bp, Unknown
  Obtained from environmental sample
  misc_feature (1)..(945): n is a, c, g, or t
atgagtgattatgacgaatacgaagatgaagaagatatttccgctcttgaagacaaccacgagataaaactacaggaacacgatgtaattacaggcgcggacgcgggaatagagtctatcgcccccgacgctcccatttacagattgcgccttttgtattctcaggaaacttttcttgccgtctaccgcgaagacaatctcgctcccaatacaatggtaatagtgcctacccgctacgggcgcgaccttgcgcaggttatcggttctgtacacggaaaactcccttcggtctcggaaatagcgtggattgtaagagcggcggctcccgaagatttggaaaaatcacgcaataatacaaagctggaaaaagaagcgtttgacatttgcaaaaagaaaatcatgaatcataaactggaaatgaagcttgtgcttgtacactatcttttggaagagccgaaaattttatttttctttaccgccgaaaacagggtagattttagagaactggtaaaagacttggtaagcgtatttaagatgcgcatagaactgcgtcaaatcggcgtccgtgacgaagcgcgggtaacaggcggacttggagtctgcggaagaggctattgctgtcattgtgtttccgacaaattaaaacccgtatcgttaaaaatggcgaaggatcaaaaactgtcgcttaactccgtgaaaatatccggtccctgcggcagactgttatgctgtcttttttacgaatacggcttttacagcgaacagcagcgcaacctgccgcaagagggcatgagagcgtccttcaacaatgaaacatggaaaatatccgaagtaaatccaatcgcctgccagattaaactcgtccacgaagacggtcggctaatgacagttcccgcttgccagtttgagcgggtggataatcattggaagattaaaagcagttaa

SEQ ID NO: 72438 - protein, 314 aa, Unknown
  Obtained from environmental sample
  DOMAIN (99)...(186): PSP1 C-terminal conserved region
  misc_feature (1)..(314): Xaa is any amino acid
MSDYDEYEDEEDISALEDNHEIKLQEHDVITGADAGIESIAPDAPIYRLRLLYSQETFLAVYREDNLAPNTMVIVPTRYGRDLAQVIGSVHGKLPSVSEIAWIVRAAAPEDLEKSRNNTKLEKEAFDICKKKIMNHKLEMKLVLVHYLLEEPKILFFFTAENRVDFRELVKDLVSVFKMRIELRQIGVRDEARVTGGLGVCGRGYCCHCVSDKLKPVSLKMAKDQKLSLNSVKISGPCGRLLCCLFYEYGFYSEQQRNLPQEGMRASFNNETWKISEVNPIACQIKLVHEDGRLMTVPACQFERVDNHWKIKSS

SEQ ID NO: 72439 - DNA, 1398 bp, Unknown
  Obtained from environmental sample
  misc_feature (1)..(1398): n is a, c, g, or t
ttgaaatactttaagttgtccgaagatgtttttaattggttgtccgattttatcaaccttgagcggggacaaaagcctaaaagtttcagaatagaacgcatgcatgttttaacagagcttgcggatcatccggagaattgtgcgccttctattcacattgctgggtcgaagggcaagggatcggtaacaagtatgttatcctccatgttaaccgcaggcggtcttcgtgtggctcgctatatgtcgccccatgtaaccgacataagagaacgcatctgcctgggcgatttatatttcagcgaagacatatacagctcttgcggcgacgaactgaaaaacattgtggaagaacgtttacccgcccttgtaaaaacgcaagcggcggcggcggagcttttttctccgaattccgacgacggatgcgaacccacattttgggaattattaacgctgttattttttctctgcgccagaaaagcaaaatgcgacgcgatggtagtggaaacaggaatgggcgggcggcttgattcgaccaatgtgcttgatccattggtcagcgtaataacattaatcgaattggaacacacaagttttttaggcgaaacaatcgaagcgattgcggaagaaaaagcggggattataaaaaagggcaaacctttagtcttggcaaaacaatgcgatgaagcgttaaaagtatttcaagaaaaaacgcgggagaaaaacggtcccttaatttattttccgcaaaccgcaaatctttccggcataaacataaccacgcaaggcacggatttttcgctctctttcaaccccgataaaatcatgccgcaaacttcgctgttatctctctccattccaatccccggaaaagtgcaggctgaaaacgcctctctcgccattgccgcgcttaaaatcgctttcccaaaaatcagcgaagacgcaatccgagacggtcttaaaaaactaaaaatccccgcccgctttgaaaaattatctccctcgcaggacagcggcgcgccgcccttcatcattgacggcgcacacaccgccgaaagtcttgccctttgcatagaaactttttgccacctctacggtaaaagcggcgttctcctcttcggctgcgccgccgacaaaaactccgcggcaatggcggaaatagcgtgtccgcacttcgcaaaaatatttatcaccacacccggaactttcaaagcaagcgaacctgacaaagtttacaaaagttttgcggaaatcgcgggaaaggaaaaaattgcgcttgtaaaggatacgcaagaagcggttaatcaggcgatttcattcgcaagagaaaaaaatcttccgacacttgggacggggtctttttacttggcagcggagattagaaaatatttttacggttag

SEQ ID NO: 72440 - protein, 465 aa, Unknown
  Obtained from environmental sample
  DOMAIN (324)...(413): Mur ligase family, glutamate ligase domain
  misc_feature (1)..(465): Xaa is any amino acid
MKYFKLSEDVFNWLSDFINLERGQKPKSFRIERMHVLTELADHPENCAPSIHIAGSKGKGSVTSMLSSMLTAGGLRVARYMSPHVTDIRERICLGDLYFSEDIYSSCGDELKNIVEERLPALVKTQAAAAELFSPNSDDGCEPTFWELLTLLFFLCARKAKCDAMVVETGMGGRLDSTNVLDPLVSVITLIELEHTSFLGETIEAIAEEKAGIIKKGKPLVLAKQCDEALKVFQEKTREKNGPLIYFPQTANLSGINITTQGTDFSLSFNPDKIMPQTSLLSLSIPIPGKVQAENASLAIAALKIAFPKISEDAIRDGLKKLKIPARFEKLSPSQDSGAPPFIIDGAHTAESLALCIETFCHLYGKSGVLLFGCAADKNSAAMAEIACPHFAKIFITTPGTFKASEPDKVYKSFAEIAGKEKIALVKDTQEAVNQAISFAREKNLPTLGTGSFYLAAEIRKYFYG

SEQ ID NO: 72441 - DNA, 1416 bp, Unknown
  Obtained from environmental sample
  misc_feature (1)..(1416): n is a, c, g, or t
atgaatgttgaattatattctctcggcgccgccgaagaggttacaggttccaagcatgtgcttgagattgacgggcaaagttatcttattgattgcggagctttccaaggttccagagcggaagcggatcgaaaaaacagggactttggcatcgcggttgaccgcataaacagcgttattttgactcacggtcatcttgatcattgcggtcttttgcctctgttggtaaaacagggctacaagggaaatatttacgctactcccgcaacaagggacattgcaagtttgataatgatggattccgccaacattcaagcgcacgacgcaaagttcctgcaaagtcaggctaataaaaaaggagaaaaatttacatggactccgctttttaccgaacaggacgcaataggggcggtcgggcagacaatcggagtttcatataacagaccgatgtttatcggcgacggggtcagtcttgaattttacgatgcggggcacattcttggttccgcaatcgccgacataaaaattaaaaaaggcggcgaagaattaaacattcttgccacaggcgatttgggacgcaagggcaagccgattatccgcgaccccgcgattcccgaaacagcgcccgactacatcattcttgaaagcacttacggcgacagaaggcacgactcaaccgatgaggcgatagaaaaactcgctacaatggctaaacgtaccattgaaagaaagggaaaaatactgattccttcttttgcgattgaacgcactcaggagcttgtttattattttcaccttctggtagacgacggcactattcccgaagttcccatttttgtcgactcgccgatggcaaccaacgcgacgacaatttttcaggtacaccccgaatgttacggagaagaaataaaacaggcgtttatcaaacatcataaaaacccgtttggttttaacagtctgcattttactaccagcgttcaggaatcaaaggatttaaatgattgtaaaggaccgcttatcataatttccgccgacggaatgtgcgaagccggacgcattcaacatcatcttattaataatatccaagaccccaacaccacaattatgacagtcggctacatggcggaaaacactctggggcggcgcatacgcaaccgcgaaggcgaagttaaaattcacggcgactggtacaaactaaaagcgcaggtagaggaaataaacgctttcagcgcccacgccgattattttgaaatactggagtggcttaaaaaagttgatacttctaaattaaaagggatatttcttgttcacggcgaaaagaaagcgcaggcgttccttaaaaaatatcttgaagaaaacggctacccgaatgtcgagataataaaatacggcaaaacatacgaactgacaaattga

SEQ ID NO: 72442 - protein, 471 aa, Unknown
  Obtained from environmental sample
  DOMAIN (395)...(441): RNA-metabolising metallo-beta-lactamase
  misc_feature (1)..(471): Xaa is any amino acid
MNVELYSLGAAEEVTGSKHVLEIDGQSYLIDCGAFQGSRAEADRKNRDFGIAVDRINSVILTHGHLDHCGLLPLLVKQGYKGNIYATPATRDIASLIMMDSANIQAHDAKFLQSQANKKGEKFTWTPLFTEQDAIGAVGQTIGVSYNRPMFIGDGVSLEFYDAGHILGSAIADIKIKKGGEELNILATGDLGRKGKPIIRDPAIPETAPDYIILESTYGDRRHDSTDEAIEKLATMAKRTIERKGKILIPSFAIERTQELVYYFHLLVDDGTIPEVPIFVDSPMATNATTIFQVHPECYGEEIKQAFIKHHKNPFGFNSLHFTTSVQESKDLNDCKGPLIIISADGMCEAGRIQHHLINNIQDPNTTIMTVGYMAENTLGRRIRNREGEVKIHGDWYKLKAQVEEINAFSAHADYFEILEWLKKVDTSKLKGIFLVHGEKKAQAFLKKYLEENGYPNVEIIKYGKTYELTN

SEQ ID NO: 72443 - DNA, 1287 bp, Unknown
  Obtained from environmental sample
  misc_feature (1)..(1287): n is a, c, g, or t
atgaaaaagatattttttgtaatttgcctgctattttcattctctttttgcttcgctcaggagactcctactgtacaagtagttcctgatacgcagaaaagccctgaaattcaggaaacccttgcagagactgagattaaatccgatattgttactgaaaaagaacatatagcaaaagaaaaagtaacggaactcgactccgtaacatcggtaacgcctcttttgccagttgctaagaggataaaggaagaaagaccttttttatacagacttggaatagcgctcgcgatagtcgttgggcaggctctgttattatggataatttggtttttctttaaaaggttaaatacaaaaatcgttactaccggaagagaaaaaataaaaccgttttatattaataaattcagagtgctttcggaaaaacatgttattaatctaatcgaagttgtattaaagctggtaaaatatgttgttaccgcgatacagctttttcttacgataccgattattttcagtttgttcaccgctacaaaggatatagcgtcgttattattcggttatattttaaatccgataaaacgtatcgctataggcatgatagaatacattccgaatctttttacaattatcatcataattaccattacccgttatgtgctaaaagcgcttaaatattttgcggctcaaataacaaaaggcaaattgcagcttcccggtttttacgcggactgggcgtctcctacattaagaattttacaggtgcttttatgggcgtttaccgttgcggttatatatccctatttgccgggatcggaatcaagggcttttcagggagtttcggtttttatcggtattattttttccgtcggctcgacaagcgcgattggaaatcttgtcgcgggtcttgtaattacatatatgcgtccttttaaattaggcgaccgcgttcaaattaaagaggtaacaggttttgtcgtggaaaaaaatctgatggtagtgcggttaaggacgcataagaacgaatatgtgacatttcccaatgtgattattttgggatcgaatattattaattacaatacgtcgtccgatgaagacgaagaaggtttgataatttatacggagattacttttggttatgcgaccccttggcagaaaatacatgacatattgataagcgccgcgcttaatacggagtatgttcaaaaaactccaagaccttttgtgctccaaactaaattggatgatttttacgcaagttatcagattaactgtatacgaaagaagtaa

SEQ ID NO: 72444 - protein, 428 aa, Unknown
  Obtained from environmental sample
  SIGNAL (1)...(19)
  DOMAIN (250)...(428): Mechanosensitive ion channel
  misc_feature (1)..(428): Xaa is any amino acid
MKKIFFVICLLFSFSFCFAQETPTVQVVPDTQKSPEIQETLAETEIKSDIVTEKEHIAKEKVTELDSVTSVTPLLPVAKRIKEERPFLYRLGIALAIVVGQALLLWIIWFFFKRLNTKIVTTGREKIKPFYINKFRVLSEKHVINLIEVVLKLVKYVVTAIQLFLTIPIIFSLFTATKDIASLLFGYILNPIKRIAIGMIEYIPNLFTIIIIITITRYVLKALKYFAAQITKGKLQLPGFYADWASPTLRILQVLLWAFTVAVIYPYLPGSESRAFQGVSVFIGIIFSVGSTSAIGNLVAGLVITYMRPFKLGDRVQIKEVTGFVVEKNLMVVRLRTHKNEYVTFPNVIILGSNIINYNTSSDEDEEGLIIYTEITFGYATPWQKIHDILISAALNTEYVQKTPRPFVLQTKLDDFYASYQINCIRKK

SEQ ID NO: 72445 - DNA, 2052 bp, Unknown
  Obtained from environmental sample
  misc_feature (1)..(2052): n is a, c, g, or t
ttgaaagactcaaggggtcagcctgcgggatataaagtaacctacagccttatcgacaaagaaaacaaggaggacgggaaggagttacagcagggtcaggaaccaaaaacagaaaataaagacgataagaaaaaagatgagtctgttacagccgatacggataaatccaaagaaaccgccaaagaagacgcttccgccggcaataacgccgcctccaacacaactacaggtaccgacaaaaacaaagaaacctctactgccactaccggcactgataaaaacaaagaaactactaccactaccggtacagataaaaacaaagaaacccctactgccactgccggcactgataaaaacaaagaaacccctaccaccactgccggcactgataaaaacaaagaaactactaccactaccggtacagataaaaacaaagaaacccctactgccactaccggtacagacaaaaacaaagaaacccctactaccactgccggcgctgataaaaacaaagaaacctctactgccactaccggcgctgataaaaacaaagaaacctctaccactaccggtactgataaaaacaataaagataaaaacgaaccggttgcagctaacacagatcctttagatatgtatgaacacatcaaaaccggcaatgaaataattttcccggtaaaaagccttgataaaaacctgcccttccttcctataccggccaatttgccggtcggaaagtatacgctggtctttcaggtaaaaggtaaaaatacaattctttacaaattcgaaaaacccttgttttaccttgcagacgcggaattttcttttgagggaatacaggtgcatttgcccggcattgccgaaagtttgcagtttattcaaaacaaaaacgtaattcttttggacgttcatctggatttcgacagccgccttgaaccttatgttgtttggtataacggaaaaaaaataattgatgagggccgttattccgacggagcgggaactttgttctggaaagcgcccgaacaaaacgggtttgtttccatccgcgccgaggtttttccttcatgggataagtcggggcttactggatatcaaaaagggatttcccttcttgtttcatcaaaagaagttgatatgcatcttctttccggagacacaacaaaccttcttcaatggtatgtctttgaagacgacttaaacgattcattaacgaaagataaagatttcggggaactgcttatagaaccggccggaaaaaacaagcctaactggatagcgtccaacggaacttacgggcttgcggccggaaccgacaacgcgtttaaacttcccgctgtttcaataaaaaacaaagaagatgagaacgcgaactggcaaattgtttcccgctttaaacctttaggcgaaggcgaaatttattccgtgcaattcggttccgccgatataaccgcggcgctgagcattaaaaaatcaaaccttattttatcattgacttccgcttccaataccgtttcagaagcgttaaaactgccaaatgaagacgattcatttaccgccgtatccgtaaaatttataattcaaaacggattattatcggcaaaacttgcttttgtaaagccgaatgaaaattttaacaaccaaaaagaacctgttataaatccaatcagcataaccgccgaggttgataaagatgtaaaaatcgtacttggaaacctgcaaaaaaaaccggcggacaacgcgcaaacagcggaggacaaggaaccggaggtaaaagaatctccgggtaaagaacctttggttaaggaaccttcggcgaaggaatcttcggttaaggaaccgccggttaaggaactttcggttccgggacagccttttacggcgctttgggatgaactggcgatcctccgccttcccgaagtaaaaattattaatatcaaaaaaaatacgaaagaagccaaagttgaagcgactgccgctgccgaaactgaactgccggaagcgggcgcagccaacatccccgatgacgaatcgaccctgccagaataa

SEQ ID NO: 72446 - protein, 683 aa, Unknown
  Obtained from environmental sample
  misc_feature (1)..(683): Xaa is any amino acid
MKDSRGQPAGYKVTYSLIDKENKEDGKELQQGQEPKTENKDDKKKDESVTADTDKSKETAKEDASAGNNAASNTTTGTDKNKETSTATTGTDKNKETTTTTGTDKNKETPTATAGTDKNKETPTTTAGTDKNKETTTTTGTDKNKETPTATTGTDKNKETPTTTAGADKNKETSTATTGADKNKETSTTTGTDKNNKDKNEPVAANTDPLDMYEHIKTGNEIIFPVKSLDKNLPFLPIPANLPVGKYTLVFQVKGKNTILYKFEKPLFYLADAEFSFEGIQVHLPGIAESLQFIQNKNVILLDVHLDFDSRLEPYVVWYNGKKIIDEGRYSDGAGTLFWKAPEQNGFVSIRAEVFPSWDKSGLTGYQKGISLLVSSKEVDMHLLSGDTTNLLQWYVFEDDLNDSLTKDKDFGELLIEPAGKNKPNWIASNGTYGLAAGTDNAFKLPAVSIKNKEDENANWQIVSRFKPLGEGEIYSVQFGSADITAALSIKKSNLILSLTSASNTVSEALKLPNEDDSFTAVSVKFIIQNGLLSAKLAFVKPNENFNNQKEPVINPISITAEVDKDVKIVLGNLQKKPADNAQTAEDKEPEVKESPGKEPLVKEPSAKESSVKEPPVKELSVPGQPFTALWDELAILRLPEVKIINIKKNTKEAKVEATAAAETELPEAGAANIPDDESTLPE

SEQ ID NO: 72447 - DNA, 627 bp, Unknown
  Obtained from environmental sample
  misc_feature (1)..(627): n is a, c, g, or t
ttggccggtataggaaggaagggcaggtttttatcaaggctttttaccgggaaaattatttcattgccggttttgatgtgttcatacatatctaaaggatctgtgttagctgcaaccggttcgtttttatctttattgtttttatcagtaccggtagtggtagaggtttctttgtttttatcagcgccggtagtggcagtagaggtttctttgtttttatcagcgccggcagtggtagtaggggtttctttgtttttgtctgtaccggtagtggcagtaggggtttctttgtttttatctgtaccggtagtggtagtagtttctttgtttttatcagtgccggcagtggtggtaggggtttctttgtttttatcagtgccggcagtggcagtaggggtttctttgtttttatctgtaccggtagtggtagtagtttctttgtttttatcagtgccggtagtggcagtagaggtttctttgtttttgtcggtacctgtagttgtgttggaggcggcgttattgccggcggaagcgtcttctttggcggtttctttggatttatccgtatcggctgtaacagactcatcttttttcttatcgtctttattttctgtttttggttcctga

SEQ ID NO: 72448 - protein, 208 aa, Unknown
  Obtained from environmental sample
  misc_feature (1)..(208): Xaa is any amino acid
MAGIGRKGRFLSRLFTGKIISLPVLMCSYISKGSVLAATGSFLSLLFLSVPVVVEVSLFLSAPVVAVEVSLFLSAPAVVVGVSLFLSVPVVAVGVSLFLSVPVVVVVSLFLSVPAVVVGVSLFLSVPAVAVGVSLFLSVPVVVVVSLFLSVPVVAVEVSLFLSVPVVVLEAALLPAEASSLAVSLDLSVSAVTDSSFFLSSLFSVFGS

SEQ ID NO: 72449 - DNA, 495 bp, Unknown
  Obtained from environmental sample
  misc_feature (1)..(495): n is a, c, g, or t
atgagtctgttacagccgatacggataaatccaaagaaaccgccaaagaagacgcttccgccggcaataacgccgcctccaacacaactacaggtaccgacaaaaacaaagaaacctctactgccactaccggcactgataaaaacaaagaaactactaccactaccggtacagataaaaacaaagaaacccctactgccactgccggcactgataaaaacaaagaaacccctaccaccactgccggcactgataaaaacaaagaaactactaccactaccggtacagataaaaacaaagaaacccctactgccactaccggtacagacaaaaacaaagaaacccctactaccactgccggcgctgataaaaacaaagaaacctctactgccactaccggcgctgataaaaacaaagaaacctctaccactaccggtactgataaaaacaataaagataaaaacgaaccggttgcagctaacacagatcctttag

SEQ ID NO: 72450 - protein, 164 aa, Unknown
  Obtained from environmental sample
  misc_feature (1)..(164): Xaa is any amino acid
MSLLQPIRINPKKPPKKTLPPAITPPPTQLQVPTKTKKPLLPLPALIKTKKLLPLPVQIKTKKPLLPLPALIKTKKPLPPLPALIKTKKLLPLPVQIKTKKPLLPLPVQTKTKKPLLPLPALIKTKKPLLPLPALIKTKKPLPLPVLIKTIKIKTNRLQLTQIL

SEQ ID NO: 72451 - DNA, 1431 bp, Unknown
  Obtained from environmental sample
  misc_feature (1)..(1431): n is a, c, g, or t
ttgcgagacagccgtgcttacaatgacgataatcccatcgccgctttcgccacaattcccggaagcggcgccctcacgttaatccgctgttcgggcaagggcgcgatagaggcggcatcttccgtctttgccccggacaaattaaacggcgcgtccggcaactccgtcatccacggctggatagttaaagacggcgaaaaaatcgacgaggtgcttgtctcggtcttccgcgccccgaaaagttacacgggcgaagacagcatggacatctcctgccacggcggcgcgagcgcgggaaaagccgtaatggccgcgctaagttccgccggctttcgggacgcgcttcccggcgaatttactttccgcgcttttttaaacggcaaactcgatcttacaaaagccgaatccgtcatggagcttgtttccgcaaagacagcaataagccgccgtcacgccgtgtcgcgtctttccggctccctgcaaacggaaatcgaggatataaaaaaatcgctggtgcaggttctttccggcgcggagatttaccttgactattcggaagatgaagtaggcgcggacgttgacgaggacgaaggaaaactcccctgcctgaacattgcgcttgaggcgttagaacgtcttaagaaactgtccgcttcctggcggatggagcgcatttatcaggagggggtaactgtagtgatagcgggacgccccaacgcgggcaagtccagtctttttaacgctctgttgaaagaggaccgttctatcgtaacagaaattcccggcactacccgcgactggatagaagcgtgggtttccgttgacggaatccccgtccgccttgttgataccgccgggcttagggaatccgccgaagctgtagaaaaaatcggagtggaccgcagccgcaaacttttacaggaagctgaccttgttctgtatttaattgacggaactcagggtgttacgggcgaagacagggattttattgattctgcgaataacggtaagacgatagacaacagcggcgcagattcggcgtatgaactttgtaacagacaacttcttatatggaacaaagcggatattgcgccagcgccatcacagaactatatcaacgtaagcgcgaaaaccggcgaagggctggcgcagatttacgccgcgatttcatcggcaattaaggaacagacgacggtacatcaagacgcgcctattaccgccgccgtcggaacggagaggcagaaaaagcttgtggacgccgcagtccgcgcgctggaagaggcgctcgctcttgcgcggcgggaagagccgctggatctaatcgccccgctgttgagggaagcggtcaactccctgggagaaattacgggagaggtatccactgccgatatattggaagaaatgttcagccggttctgcgtggggaagtaa

SEQ ID NO: 72452 - protein, 476 aa, Unknown
  Obtained from environmental sample
  DOMAIN (230)...(362): GTPase of unknown function
  misc_feature (1)..(476): Xaa is any amino acid
MRDSRAYNDDNPIAAFATIPGSGALTLIRCSGKGAIEAASSVFAPDKLNGASGNSVIHGWIVKDGEKIDEVLVSVFRAPKSYTGEDSMDISCHGGASAGKAVMAALSSAGFRDALPGEFTFRAFLNGKLDLTKAESVMELVSAKTAISRRHAVSRLSGSLQTEIEDIKKSLVQVLSGAEIYLDYSEDEVGADVDEDEGKLPCLNIALEALERLKKLSASWRMERIYQEGVTVVIAGRPNAGKSSLFNALLKEDRSIVTEIPGTTRDWIEAWVSVDGIPVRLVDTAGLRESAEAVEKIGVDRSRKLLQEADLVLYLIDGTQGVTGEDRDFIDSANNGKTIDNSGADSAYELCNRQLLIWNKADIAPAPSQNYINVSAKTGEGLAQIYAAISSAIKEQTTVHQDAPITAAVGTERQKKLVDAAVRALEEALALARREEPLDLIAPLLREAVNSLGEITGEVSTADILEEMFSRFCVGK

SEQ ID NO: 72453 - DNA, 1809 bp, Unknown
  Obtained from environmental sample
  misc_feature (1)..(1809): n is a, c, g, or t
atggattacgatacgattgtcatcggcggcggacacgcgggaatagaggcgtccctcgccgtcagccgccttggtttttcaaccctcctcatcacgcaaaaccccgacaggatagggacgctctcctgcaaccccgcgattggcggcctttcaaaaggcaaccttgtaagggaagtggacgctctcggcggagagatgggaaagctgacggacgcgacaatgatccagtaccgggtacttaaccgctcgcgcgggcccgcggtacaggctccgagagcgcaggcggacaagcacgcgtatcccgcggcggcgcgttccattcttgagaagcagaaaaatctgacgatttttatggacacggttacggacttaattgttgagggggcggacgcggacggagttgtaagagacgcttccgtttcgaaaattgcaggagtaattactaagcgcggacaccgcatcacggcgcgcaccgtgattctcgccgcgggaacttttatggaagggaaaatatttatcggcgaatatgacgcgccgaacgggcggcttggagaagaagcggcgttggggctcggcgcgtctttgcgccggttagggttcccgacaggaaggcttaaaaccggcactccggcgcgcttggcgggaaacacgatagattattcagtcatggaaaaacaggacagcgaagaaatgcgcccgttttcatttttcgcctccgataacgctgttgccgacagacccgccatgccatgctgggtcacgtacacaaacacaaaaacgcacgatattatcagagcgaatatcagccgctctcctttgtacggcggaaaaataacagggacgggggcgcgttattgtccctctatcgaggacaaggttatgcgcttttcgcacagggagcgtcatcatgtttttatcgagccggaagggcttgcgaccaacgagatgtacatgaacggcgcgtccagttccctgcccgaagacgtgcagagcgattttattcacagcatccgcggattagagaaggcgcacatagtccgccccggctacgcggtggagtacgattatattgatcccctggatctttttccgtcgctggagtcaaagcgcctgtccggttttttcaccgcgggtcagaccaacggttcttccggttacgaagaagccgccgcacagggaataatcgcgggaatcaacgccgcgatgaaaatgctgggaaagccgccctttatccttggccgcgccgaagcctacatcggcgtgcttgttgacgatcttaccacgcttggaacaaaggaaccgtaccgcatgttcaccagccgagccgaacaccgtttaatgcttcgccacgacacagccgacacaaggcttactcccaaagggcgcgaagccggtcttgtagacgatgcacgatgggaacactttttggaaaagacaaggaaactggacgaaataaaggaacttctcgcccggcgaaaagcggatgaagtttcagctaacgcgcttgaaggaaattcccttgcaggcaaaacgctttccgactatcccgcggaattggtggagcgcgctcttttggacaaaaagtacgcgggctacatcgaaaaggaaatccgttttgccgcgaaagccgccaaaatggacgcgattaaacttaatcccaatacggactactccgccgtcagcggactttcctccgaggcaaaagagaaactccaatccgtgaagccgctcaacgtaggacaagccgcccgaatcccgggcgtaaggcagggagacatagctatgttgattatactcgcaaggaaatga

SEQ ID NO: 72454 - protein, 602 aa, Unknown
  Obtained from environmental sample
  DOMAIN (4)...(408): Glucose inhibited division protein A
  misc_feature (1)..(602): Xaa is any amino acid
MDYDTIVIGGGHAGIEASLAVSRLGFSTLLITQNPDRIGTLSCNPAIGGLSKGNLVREVDALGGEMGKLTDATMIQYRVLNRSRGPAVQAPRAQADKHAYPAAARSILEKQKNLTIFMDTVTDLIVEGADADGVVRDASVSKIAGVITKRGHRITARTVILAAGTFMEGKIFIGEYDAPNGRLGEEAALGLGASLRRLGFPTGRLKTGTPARLAGNTIDYSVMEKQDSEEMRPFSFFASDNAVADRPAMPCWVTYTNTKTHDIIRANISRSPLYGGKITGTGARYCPSIEDKVMRFSHRERHHVFIEPEGLATNEMYMNGASSSLPEDVQSDFIHSIRGLEKAHIVRPGYAVEYDYIDPLDLFPSLESKRLSGFFTAGQTNGSSGYEEAAAQGIIAGINAAMKMLGKPPFILGRAEAYIGVLVDDLTTLGTKEPYRMFTSRAEHRLMLRHDTADTRLTPKGREAGLVDDARWEHFLEKTRKLDEIKELLARRKADEVSANALEGNSLAGKTLSDYPAELVERALLDKKYAGYIEKEIRFAAKAAKMDAIKLNPNTDYSAVSGLSSEAKEKLQSVKPLNVGQAARIPGVRQGDIAMLIILARK

SEQ ID NO: 72455 - DNA, 645 bp, Unknown
  Obtained from environmental sample
  misc_feature (1)..(645): n is a, c, g, or t
gtgtttcccgccaagcgcgccggagtgccggttttaagccttcctgtcgggaaccctaaccggcgcaaagacgcgccgagccccaacgccgcttcttctccaagccgcccgttcggcgcgtcatattcgccgataaatattttcccttccataaaagttcccgcggcgagaatcacggtgcgcgccgtgatgcggtgtccgcgcttagtaattactcctgcaattttcgaaacggaagcgtctcttacaactccgtccgcgtccgccccctcaacaattaagtccgtaaccgtgtccataaaaatcgtcagatttttctgcttctcaagaatggaacgcgccgccgcgggatacgcgtgcttgtccgcctgcgctctcggagcctgtaccgcgggcccgcgcgagcggttaagtacccggtactggatcattgtcgcgtccgtcagctttcccatctctccgccgagagcgtccacttcccttacaaggttgccttttgaaaggccgccaatcgcggggttgcaggagagcgtccctatcctgtcggggttttgcgtgatgaggagggttgaaaaaccaaggcggctgacggcgagggacgcctctattcccgcgtgtccgccgccgatgacaatcgtatcgtaa

SEQ ID NO: 72456 - protein, 214 aa, Unknown
  Obtained from environmental sample
  misc_feature (1)..(214): Xaa is any amino acid
MFPAKRAGVPVLSLPVGNPNRRKDAPSPNAASSPSRPFGASYSPINIFPSIKVPAARITVRAVMRCPRLVITPAIFETEASLTTPSASAPSTIKSVTVSIKIVRFFCFSRMERAAAGYACLSACALGACTAGPRERLSTRYWIIVASVSFPISPPRASTSLTRLPFERPPIAGLQESVPILSGFCVMRRVEKPRRLTARDASIPACPPPMTIVS

SEQ ID NO: 72457 - DNA, 642 bp, Unknown
  Obtained from environmental sample
  misc_feature (1)..(642): n is a, c, g, or t
atgataaaacttgccgcttttctggggaatccgggacgggaacacgctcttaacagacacaacgcggggtggatgcttgccgaggcgctgccgtttttcccttccctctcatggcaaaaaaagtacaaggggctttactcttcgcgggagaattttcactttttaaaaccggaaacctacatgaacctttcgggcgaatcggtttttgccgccgcctctttttataagattaatatagaagaaattatcatcgtccacgatgaactggaactccccctcgggacaatttcgctgaagttttcaggcggccttggggggcataacgggcttcgctcaatgaaaaaagttttcgggaacgcggatttttggcggcttcgtataggcattggccgccccgactcgcggcttccgggagaaggcgggcccaagggcagcggagaaggggtatatgactgggtgctgtccgacttttccggagcggagagggaaatacttaacccggcgcttgatgccggagcggggcttttgcaacagttgatttcaagcgaaccggaaaccttgctggacgaatggaagaaaaaaaatgtatcgggggcttcgccgcggagaaaaagcgaagaaccgcccgcggaggctgtatga

SEQ ID NO: 72458 - protein, 213 aa, Unknown
  Obtained from environmental sample
  DOMAIN (4)...(193): Peptidyl-tRNA hydrolase
  misc_feature (1)..(213): Xaa is any amino acid
MIKLAAFLGNPGREHALNRHNAGWMLAEALPFFPSLSWQKKYKGLYSSRENFHFLKPETYMNLSGESVFAAASFYKINIEEIIIVHDELELPLGTISLKFSGGLGGHNGLRSMKKVFGNADFWRLRIGIGRPDSRLPGEGGPKGSGEGVYDWVLSDFSGAEREILNPALDAGAGLLQQLISSEPETLLDEWKKKNVSGASPRRKSEEPPAEAV

SEQ ID NO: 72459 - DNA, 882 bp, Unknown
  Obtained from environmental sample
  misc_feature (1)..(882): n is a, c, g, or t
atggaagaaaaaaaatgtatcgggggcttcgccgcggagaaaaagcgaagaaccgcccgcggaggctgtatgaccggcgatacaaccgtaagcgaatcatttaaagaactgtacgacatcatcacaaagctgagagggccgggcggctgtccatgggatcaagaacagactccgtcctccttgcggggatcgttagttgaagaaacttacgagtgccttgaggccatagccgaaaatgaccttgatcatgtctgtgaagaattgggagatctgtttctgcttgtcaccatgatcgcctatatgcacgaacaggaaggaaaatttaccgtttccgacgcgcttaaaaaagtcagcgccaaattaatccgccgccaccctcatgtgttcgcggacgtaaaagtcagggacagcgctcatgtgcttgaaaactgggcggcgataaaagtgaatcaggagggacgcaagccgaaggattccgttcttgacgaggtaaaaggcggttttcctcccatggaccgcgctttcaaacttcagaaaaaagcggcaaaggttggttttgactggccggacgcgcaaggagtaatttcaaaaataaaagaagaactgcaggaagtaaccgaagccgaaaacaatattgcacgtaacgagcagacggataaaacggaactggaaaaagaactcggcgaccttttgttttcggtaatcaacctgtgccgcttccataaaatcgacccatcagcggctcttcatcggactaatgtaaaatttactgaacgctttaaatacgttgaatcaaagatgaaagaaacaggcaatgagatgataaaagaaaatctcgaaataatggacaaattctggaacgaagcaaaaaatttgaaatag

SEQ ID NO: 72460 - protein, 293 aa, Unknown
  Obtained from environmental sample
  DOMAIN (192)...(260): MazG nucleotide pyrophosphohydrolase domain
  misc_feature (1)..(293): Xaa is any amino acid
MEEKKCIGGFAAEKKRRTARGGCMTGDTTVSESFKELYDIITKLRGPGGCPWDQEQTPSSLRGSLVEETYECLEAIAENDLDHVCEELGDLFLLVTMIAYMHEQEGKFTVSDALKKVSAKLIRRHPHVFADVKVRDSAHVLENWAAIKVNQEGRKPKDSVLDEVKGGFPPMDRAFKLQKKAAKVGFDWPDAQGVISKIKEELQEVTEAENNIARNEQTDKTELEKELGDLLFSVINLCRFHKIDPSAALHRTNVKFTERFKYVESKMKETGNEMIKENLEIMDKFWNEAKNLK

SEQ ID NO: 72461 - DNA, 1080 bp, Unknown
  Obtained from environmental sample
  misc_feature (1)..(1080): n is a, c, g, or t
ttgcaaacaggcgttacgaaaagattcggtatattgacggcgggcggcgattgtccgggattgaacgcggctatacgcggcgtttgccgggcggcttatgatcgttacggcatggaaattatcggtatcgccaacggtttccgcggccttatcgacgaagattacagagtgctcaaacctgtggattttacgggcattcttacgcgcggcggaacaattctgggctcaagcagggagaaacctttttcttcttccggcgacgaggacgtaacagaaaaagtttcggcgataaaagaaacatacgcaaaactggaacttgactgccttgtaattctgggcggaaacggaactaatacaacaggatataaactttcgcgcgagggcctgaatatactcggccttccgaaaacaatagacaacgatattttcggcactgataaaactttcggtttcgattcggctctgacaatcggaacggaggccattgaccgtttgcactcaaccgcgcagagccacagcagaatcatcgttatcgagttgatggggcacaaagcgggctggctggcgctttacgccggagtcgcgggaggagccgacgttattctgctgccggaattcaattacgatatgaacgcgatttcccatcatcttgaaaaacgcgcaaagtccggcaggatgttttccatcgttgtagccgcggaaggagcgctgtccgtcaaagaagcggagatggataaaaaggacagaaaaaaattacgcgcggaaagcgggccgtccgtggcataccgcgtcgctcataaaattaccgaagagacaggaatggaaacacgcgccaccgttttaggatatgtccagcgcggaggaatccccagcgccgccgaccgcgttctcgccacaagccttggaaccgccgcggcggatcttctcgcaaacggcaaatacgggcgaatggtcgccctgcagggagacagcataggttcagtcgatctcagcatccccgaaggcaaagtgaaaaatgtcccgacggatcactacatgatcgacaccgccagagccgtcggcacttgcatggggttttag

SEQ ID NO: 72462 - protein, 359 aa, Unknown
  Obtained from environmental sample
  DOMAIN (7)...(311): Phosphofructokinase
  misc_feature (1)..(359): Xaa is any amino acid
MQTGVTKRFGILTAGGDCPGLNAAIRGVCRAAYDRYGMEIIGIANGFRGLIDEDYRVLKPVDFTGILTRGGTILGSSREKPFSSSGDEDVTEKVSAIKETYAKLELDCLVILGGNGTNTTGYKLSREGLNILGLPKTIDNDIFGTDKTFGFDSALTIGTEAIDRLHSTAQSHSRIIVIELMGHKAGWLALYAGVAGGADVILLPEFNYDMNAISHHLEKRAKSGRMFSIVVAAEGALSVKEAEMDKKDRKKLRAESGPSVAYRVAHKITEETGMETRATVLGYVQRGGIPSAADRVLATSLGTAAADLLANGKYGRMVALQGDSIGSVDLSIPEGKVKNVPTDHYMIDTARAVGTCMGF

SEQ ID NO: 72463 - DNA, 627 bp, Unknown
  Obtained from environmental sample
  misc_feature (1)..(627): n is a, c, g, or t
atgattttcattgtcctcatagacgatcaccctatgcttaccggcgctataggagtgtggctggaggctgaggggcgatttacaattgcggggacagcggcaaatcttgaggaagcgcgcaaactgatgaaagagcttgaaactctgcctcaaattgtaattcttgatatatcgttgggaagcgggaacaaggattcggttcaagaagacgggcttacctttattcccgaattggaaaaaatttgtaaaaaaagaaacgcgcccatgccgaatgtgcttgtttgctcaatgtacgaagatccgtttttggtgcagagggcgatggatttgggagcgaaagggtatgtggcgaagtcggcggtagcgggggaaataaccgccgccatagacaccatccttgccggggaaacttatacaagcgtcaaaattaaaaaacaggataagaaaaaaacatttcctgcactcacgcggcgggagagcgagattgccgcgcttgtaaaacaatccttgtccaatcagcaaatcgccaaaatgctcgagttaaacaatcgtactgtgaataatcatctcagaagcatttacgaaaaaacaggcgttacatcgcggaaagagttgtttgatctgtaa

SEQ ID NO: 72464 - protein, 208 aa, Unknown
  Obtained from environmental sample
  DOMAIN (152)...(208): Bacterial regulatory proteins, luxR family
  misc_feature (1)..(208): Xaa is any amino acid
MIFIVLIDDHPMLTGAIGVWLEAEGRFTIAGTAANLEEARKLMKELETLPQIVILDISLGSGNKDSVQEDGLTFIPELEKICKKRNAPMPNVLVCSMYEDPFLVQRAMDLGAKGYVAKSAVAGEITAAIDTILAGETYTSVKIKKQDKKKTFPALTRRESEIAALVKQSLSNQQIAKMLELNNRTVNNHLRSIYEKTGVTSRKELFDL

SEQ ID NO: 72465 - DNA, 1314 bp, Unknown
  Obtained from environmental sample
  misc_feature (1)..(1314): n is a, c, g, or t
atgcggaaaaatgttaaggcgtttttaataatagccgcggtaatgctggcatcaaactgtgaaagtaaaaactctcagcaagaattgcggccttcggtttccaacatcgccaacgcgtggcttgatataaacactaagctcgctccgcttgatatgacggaaacattttattcaaacggaattgttttacaaatcgaagaatttaacgacagccttaacaagtttattaactctcctttaggtcatctgtatcagacgcacaggaaagaggatatgcgcctgttggaaatttccgccgccgtaaatgggcttaaagccgccatacaaaacggcgacgagcgggaagtcttttcaaacacccttgaaattgacagggcggtaagcatactgcagagagttgacgcggagctttcagtcacaaaccaattaagttcttttcaactgttcttttttttagcgttaataattatcgcaataacttttatcctgtcggcttatcgaaacaggcataaaatagaaaagctgcagcaccagcagagcatttctttttcgagggaaaccatgctcgcgcaggaacatgagcgctcgcggatagcgagggaattgcacgacacggtggcgcaagaccttttgcggctttcgcttcaaacggaaataattaaaaaagaagcggtatccgaaaagcagagccaactttgcgcggcagtagcggaaggccaaacggaattgttaaacagaataagaaacatctgcaacgatttacttccgcctgactttcagccaagcgggattagctatatccgcctacccgacgctctgcggaatctttgcggcgcgtttgaaaagcgcacaggcattgaatgtaacataacgatacatgacgacgcggatttcagctttcttgacgttgatacgcagctgcactgtttccgcattgttcaggaatgtcttgctaatattgaaaaacacgcggaagcaaataatgtatctgtacttgtccgcagtaataccgaaggggaactgctgttttttgttacagataacggcaaaggttttgaaaaaacggacaatgattttttccgcgttatgagagcgaaagggcatttcggcctgtggaatatgcaggagagagccgcttccatgaacggcgttttcagcattgacagcgaaattggggaagggacgtcaataaagttaatcataccccccccccccccctatttccggcgaggcggagtgaaatatgattttcattgtcctcatagacgatcaccctatgcttaccggcgctataggagtgtggctggaggctga

SEQ ID NO: 72466 - protein, 437 aa, Unknown
  Obtained from environmental sample
  SIGNAL (1)...(22)
  DOMAIN (194)...(259): Histidine kinase
  misc_feature (1)..(437): Xaa is any amino acid
MRKNVKAFLIIAAVMLASNCESKNSQQELRPSVSNIANAWLDINTKLAPLDMTETFYSNGIVLQIEEFNDSLNKFINSPLGHLYQTHRKEDMRLLEISAAVNGLKAAIQNGDEREVFSNTLEIDRAVSILQRVDAELSVTNQLSSFQLFFFLALIIIAITFILSAYRNRHKIEKLQHQQSISFSRETMLAQEHERSRIARELHDTVAQDLLRLSLQTEIIKKEAVSEKQSQLCAAVAEGQTELLNRIRNICNDLLPPDFQPSGISYIRLPDALRNLCGAFEKRTGIECNITIHDDADFSFLDVDTQLHCFRIVQECLANIEKHAEANNVSVLVRSNTEGELLFFVTDNGKGFEKTDNDFFRVMRAKGHFGLWNMQERAASMNGVFSIDSEIGEGTSIKLIIPPPPPYFRRGGVKYDFHCPHRRSPYAYRRYRSVAGG

SEQ ID NO: 72467 - DNA, 387 bp, Unknown
  Obtained from environmental sample
  misc_feature (1)..(387): n is a, c, g, or t
atgcccataaggaatgagaaaatgatgaataccaatttagacagcagattcaaagaagcggaaagccattatacaaaaggtttagctatagaagagaactcgtttctacatgatgacgcaaaagccgaacacgccaaagcggacaaagagtatgagaaagcgtttgcgatatatgaagaactagccaaagaaaactataccgaagccatatttaagcaaggctattgttacagcgcaggtataggcgtaaaacaggacaaacccaaagccctcgaatgttttaaaaaagccgccgaacaggggcacgaattggcaaaaaaagcattaaatgaaataaaagaaaaaggttatctgttaatgagttttggctacaaagcggaaatataa

SEQ ID NO: 72468 - protein, 128 aa, Unknown
  Obtained from environmental sample
  DOMAIN (67)...(102): Sel1 repeat
  misc_feature (1)..(128): Xaa is any amino acid
MPIRNEKMMNTNLDSRFKEAESHYTKGLAIEENSFLHDDAKAEHAKADKEYEKAFAIYEELAKENYTEAIFKQGYCYSAGIGVKQDKPKALECFKKAAEQGHELAKKALNEIKEKGYLLMSFGYKAEI

SEQ ID NO: 72469 - DNA, 825 bp, Unknown
  Obtained from environmental sample
  misc_feature (1)..(825): n is a, c, g, or t
ttgcagagtaaaacattcttgtataagagtggaaggttttatatttgtcgtgcggacgcgtacccaaagggtacgaaagcgcagaaggagagagttatgaaagaatgggaagaatatgcaatcaaatcaataaattgtagtaaaaatggcaatcatgacgaggcaataacttattgcaaaaaggctgtttctttgtgtgatgatgatagtgaattcggaaatctatactacaatctaggtattgaatttgcttttagtaatgatattcaaaatgcaatcgccagcttaaaaattgcatctgacttaggttgcgaagacgcactagaatttcttaaagatagaggtataaactacacgccgaaaaagccttcatcatcaagcgcaccgaacagcggcggttcatcggcaatgccgccgccaagaccggcggcgcaaccggcaatgccgccaccaagaccagcggcgcaacaacaatcatcatcatcggcatatcctccggtatcaagccttccgcaaaattttactggaatagcggaaaaacatatatttccaaatggagaaatttacaaaggcgaatggaattacggtaacccttgtggtaatggagaaatgatctataaagacggaactgtttatgaaggtgaattttttgacggaagacccaacggcataggaagaataaaatataaagacggcagggtatatgaaggcaaagtttttaattacagaccggatggcaaaggcaaaatgacctacccaaatggaaaagttgaagaaggtaaatggaaagacggcaattttaaaggtaaaggattgtttggctaa

SEQ ID NO: 72470 - protein, 274 aa, Unknown
  Obtained from environmental sample
  DOMAIN (235)...(257): MORN repeat
  misc_feature (1)..(274): Xaa is any amino acid
MQSKTFLYKSGRFYICRADAYPKGTKAQKERVMKEWEEYAIKSINCSKNGNHDEAITYCKKAVSLCDDDSEFGNLYYNLGIEFAFSNDIQNAIASLKIASDLGCEDALEFLKDRGINYTPKKPSSSSAPNSGGSSAMPPPRPAAQPAMPPPRPAAQQQSSSSAYPPVSSLPQNFTGIAEKHIFPNGEIYKGEWNYGNPCGNGEMIYKDGTVYEGEFFDGRPNGIGRIKYKDGRVYEGKVFNYRPDGKGKMTYPNGKVEEGKWKDGNFKGKGLFG

SEQ ID NO: 72471 - DNA, 552 bp, Unknown
  Obtained from environmental sample
  misc_feature (1)..(552): n is a, c, g, or t
atgaaagaaaaactgacttttgaaaacggcgcggtatacgaaggcgaaacagctaacggcgtaccaaacggcaaaggaaagctgacatggcaaggcgagactgatctggacggcgttataagaatatacgaaggcgattttgttgaaggcaaaatgcagggcaaaggcaaattgacgataaacgccgacaagtacgcgggcaaaacagaatccggcgaataccggggcgatgacgtatacgaaggcgattttgtagacggcaaacgccacggcaaaggcaaaatgacatggaacatgggcgacatatacgaaggcgattgggaagacgacactcaacacggcaaaggaaaattcacacattataacggcgcagtctacgaaggcgattttgtaaccaactggtctcaaggtaaaggaaaaatgacatgggcagacggttctgtctacgaaggcgattttgtggacggcaatctacacggcaaaggaaaaatgacctacccagacggcaaagttgaagaaggacgttttgaaaacggcgagtttattgggtaa

SEQ ID NO: 72472 - protein, 183 aa, Unknown
  Obtained from environmental sample
  DOMAIN (126)...(148): MORN repeat
  misc_feature (1)..(183): Xaa is any amino acid
MKEKLTFENGAVYEGETANGVPNGKGKLTWQGETDLDGVIRIYEGDFVEGKMQGKGKLTINADKYAGKTESGEYRGDDVYEGDFVDGKRHGKGKMTWNMGDIYEGDWEDDTQHGKGKFTHYNGAVYEGDFVTNWSQGKGKMTWADGSVYEGDFVDGNLHGKGKMTYPDGKVEEGRFENGEFIG

SEQ ID NO: 72473 - DNA, 495 bp, Unknown
  Obtained from environmental sample
  misc_feature (1)..(495): n is a, c, g, or t
atgagtaacagccggaaaaaaagcgacgctgaaaaacccgaagttcaacccaggccgtttgactttatcaataattatgatccgatggaagtattgcgcgtgatagagcgtgaataccctctttttatagcgataatattatcgtatttggagccgcccaaagcgtcggtgttgttgcagaatctgcccaaagaaaaaaaaggagaggtagcccgcttaattgcgacaatggacgtgataagccttgaaataatccggggcatagaacggagcgtaaaaaagaaactgtcagccaaagacccctacggaacagcaggcggcgttgataacgcagtggaaatactcgaactggcagatcaggattcaaaggatcaaataatgagatacataaaagccaaagaccccgaacttgccgatgaaatgcagaaccggcggctggcggcaggaagaacgctgtcagataatgaaatcaatgatctggcaaaaaacctttga

SEQ ID NO: 72474 - protein, 164 aa, Unknown
  Obtained from environmental sample
  misc_feature (1)..(164): Xaa is any amino acid
MSNSRKKSDAEKPEVQPRPFDFINNYDPMEVLRVIEREYPLFIAIILSYLEPPKASVLLQNLPKEKKGEVARLIATMDVISLEIIRGIERSVKKKLSAKDPYGTAGGVDNAVEILELADQDSKDQIMRYIKAKDPELADEMQNRRLAAGRTLSDNEINDLAKNL

SEQ ID NO: 72475 - DNA, 372 bp, Unknown
  Obtained from environmental sample
  misc_feature (1)..(372): n is a, c, g, or t
atggaagaagtcactttacgctattttattaaaacagtcgtaacctgctccgcagggaaaagatattgttttattcttggagccggagcttcgaaagcgtccggaattaaaaccggtacagaaatggcaagggaatggctggaggagatagaaaaaaatgagttcaagacgtcatttcaggaatggattaaaaaaaataaaatagataaaaacgatcctggttcatattactcaaagatatatgagcagtgtttcagattagatcctgcaagcggattcatcacatcacacaatgaaatggaaaaggcaattccaagtccgggttattattatttagccgaaattcctacaggactcaaaataaactggtaa

SEQ ID NO: 72476 - protein, 123 aa, Unknown
  Obtained from environmental sample
  misc_feature (1)..(123): Xaa is any amino acid
MEEVTLRYFIKTVVTCSAGKRYCFILGAGASKASGIKTGTEMAREWLEEIEKNEFKTSFQEWIKKNKIDKNDPGSYYSKIYEQCFRLDPASGFITSHNEMEKAIPSPGYYYLAEIPTGLKINW

SEQ ID NO: 72477 - DNA, 681 bp, Unknown
  Obtained from environmental sample
  misc_feature (1)..(681): n is a, c, g, or t
atgcacctgacaccgagagagcaggaacggcttttaatccattgcgccggacagcttgcaaaagcgcgcaaggagcgagggctaaaactgaatcatcctgaggcgatagcctatattacatcggaacttttggaacttgcgcgcgacggtcaatccgttacagagcttatgcgcgcgggaaccaaacttttgggagccgacgacgttttagacggcgttgccgagatgatccacgaaattcaacttgaggcgactttccccgacggcactaaacttgttaccgtacacgaaccgattccctcaaacggaaaggcgcaccccggcgaatttatttttgacggcgaaccaatcaccgtaaacgccggaaagaacaccgcagaaatcaatgtcgtcaacacgggagaccgtcccgttcagatcggctctcactttcacttttttgaagttaacaaggcgctggactttgaccgcgccgccgctttcggtatgcggcttgatattccctccggaaccgccgtcaggtttgaaccgggcgacagccagactgtacgccttgtaaaaatcggcggaacacgaatggggcacggattgaacagccttaccaacggcagtatggacgacccgaaagtaaaaaccgccgccgttgaaaaagcgcgcagcttgggatttaagggggtatga

SEQ ID NO: 72478 - protein, 226 aa, Unknown
  Obtained from environmental sample
  DOMAIN (1)...(99): Urease, gamma subunit
  misc_feature (1)..(226): Xaa is any amino acid
MHLTPREQERLLIHCAGQLAKARKERGLKLNHPEAIAYITSELLELARDGQSVTELMRAGTKLLGADDVLDGVAEMIHEIQLEATFPDGTKLVTVHEPIPSNGKAHPGEFIFDGEPITVNAGKNTAEINVVNTGDRPVQIGSHFHFFEVNKALDFDRAAAFGMRLDIPSGTAVRFEPGDSQTVRLVKIGGTRMGHGLNSLTNGSMDDPKVKTAAVEKARSLGFKGV

SEQ ID NO: 72479 - DNA, 1752 bp, Unknown
  Obtained from environmental sample
  misc_feature (1)..(1752): n is a, c, g, or t
ttgaaaaagcgcgcagcttgggatttaagggggtatgacatgtttgaaatgacaagaaaacaatacgcgagtatgtacggacccacaacgggcgacagaatccgccttgccgatacatcgatcattatcgaagttgagcgcgacttaacggtctacggagaggaagcgaaattcggcggaggcaaatccctgcgcgacggaatgggtcagtcatgcggagtaaaggactccgattgccccgaccttgttatcacaaacgcagtaatattggatcacacgggaataataaaagcggacatcggtattaaagacggaaaaatttgcggcgtaggaaaagcgggaaatcccgacatcatggacggcgtaacaaaaggactcacggtcggcgcgtctacggaaattatcgcgggcgagggcatgattgtcaccgccggcggtatcgacacacatatacattttatcagtcccactcaaattgagaccgcgctgtattcgggagttacaaccatgataggcggcggaacgggaccagcggacggaacaaacgccactacctgcacgccgggacgcttcaatcttgaaaaaatgattgaggcggcggaaggctacccgatgaatctcggttttctcggcaagggcaacagttcttcccttaacgctctcattgaacaaattgaggcgggagcgtgcggacttaaaatccacgaggactggggctccaccgccgcagttgtccgcgccgcgcttgacgccgccgacaagtacgatgttcaagtcgctattcacaccgacacgctgaacgaaggcggctttgttgaagacacactcgccgcgataggcgggcgcgtcattcacacataccacacagaaggagcgggcggcggacacgcacccgacattatcaaagcggcggctctgccgaacattctgccgtcgtcaacaaaccccacaatgccgtttaccgtcaacaccgttgacgaacatcttgatatgctgatggtctgccaccacttggacagccgcgtacccgaagatgtcgcgtttgccgattcgcgtatccgccccgaaaccatcgccgcggaagacgtattgcacgacatgggaattttttcgatgatgagttccgactcacaggcaatggggcgagtaggcgaagtgatcatgaggacatggcagaccgcaagcaaaatgaaagaccagcgcggtcatcttgccgaagacaatgatcgcaacgacaactatcgggctaagcgttatgtttctaagtacacgataaaccccgccgttacccacggcattgcggattatgtcggctctgtggaagcgggcaaatacgccgacttggttatctggaaccccgcgctcttcggcgcaaaaccggagatgatcataaagggaggatacataatagcgtccaaaatgggcgacgcaaacgcttccattccgacgccgcagcctgtgatatacagaaatatgttcggcgcttccgacttggcgcgcaagcgtacatgtatcacctttgtatcgggcgcggcggcaaagagcggaatcggcaaacggcttggacttgaccgcgttgtccttcccgtaaagaactgccgcaaattgtcaaaagcggatatgtgttttaatgaccgcacgggagacatcaaggttgatcccgaaacatacaccgtaaccgtggacggaaagaaagtaacctgcgaaccggctgaaagccttagtctaacaagaaagtattggctgttttaa

SEQ ID NO: 72480 - protein, 583 aa, Unknown
  Obtained from environmental sample
  DOMAIN (15)...(135): Urease alpha-subunit, N-terminal domain
  misc_feature (1)..(583): Xaa is any amino acid
MKKRAAWDLRGYDMFEMTRKQYASMYGPTTGDRIRLADTSIIIEVERDLTVYGEEAKFGGGKSLRDGMGQSCGVKDSDCPDLVITNAVILDHTGIIKADIGIKDGKICGVGKAGNPDIMDGVTKGLTVGASTEIIAGEGMIVTAGGIDTHIHFISPTQIETALYSGVTTMIGGGTGPADGTNATTCTPGRFNLEKMIEAAEGYPMNLGFLGKGNSSSLNALIEQIEAGACGLKIHEDWGSTAAVVRAALDAADKYDVQVAIHTDTLNEGGFVEDTLAAIGGRVIHTYHTEGAGGGHAPDIIKAAALPNILPSSTNPTMPFTVNTVDEHLDMLMVCHHLDSRVPEDVAFADSRIRPETIAAEDVLHDMGIFSMMSSDSQAMGRVGEVIMRTWQTASKMKDQRGHLAEDNDRNDNYRAKRYVSKYTINPAVTHGIADYVGSVEAGKYADLVIWNPALFGAKPEMIIKGGYIIASKMGDANASIPTPQPVIYRNMFGASDLARKRTCITFVSGAAAKSGIGKRLGLDRVVLPVKNCRKLSKADMCFNDRTGDIKVDPETYTVTVDGKKVTCEPAESLSLTRKYWLF

SEQ ID NO: 72481 - DNA, 456 bp, Unknown
  Obtained from environmental sample
  misc_feature (1)..(456): n is a, c, g, or t
ttggctgttttaattatggttatcgaaaaaattttaggaaagaaaccggaaaacaccgacggaaaaattattgaaaccgtcccctttgaatggtttgaaatgaacaacaagattttaaagaaggtatcttcaaaggggacggaaatcggactaaggctttcggagccattgttcgacggcgcggtgctgtacgaagacagcgaaaaaattatctgccttgaacttctgccatgcgagacaacgcggatacacgttcacagcataaaagaaatggggcgcgtttgttttgaactcggcaaccgccacctgccgctttccattgcggaagattccgtaagcactccctatgacaacccaacctatgaatatttggaaaaactgaaatttcactgcgaacgcgtgacggaaaaatttacgccggagataattacccatggacacggacaccaccattga

SEQ ID NO: 72482 - protein, 151 aa, Unknown
  Obtained from environmental sample
  DOMAIN (9)...(75): UreE urease accessory protein, N-terminal domain
  misc_feature (1)..(151): Xaa is any amino acid
MAVLIMVIEKILGKKPENTDGKIIETVPFEWFEMNNKILKKVSSKGTEIGLRLSEPLFDGAVLYEDSEKIICLELLPCETTRIHVHSIKEMGRVCFELGNRHLPLSIAEDSVSTPYDNPTYEYLEKLKFHCERVTEKFTPEIITHGHGHHH

SEQ ID NO: 72483 - DNA, 681 bp, Unknown
  Obtained from environmental sample
  misc_feature (1)..(681): n is a, c, g, or t
atggacacggacaccaccattgaaagccgaatagctttgcttcaggcgtttgatccgctgtttcccacagggtcctacactatgtcgggcggcatggaaacctacacgcaaaaaggacttgtgcagaataaatcttctcttatctcatacctaaaggctcaagcttacattttgccctacggcgacttaggcgtctgcgccaaaacagcgcaaggcgaagattttattttaatggacaacctttgcgccgcgatgaaacaaccctacgagatacgaacaggcagtgaaaaaatctgcacgcgttttttgaaagcgcaggagacgctatgcggctatccgtcgcttgccgcgtacaggctggctataaaacaggaaaaatgcaaaggacattatcctgtcgccgtcggtctttttatacgcgatttaaaagcgaatataggcgacgcgctggaattgtattgctacagccttttgtcgcaaacagtaaaccacgccgtaaaattaattccgcttgggcaatcagacggacaggcggctctttttgaagctctgcgcctgatacccggcgcggcgcaaaaggcaatggcggcggatgttgacgacttgggagtctccggctgcggttttgatttacgcgcaatgcagcatgagacgctgcgcggaagactttatataaattaa

SEQ ID NO: 72484 - protein, 226 aa, Unknown
  Obtained from environmental sample
  DOMAIN (40)...(189): UreF
  misc_feature (1)..(226): Xaa is any amino acid
MDTDTTIESRIALLQAFDPLFPTGSYTMSGGMETYTQKGLVQNKSSLISYLKAQAYILPYGDLGVCAKTAQGEDFILMDNLCAAMKQPYEIRTGSEKICTRFLKAQETLCGYPSLAAYRLAIKQEKCKGHYPVAVGLFIRDLKANIGDALELYCYSLLSQTVNHAVKLIPLGQSDGQAALFEALRLIPGAAQKAMAADVDDLGVSGCGFDLRAMQHETLRGRLYIN

SEQ ID NO: 72485 - DNA, 609 bp, Unknown
  Obtained from environmental sample
  misc_feature (1)..(609): n is a, c, g, or t
atgagttatgtaaaaataggagtcggcggacctgtaggctccggtaaaaccgctctcattgaacggcttacaagaaaaatggcggacaagtacagcatttgcgttgtaacaaacgatatttacacgcgcgaggacgcggagttccttgtaaaaaattctgtcctgccgcctgagcgaatcgtcggcgtggaaaccggcggctgtccgcacaccgcaatccgcgaggactgctccatgaacttggaagcggttgaggaaatggtgcgcaatttccccgacgtgcagattatttttgtcgaaagcggcggcgataatctttccgcgacattttcgccggagcttgcggatgctaccatttatgtaatcgacgttgcccaaggcgacaaaataccgcgcaagggcggtcccggcgtcacccgctcggatttactcgtcatcaataaaattgatcttgccccgatggttggggcaaaccttgaagtaatggcaagggattcggcaaagggtcgcggcgaacgtcctttcctgtttaccaatctggtcaccatggaaggtgttgacgaggtaatcaaatggattcgcaaaaatgttctgcttgaagaagtataa

SEQ ID NO: 72486 - protein, 202 aa, Unknown
  Obtained from environmental sample
  DOMAIN (4)...(150): GTPase of unknown function
  misc_feature (1)..(202): Xaa is any amino acid
MSYVKIGVGGPVGSGKTALIERLTRKMADKYSICVVTNDIYTREDAEFLVKNSVLPPERIVGVETGGCPHTAIREDCSMNLEAVEEMVRNFPDVQIIFVESGGDNLSATFSPELADATIYVIDVAQGDKIPRKGGPGVTRSDLLVINKIDLAPMVGANLEVMARDSAKGRGERPFLFTNLVTMEGVDEVIKWIRKNVLLEEV

SEQ ID NO: 72487 - DNA, 750 bp, Unknown
  Obtained from environmental sample
  misc_feature (1)..(750): n is a, c, g, or t
ttgagcgaattgtccataagtacgattttccaaaacggaaagaccgtcatgtccgattgttttttcacatccccttttaaaatcgccaaacctttttaccgcgacaacggttacaccgaagttatggtgatgtgcgcaagtccgggaattttagccggagacaaatacaatatgcggtttgatttagcggacaacacaaaaacaattatcagcgaacaatcgtaccggaaactttacaacacaggcgataatttttcccagcaaaacacgcaaatacatgcgggagaaaacgccgcgttgtactatgttccgtatccggttatccccttcgcgggaagccgtttccgttcgcggacggatatttttttacgctcttcctcaaaattgatcttcggcgaaatttttacctgcggcagagacggtatgggagaacgattcgcctttagcgaatattcatcgcgaacaaccgtgtatgttgatgacaagcctgtgtttctggacaacagccgcttacttggcggcggcgcggtcaaagactgcgatgtggatttttcgggaaccggtttttttgagggatactcttgtcagggtattttattcctttacggctttgataacatttccctgcctgagagcgaaggaatagaaaccgctgtttccaaatcttcggttggttttacaatacgcgcgttaggtaagagcgcaaacaatctgtaccgcttgtttaacaaattcagtaattatttgtga

SEQ ID NO: 72488 - protein, 249 aa, Unknown
  Obtained from environmental sample
  DOMAIN (40)...(242): UreD urease accessory protein
  misc_feature (1)..(249): Xaa is any amino acid
MSELSISTIFQNGKTVMSDCFFTSPFKIAKPFYRDNGYTEVMVMCASPGILAGDKYNMRFDLADNTKTIISEQSYRKLYNTGDNFSQQNTQIHAGENAALYYVPYPVIPFAGSRFRSRTDIFLRSSSKLIFGEIFTCGRDGMGERFAFSEYSSRTTVYVDDKPVFLDNSRLLGGGAVKDCDVDFSGTGFFEGYSCQGILFLYGFDNISLPESEGIETAVSKSSVGFTIRALGKSANNLYRLFNKFSNYL

SEQ ID NO: 72489 - DNA, 1164 bp, Unknown
  Obtained from environmental sample
  misc_feature (1)..(1164): n is a, c, g, or t
atgagagtcattttcccgttactgttgatatttttcgcggttaatgtatttgccgctcctcttgagagcgggtatgcccttgcgcccaaaaaaacagcttcgccggaagacaaagcaagggcttatcaagacgcgcggcaaaggatagttgaaacgtcaaaaaaatatgaaggagtcccatatcgttacggcggaatgaccgttaaagggctggattgctcgggttttctttgccttgtttttaaggacgcgttaaacgtatcattgccgagatcggcgtctggactttattcatgggtagagaagacaactcttgaaaaagctcaagcgggcgactttttgttttttaaaaccgataaatccggcagtgtaacccatgtcggtctgtatctgggagaacgtcgttttattcactcggcttcttcgggttcaagaacaggggtaatatattccagccttgatgaaaaatactgggctaatgcttatgtcggagcgggaagcgctttccccgaaacagtgtcaaatattaaagttgataataattcgatggcggaagcttttggcgcagttgggatagggagcaaaggcggcgccggtaaaaacacaaacacaagcgcaagtacaggcgcaagaagaacggcttcttctaaacagggaagcaaagacgatcggcttttggttgggatcgcatttgcgccaatctggaacggatttataatagacggttatctatttcgtggttttacttctcaagtgggtattaacgcggatatttatccgtttggattacggatgattttaggagttgaattaagcccggaatatgacggggggctcggcgtatttcgcttacctttaacattttcctttggaccgaatgaaaagctaaggttctttgccggtcctgtgttaagtattggcgacgcttctctttcgataaacggcaaccagcgctattactccggcgggacaagctggtttggcgccgcgggagtaaactattcgccctttgtttttaaaacctcaaccggagggatctatccttactttgagcttgcgtggcagtcatattacagcaatagcgccgatattaatatccccgcggacttatccgcaagcctccgtttttcaaccggaatcagatggtttataagaatcttataa

SEQ ID NO: 72490 - protein, 387 aa, Unknown
  Obtained from environmental sample
  SIGNAL (1)...(18)
  DOMAIN (58)...(167): NlpC/P60 family
  misc_feature (1)..(387): Xaa is any amino acid
MRVIFPLLLIFFAVNVFAAPLESGYALAPKKTASPEDKARAYQDARQRIVETSKKYEGVPYRYGGMTVKGLDCSGFLCLVFKDALNVSLPRSASGLYSWVEKTTLEKAQAGDFLFFKTDKSGSVTHVGLYLGERRFIHSASSGSRTGVIYSSLDEKYWANAYVGAGSAFPETVSNIKVDNNSMAEAFGAVGIGSKGGAGKNTNTSASTGARRTASSKQGSKDDRLLVGIAFAPIWNGFIIDGYLFRGFTSQVGINADIYPFGLRMILGVELSPEYDGGLGVFRLPLTFSFGPNEKLRFFAGPVLSIGDASLSINGNQRYYSGGTSWFGAAGVNYSPFVFKTSTGGIYPYFELAWQSYYSNSADINIPADLSASLRFSTGIRWFIRIL

SEQ ID NO: 72491 - DNA, 870 bp, Unknown
  Obtained from environmental sample
  misc_feature (1)..(870): n is a, c, g, or t
atgattatcggctgctacccggctgcgctggatagctgggtatcagatagccgggtcagactggataaaagtttcaatttttgctacattttggctatgggacaaatttgtgtctttgtaaaccaaaaaggcggcgtcggtaagactacctcggcaataaacattggggcataccttgcggaagccggaaaaaacgtccttttggttgattttgacgcacaggctaacctctcaagcggcatcggcgctaacccgccaaagcccggaatttatgaattgctttccggtacggcaacgccggaacaggcgataaaaaaaaccgccgtcaaaaaattggacgtaattccggcaagcatcgatctttcaggcgcggcggtagagttaatcgaccaaaaagagcgtaattttttcctgaaaaaagtcctgagtcctatcaaagacaactatgattttatactgattgactgccctcccagccttgggcagctgacaatgaacggtttagccgccgcggattcggtgcttatccccatgcagtgcgaatattttgcgatggaggggcttaaacagcttttacacacaaccaaacttatccaaaaaggactgaatccggctttaaaaatcggcggcattttttttacaatgtacgacccaagaacaaggcttgccaacgatgtaattaaacaggtcagcgcaatttataaagatacggttttaaatacgatcattccgcggaatatccgtctttcagaagcgccgtcttacggtatgcctatttctctttacgacccgcagtgtccgggagccagagcttatcactctcttgcgcaggaacttattcgcagatcaggaggaaaaaatggcgcgtag

SEQ ID NO: 72492 - protein, 289 aa, Unknown
  Obtained from environmental sample
  DOMAIN (37)...(251): CobQ/CobB/MinD/ParA nucleotide binding domain
  misc_feature (1)..(289): Xaa is any amino acid
MIIGCYPAALDSWVSDSRVRLDKSFNFCYILAMGQICVFVNQKGGVGKTTSAINIGAYLAEAGKNVLLVDFDAQANLSSGIGANPPKPGIYELLSGTATPEQAIKKTAVKKLDVIPASIDLSGAAVELIDQKERNFFLKKVLSPIKDNYDFILIDCPPSLGQLTMNGLAAADSVLIPMQCEYFAMEGLKQLLHTTKLIQKGLNPALKIGGIFFTMYDPRTRLANDVIKQVSAIYKDTVLNTIIPRNIRLSEAPSYGMPISLYDPQCPGARAYHSLAQELIRRSGGKNGA

SEQ ID NO: 72493 - DNA, 969 bp, Unknown
  Obtained from environmental sample
  misc_feature (1)..(969): n is a, c, g, or t
ttgcgcaggaacttattcgcagatcaggaggaaaaaatggcgcgtagaatcggactgggaaagggtcttgacgctttactggaaaacaacgacggcagcgaatcatacgccgcgccggctgaggcgcaaactgtctccgccgcgagcgaacccggaaaaaaagcgcaggacattgttcagttaccgatagaccaacttgtaccgaatccaggtcagccccgtaaaaattttgacgagaccgagcttcaggaattagccgactcgataaaaacttacggcattattcagccaatcatcgcggcaaacgcgggggacggcacttacatcatcatcgcgggcgaacgcagaacacgcgccgcaaaacttgccgggctttccgcagtccctgtcattatccgcgactatacagatcaaaaaaagcttgagatttcattaattgaaaatatccagcgcagcgatttaaaccccattgaagaagcggcggcttttaaaaacctgatggacttttccaatctttcacaggacgagcttgcgatgcgtatgggaaaaaacagatcgaccgtcgcgaacgcgctgcggcttcttaaactgcctgtcgaaattcaaaaaagcatcgaagaggggaaagtaagttccggtcacgcaagggcgctgttatctgttactgatgtaaaatcgagggataaactttacagggaaatacttgcgagcgaagtttcggttagggaaacagaaaagcgggcgaccgcgataaataacgaaaaatcgggaaaagcaaaaacaaaaaaagaaacggacagcggcaaaacgttaaaacgtccgcccgaagtagacgccatggaagaaaaatttatcggtaaattgggaaccaaagtagttattgagggagacctgaacaaaggcagaatacatattgattattactcaatggaagatttagaaaggctttatgaaatattaggcggctga

SEQ ID NO: 72494 - protein, 322 aa, Unknown
  Obtained from environmental sample
  DOMAIN (59)...(149): ParB-like nuclease domain
  misc_feature (1)..(322): Xaa is any amino acid
MRRNLFADQEEKMARRIGLGKGLDALLENNDGSESYAAPAEAQTVSAASEPGKKAQDIVQLPIDQLVPNPGQPRKNFDETELQELADSIKTYGIIQPIIAANAGDGTYIIIAGERRTRAAKLAGLSAVPVIIRDYTDQKKLEISLIENIQRSDLNPIEEAAAFKNLMDFSNLSQDELAMRMGKNRSTVANALRLLKLPVEIQKSIEEGKVSSGHARALLSVTDVKSRDKLYREILASEVSVRETEKRATAINNEKSGKAKTKKETDSGKTLKRPPEVDAMEEKFIGKLGTKVVIEGDLNKGRIHIDYYSMEDLERLYEILGG

SEQ ID NO: 72495 - DNA, 615 bp, Unknown
  Obtained from environmental sample
  misc_feature (1)..(615): n is a, c, g, or t
ttgcgtcttcggcaaaaattgtcgatcttggcttttctcttttttcaatacctcttgtctttgacgggcgggacgctgttattcccgtttgcctatgtactgggcgatgtcttaacggaagtctacggttttaaaacaacgcgtcgggtcatttttaccggatttgcggcgttggtgttaaccgccgtagttttctttgtgttgggaatacttccgccggaagaaaactggtcggcggaaacaggcggggataccgcgtttagcgcgatacttggcggaataagttacggcggcattgtgcttgcgagtctgtccgcctatcttgtcggcgagctttccaacgcaatgatactttcaaaaataaaagttaaaatgaaggggcgtattctatgggtgcgcacaatcagttctacgctggtaggtgaatttttggattcggctatttttgtactgatagcaagcgccttaggagtctttagctgggaaattttctggtcgcttgtattgactaactatatattgaaatgcggaatagaaattgttgtgactccctttacttattgggcatcagggtttttaaagaagaaagaaggcattgatgtttatgataaataa

SEQ ID NO: 72496 - protein, 204 aa, Unknown
  Obtained from environmental sample
  SIGNAL (1)...(20)
  DOMAIN (19)...(176): Uncharacterized ACR, YhhQ family COG1738
  misc_feature (1)..(204): Xaa is any amino acid
MRLRQKLSILAFLFFQYLLSLTGGTLLFPFAYVLGDVLTEVYGFKTTRRVIFTGFAALVLTAVVFFVLGILPPEENWSAETGGDTAFSAILGGISYGGIVLASLSAYLVGELSNAMILSKIKVKMKGRILWVRTISSTLVGEFLDSAIFVLIASALGVFSWEIFWSLVLTNYILKCGIEIVVTPFTYWASGFLKKKEGIDVYDK

SEQ ID NO: 72497 - DNA, 1737 bp, Unknown
  Obtained from environmental sample
  misc_feature (1)..(1737): n is a, c, g, or t
atgaacgagggacatgccgctttcatggggcttgagaagattcgcgaaataatgaccgagatgaactttacttttgcagaagctctcgaagcggtttggcctacgaacatttttactacccacactcctgttccggcgggaaacgagcgttttgatatttccatgatggaaaaatatttccgttcatggcctcaggttctgggaatttcttggaaagattttttaggtctcggcaggatcaatgtaaacgatgaacatgaaactttctgtttaactgttcttgcgttaaaaatggtcgcttatgccaacggcgtcgcgaaacttcacggagtggtatcgcgcgatatgtggaaaggactgtggcccggacttccgcttaatgaagtgccaatcggtcatgttacaaacggcgttcatacgcgcacatgggtttcttccggtatgctcgatcttttggacagatattttggtcctaagtttgaagacagacctacggaactaagtatttgggaacgcatggatcgtatttccgatgaagaattgtggcgcacccatgaacgccgccgcgagcgtcttgtcgcttttgtgcgggaacgtatccgcgagcagtataaacgaacgggcgcggtagagcggcggattcgtcaggcggaagacgttctttctccttactcgctgactctttgttttgcgcgtcggtttgcgacttataaacgcggcaatcttcttcttcgcgatcctgaacgccttttacggctggtcagggataacgatcgtcctgttcaattaatttttgccggaaaggcgcatccgcatgatatgcccggtaaagatttaatccgcgatataattcactttgcggaaaaatacgacgttacaaaccgtatagtttttgttgaaaactacgacatgagcgtagcgaaatatttaacatccggcggcgacgtatggcttaatactccgcgccgtcccatggaagcgtccggcactagcggcatgaaggcggctatgaacggcgttcttaactgttcaattttagacggctggtgggacgaagcgtacaatcccgaagtcggctgggcaatcggtcacggcgagcagtacaacgatgaaagactccaggacgatattgaaagcaaggcgttgtacgatttactggaacgcgaaattgttccgatgttctacgacaggggacgcgatggtcttccgcgcgaatggataaaaatgatgaaagactgcatgaaacaaatagggcagtcgatggcgtctcaccgtatgttgatggattactcgaatcaattttacttccctgcgcttaaaaatttccgccgtttcagcaaggacggttatgccgaggcaaaatcgcttgcggcgtatttcagcaaactgcagcaatcgtggggaaacctgaagattgttaaaattgattccaacgccaaacctgtaatgcagcgcggcgatatgctgaccgtaacagccttccttgatttaggcaatgtttcgccgaatgatttgcaggttgaactgtaccacggcactgtatcgaaccagaacaaagaaattaccgacgcaagaaaagtagaaatgaagtggctcaagagcgaaggcaatttgaatctgtatcaggttcgcgttgaatgtacagatacgggaatgcaggggcacacagtgcgtatcctgccgaagcacgacgcgttgatacacccgtacagatgcggattaattaagtgggcgtaa

SEQ ID NO: 72498 - protein, 578 aa, Unknown
  Obtained from environmental sample
  misc_feature (1)..(578): Xaa is any amino acid
MNEGHAAFMGLEKIREIMTEMNFTFAEALEAVWPTNIFTTHTPVPAGNERFDISMMEKYFRSWPQVLGISWKDFLGLGRINVNDEHETFCLTVLALKMVAYANGVAKLHGVVSRDMWKGLWPGLPLNEVPIGHVTNGVHTRTWVSSGMLDLLDRYFGPKFEDRPTELSIWERMDRISDEELWRTHERRRERLVAFVRERIREQYKRTGAVERRIRQAEDVLSPYSLTLCFARRFATYKRGNLLLRDPERLLRLVRDNDRPVQLIFAGKAHPHDMPGKDLIRDIIHFAEKYDVTNRIVFVENYDMSVAKYLTSGGDVWLNTPRRPMEASGTSGMKAAMNGVLNCSILDGWWDEAYNPEVGWAIGHGEQYNDERLQDDIESKALYDLLEREIVPMFYDRGRDGLPREWIKMMKDCMKQIGQSMASHRMLMDYSNQFYFPALKNFRRFSKDGYAEAKSLAAYFSKLQQSWGNLKIVKIDSNAKPVMQRGDMLTVTAFLDLGNVSPNDLQVELYHGTVSNQNKEITDARKVEMKWLKSEGNLNLYQVRVECTDTGMQGHTVRILPKHDALIHPYRCGLIKWA

SEQ ID NO: 72499 - DNA, 4035 bp, Unknown
  Obtained from environmental sample
  misc_feature (1)..(4035): n is a, c, g, or t
atgatcatcaaaagcaatactgacgacggtaacgaagtcagtcccgctaacggaagtttgcgctacgctataaaaaacgccgaggagaacagtacaatcgttattgataattcgattacggaaatcaaacttaaaaaacggctgtacattgataaatccctgaatatcgaggggaacggcgtaacgattaccagagacccttcgtggacgactaatgacggcgactcccagtttgtatatattcgtaaaggtttcgacgcggaaagcgtaacgccgcaggtgcgtatcagccgtgtccactttaccggcggacattccgcgttgggcggagcggtttgtaattataacggcgaattgtggctggagtcctgcattttcagttataacaaggcgataaacggaaaaggcggcgctattctcaatgaatcagacgcgatggggctgaccgtcaacggctgtaccttctacggaaataccagcggaatgttcgacggaaacgccatccgttctgacgcgaatcagggctatttcaccctcaccggcaacgtgttcttttacggcgatgtcgtggtcgattggacggcttccgcgttggtctatcagtacggatcgattgaagggacatcgggcggttacaacgtggtggacggcgaatacgcccatactatcgatcagatgttccgcaatgtcgaaccggcggcgaccgacatcttgcgcgaggagccgtttgttacgccggtgaatttcaaggtgcttgccggaagcgcggcaacacatgtcatcagttcgcttccggcggattatcctgagacggatttttacggcaacgtcataagccacggggcgaacgcgggagcggtgcaggctgttgctaacggcttcctgctgacgacacgttcctccaatgacgcattgggtttcgcagtgaatacgtcttccctcaatgaggacggcttgtactcaggcagtgttacgctgacggcgactgcacaggacggcgggacgtttttatactggctgaaggacggcgttcaggcgggttcggcaagcccgtggaattttacgccgaccggccattcaagtattcagggcgtgttcgcctaccgggtgaacagtaccgccgatacggttgcgaagggaaccctgcgttatgcgttgaccaatatcgccgatggggattatatctcgattgacccctcgctgggcggggcgattgctatcggcacgcccttgccggtgataaacagggaaaacataacgattgaaggaaacggcggggtattgacccgttccggcgcgatggcggtaaacgcggcgtcgcaactgctggcggtcggcgatgaaggctctgttgttatccgcagactgcactttaaggacggcagcgcgacacagggcggagcggtaaagaacaacggaagcctgcggcttgagtcctgtattttcagcgggaacgctggaaccggaacggcggcaacagacggcggcggagcggtgtacaacagcgggacgctgacgctcaaagcctgcaccttctatcagaacaccgcgaccgcttcgggcagaggcggggcggtctatcaaccgagcggctcgctggcgttgaccggctgtctgttctacgcgaactcaggcggcacggcgatacagtacgccgccggaacggtaacgagcgggggcttcaatgtgattgacatgacgcaaagcggcggctggacagagacgcagactgacaaaacaatcgccgtgccgtttatatcgacaacgccggcggagtaccggctgttgaagaacagcgccgcctcctctcttatcacgccgcttccggctgattatccggcaaaggatttttacggcgaccccatcacggcaaacgccgccgccggagcggtacaggttccgataaccagcaacggcatagcggtcgtgtattcggtcaatgatccggggcgaggcagtgtttccatatcgggaacgcctgacgctttcggcttgtatagttccccggtaaccgtatcgaccgcaaaaacaaacacctttgattttatcggctggtcggtgaacggcgttatggaagaaaccacggtaatgaccaaaacggtatccgcgcactcggcggtgcaggcggtatacggcacggtggtaacgaactatgacgattcggggacggggacgctccgcgccgcccttgccgccggtgtcgccaatgattacattttctgcaaagacgtaacgcccggcgtaacaacgattacccttgccagcgtcctgcccgcgattaacaaccgcagtgtaacgattgcgggaaacggggtgacgattgtcaaagggtacgccaccagcacggcttcacgactgctggtcattaacggttctactgcgtataccgtcaggataagccgggtgtggtttaaggacggacagttaagcactgataacagcggtgcggcgataagctgtacctctaaccttatccttgaatcctgtatcttcagcaataacagaatcgcaggaaacgatgggtacggcggagctattactttagcaaacgcaaacgtcaatctggaactgtacggctgtacgttttatgggaatcaagcaccggatggcggcggagcgataaattccacatctacttccactacccgcagatgggttttgataggcaacgtgtttaacggcaatcttgccacatactacggagatctaaggaacacgattaggctgtctgactatcctgcatttgtagcaagcggtaatgttctcgacttttccggttcgccgttcgacagcagtcaggctaaaaccgtcttaggcggcacattcttaggcaagacaagcctgaaacccattgccggaggggacgcggtgaatatgctcgcttccattcccgcaggctatcccgccaaagatttctacggcacggctattaccgcccctgccgccgccggagcgatacagtcaacggcaagcggcggttacggcttaggtctgtcgcagggatacggcggcaatgcgaatataaccagcggcactcccaatgccgaaggcttgtattcagggacggttgtggtaactggaactccctcaaatgcttccaccgaagtagtatggtggctggtgaacggggcgaaggtcgattgcggcaacacgctgacgctgactatggacggctcgaaatcagtacagccggtattcggcctgagcgttaccgatggcggggatagcggaacaggaactctgcggtgggcggttacaaatatccccgccggtagtggctttcgaagccctactaccattgccgttaaagtgccggagattcaactggacagccagttaagcataactaaaacgaatataatcattgacggtaacggagcggtgatacgtccgagcgcttcatggtcgggaacgaacagcctgttgaatgttccaagtaccaataatcctactgtttacattatcaatacgcattttaaggactcgcaatatggggcaatcaccgtaaacggttcggcttctgcctccgcagtagttcctatatactcctgtattttcagcggcaatcaggggcgtccggttactgccatcggtcagggttttgtgtatatataccattcaacgttctacaacaacaatgccggaagcagttcattactgaatcagggtgcttctggtggtaactatatcattgcaggatgtttgttttatggcaatacggcatctaccctgtttagttacattgccgccactagtcttaatcccattagcaccatgtacaatgtggttgacgtgcccatcggaaccggcacaggtaataccggctggcctgcaagcacttccggctcctttaatagtagcgacaatcagacgctttcgggattgggcgttagcggtattccgttcaataccagcacctttaagccgaacaacagcaagctcaaaacaggctatactggcactatttgggatttgcctgcaatagatttttacggcgaagcacggaacggaactgtgggagcggtgaattattaa

SEQ ID NO: 72500 - protein, 1344 aa, Unknown
  Obtained from environmental sample
  misc_feature (1)..(1344): Xaa is any amino acid
MIIKSNTDDGNEVSPANGSLRYAIKNAEENSTIVIDNSITEIKLKKRLYIDKSLNIEGNGVTITRDPSWTTNDGDSQFVYIRKGFDAESVTPQVRISRVHFTGGHSALGGAVCNYNGELWLESCIFSYNKAINGKGGAILNESDAMGLTVNGCTFYGNTSGMFDGNAIRSDANQGYFTLTGNVFFYGDVVVDWTASALVYQYGSIEGTSGGYNVVDGEYAHTIDQMFRNVEPAATDILREEPFVTPVNFKVLAGSAATHVISSLPADYPETDFYGNVISHGANAGAVQAVANGFLLTTRSSNDALGFAVNTSSLNEDGLYSGSVTLTATAQDGGTFLYWLKDGVQAGSASPWNFTPTGHSSIQGVFAYRVNSTADTVAKGTLRYALTNIADGDYISIDPSLGGAIAIGTPLPVINRENITIEGNGGVLTRSGAMAVNAASQLLAVGDEGSVVIRRLHFKDGSATQGGAVKNNGSLRLESCIFSGNAGTGTAATDGGGAVYNSGTLTLKACTFYQNTATASGRGGAVYQPSGSLALTGCLFYANSGGTAIQYAAGTVTSGGFNVIDMTQSGGWTETQTDKTIAVPFISTTPAEYRLLKNSAASSLITPLPADYPAKDFYGDPITANAAAGAVQVPITSNGIAVVYSVNDPGRGSVSISGTPDAFGLYSSPVTVSTAKTNTFDFIGWSVNGVMEETTVMTKTVSAHSAVQAVYGTVVTNYDDSGTGTLRAALAAGVANDYIFCKDVTPGVTTITLASVLPAINNRSVTIAGNGVTIVKGYATSTASRLLVINGSTAYTVRISRVWFKDGQLSTDNSGAAISCTSNLILESCIFSNNRIAGNDGYGGAITLANANVNLELYGCTFYGNQAPDGGGAINSTSTSTTRRWVLIGNVFNGNLATYYGDLRNTIRLSDYPAFVASGNVLDFSGSPFDSSQAKTVLGGTFLGKTSLKPIAGGDAVNMLASIPAGYPAKDFYGTAITAPAAAGAIQSTASGGYGLGLSQGYGGNANITSGTPNAEGLYSGTVVVTGTPSNASTEVVWWLVNGAKVDCGNTLTLTMDGSKSVQPVFGLSVTDGGDSGTGTLRWAVTNIPAGSGFRSPTTIAVKVPEIQLDSQLSITKTNIIIDGNGAVIRPSASWSGTNSLLNVPSTNNPTVYIINTHFKDSQYGAITVNGSASASAVVPIYSCIFSGNQGRPVTAIGQGFVYIYHSTFYNNNAGSSSLLNQGASGGNYIIAGCLFYGNTASTLFSYIAATSLNPISTMYNVVDVPIGTGTGNTGWPASTSGSFNSSDNQTLSGLGVSGIPFNTSTFKPNNSKLKTGYTGTIWDLPAIDFYGEARNGTVGAVNY

SEQ ID NO: 72501 - DNA, 1302 bp, Unknown
  Obtained from environmental sample
  misc_feature (1)..(1302): n is a, c, g, or t
atgttgcgaaaagcgataaccaaaaaatctatcgaccattccgactcaggaaacttctctttcagttttttctgcgacagatgcggaaaggaatggacaagtctctcacagccgttctcaagcgaaagcggccttgccggcgatccgaccgtagaaaatcaggacgcgctgaaactgctttggggaaacgaacaccgcgccgcctttgacgaggcaaatttggaagcccattatcactttaacctttgcccggtttgcggcaaacgagtatgcgatgagtgttttaatattgctgaaaaagaacatggcggcgtttgtaaggactgcggttctaaagagggaaaacgcagtaccgaaccttcaatagttgtcagcgcaaattccagaggtaaattattgcctaatgatggcgcaaacggaaagaataaattgatcgttgcagttcactattatgacccaagccaatacacggtagcagggataaccgatccacagcccttaatacacacatggggtacttccgcagaaaaggaagaattagctcacaatgcaggatcgcttaaaacaacttttattgataacggcattgcggtttattttggcgaatggggagctcctacagacacacgaagcagtatgaacgcaacaataaaagctactcatttggattatatcggttctgtagcggaagcggcaagaaagaacggcatagtacccatttattgggacgataatggcagttttaaaattcttgaacgatcaaacggcaaaccaaaaacaggactttgggcggactcattatctacaatgatgacaaaaatagccaatacaacacctcttcctccaggcggcggcttaataccgccgactccgccaacaattagcggaaatttgggcaattaccgttttggcttacaggaagacggagttactcctaactacgggcaggcagtatgggaactgtcatcagctaacgtaacgaccgcaaaaacagcgggagcaaaacttgtgcttgttttatcatctgccccaaccgccagtatgcagtttgtatggcaaggaccagctaataatttgtggtggaatctaaaagatattctcaatactgacggcagcgttataggagcaacaggcgcaacatggaactcaagcacaaaaactcttacaatccctctatccgcttcctctgttgccgattacagcgtctttaccgctcagccttcattaaatcttgtcatcgcttattacggcggcgaaaatgttaacgctcttggaataacaagcgcaaaccttcagccgtga

SEQ ID NO: 72502 - protein, 433 aa, Unknown
  Obtained from environmental sample
  misc_feature (1)..(433): Xaa is any amino acid
MLRKAITKKSIDHSDSGNFSFSFFCDRCGKEWTSLSQPFSSESGLAGDPTVENQDALKLLWGNEHRAAFDEANLEAHYHFNLCPVCGKRVCDECFNIAEKEHGGVCKDCGSKEGKRSTEPSIVVSANSRGKLLPNDGANGKNKLIVAVHYYDPSQYTVAGITDPQPLIHTWGTSAEKEELAHNAGSLKTTFIDNGIAVYFGEWGAPTDTRSSMNATIKATHLDYIGSVAEAARKNGIVPIYWDDNGSFKILERSNGKPKTGLWADSLSTMMTKIANTTPLPPGGGLIPPTPPTISGNLGNYRFGLQEDGVTPNYGQAVWELSSANVTTAKTAGAKLVLVLSSAPTASMQFVWQGPANNLWWNLKDILNTDGSVIGATGATWNSSTKTLTIPLSASSVADYSVFTAQPSLNLVIAYYGGENVNALGITSANLQP

SEQ ID NO: 72503 - DNA, 1134 bp, Unknown
  Obtained from environmental sample
  misc_feature (1)..(1134): n is a, c, g, or t
atgcttgagcctattccctcgttaatagaaaaaacattcccaattccgggacgttttaaaagcaaactgccgtccgacatagcggaactttcccatctccttacaaacaaacgcggaaaccgctctctctcctatttgacgcgccctaattttctttccgcctatctgcattatttcttgccgtggaatctctatcgtctctgcctcttactgcccacgctgaacataaacctgcaagcgggcaattcaatcacagacttaggctgcggtcccctcactcttacatcggcgctttggctctcgcgtcccgaacttcgcaatctgccgcttgaatttaactgcatagaccgcagcggtcccgttcttgaggctgggaaaaagtttttcgccgctttgtgcgaaagcgcagactgtaaaaatgttttatggaaaataaatccgataaaagaagatatcgacataagacaaaaaggcgcgaaaaaaagaaagcccgccgctctagtctgctctgtaaatatgtttaatgaaatctacgaaaacctatcccacaatgatacggaaggcttgcggcaaacggcaaagaacgcggcaaaaacattgtgcaatgaagcggcaaaagacgctcctcttttgattgtagagccgggagtcccgcaatcgggaaaatttatttctcttcttcgggacgctcttatggatttgggtcattccccttcttcgccgtgcacgcacaccgccgcctgccctctttccggcggcgcgacaaaaatgataaaagggcgcaattggatcgacacaaaaaaacgctggtgtcactttgcgtacgaaaccgcagacacgccgaaagaactccgcaaactttccgccgccgcaaaactccccaaagagagattggttttcagttttttattcacaggttcgccaatggcaaaaaaaggagaagcaagaattatctccgacgccttccccctgccctacaaccgcttcggccgctacgcctgctgtgaacaagggcttatactggttaccggagaaaaagaacggattgaaaacacggtttccggcagtattgtacatattgcggcgacagggcaatacgatgaaaagagcggcgctatgattagcgcgttgtaa

SEQ ID NO: 72504 - protein, 377 aa, Unknown
  Obtained from environmental sample
  misc_feature (1)..(377): Xaa is any amino acid
MLEPIPSLIEKTFPIPGRFKSKLPSDIAELSHLLTNKRGNRSLSYLTRPNFLSAYLHYFLPWNLYRLCLLLPTLNINLQAGNSITDLGCGPLTLTSALWLSRPELRNLPLEFNCIDRSGPVLEAGKKFFAALCESADCKNVLWKINPIKEDIDIRQKGAKKRKPAALVCSVNMFNEIYENLSHNDTEGLRQTAKNAAKTLCNEAAKDAPLLIVEPGVPQSGKFISLLRDALMDLGHSPSSPCTHTAACPLSGGATKMIKGRNWIDTKKRWCHFAYETADTPKELRKLSAAAKLPKERLVFSFLFTGSPMAKKGEARIISDAFPLPYNRFGRYACCEQGLILVTGEKERIENTVSGSIVHIAATGQYDEKSGAMISAL

SEQ ID NO: 72505 - DNA, 2313 bp, Unknown
  Obtained from environmental sample
  misc_feature (1)..(2313): n is a, c, g, or t
atgattttcttatttctcaaacagggaaataaaatgaaaaaacgcgcatacaagttttgcagaattttcttttttctaatcctttcattaataccgatttttcaactctctgccgttaacttcagcggactgactgtttcaaacgacgacaggcttttattcaaagctgattttcagggacagcacgccgtttttcttaccagactaaacgatatgtcgatgcagcagcttaccatgcatcccgaaaaactgtaccttgtcgataacggaagaacaattatcgcgctgaacagattgggagcggcgagtattcccgtatcagggggacttccgactccgcttcccgtatatccttctttcgcgtcaggcaatacgccgttaagaggacggcttcaggatttagccgcttccgccgacggtcgctgggttttaatcgtagagccgataagtcccggctacggaaatttatttttagtcgatcttgcaaacggaacaaaaaaaattgtctgcgaaaagattgaattgcccaacgcggaattccccgcaaagtggagtcccgactcgcggatttttgtttacgcaaaaggcggcagacttttttacttccctattctaaacgatctatccgtacttgtagatgaacgctttagaatgatcggatcgggcggaattgaatcggtcttatgggatcaacttggcgttttttattacatgacgggaaacactttataccgcgtaaccaaccccgaactttttacgcggacaatttacggagactttctctccatcggctctgtcgccgccgttcttccgctggattttaattccggctttgatcgttactggatttcgccggactcaggttcaattttaataaacaagagcggcaaaggattatttttctttttgctgggagaaaatcaaacaagcgccgctgattcggcaagcacaatacttccccatgtccttaccccaaacggagccgacaattttaatgttctctggcctgcaatcgaacaggaacagagcgcggttaattcggcgcgaccgggacgcaaaataacttccggcaatattaccgtaatttattccatgcgcggcgaaacttttgttttacgctttgacgttaaaggcagaacgattagctctttgcccaataacagtttcccgttagcatcttcttgcgctctgtcgcccgacggaacaaaagcggtattctggggagagaacggacttgagctttgggattacacaaactggcggttaattcaaagactgagcaacagccccgtcttttcctgcgtgtggattaacaacaggcaattaattaccggcaactcaagatttatagaggacataaatatttcaacctcttcctacccgcgcaggagaatttgtctttcctccgcagacgaatacggttttgaggaaggctccaacccgtcgcaaattgtcgcaagagccggaaacgaatggttttcaaacgacggaaaaaacgcgtggattccgatagcaaacgcgcagttaagagcgcctattctgtattcggatcgttaccgcgttttccttgaacctcaaatgacggggcattacagcaatatacccatgatacgcaatacacgcgcgacaggcactttatctcttgtatcaaaatatacggtaaataaatcatacactctgggacgttccatgcctgtcgctctctgctttgatctctacgacgacgacacgggcttaccgcaggtgttagccgcattgcgccgtttaaacataaaagcgacattctttttaaacggcgaatttatacgccgaaacccccacgccgcggcggctatcgccgaagccggacatgaaacagcctcgcttttttacaccccgattgatctttcggacacgcgctaccgcattaccaatgaatttatcacacgcggactcgcgcgcaatgaagacgaattcaacaaagctacggggaaagagctttctatcctatggcatcctccgttctaccgcagttccaacgcggtaaacgcaaacgccgccgccgcaggatacatcacggtaaacagaagcgtcgatcccggcgattgggtatccagagaagaagcgttaagactcaatctgcggcaaatcccaccctcggaaatgatagagcagattatccacaaaagggaatcgggagccgtcattcccatacgccttggacttcttccgggcggcagggacgaatatttattccagcggatagaagcgcttcttgacgcgttactgcgttcagggtacgaaatagtcccggtctcatcggtaatcagataa

SEQ ID NO: 72506 - protein, 770 aa, Unknown
  Obtained from environmental sample
  DOMAIN (559)...(687): Polysaccharide deacetylase
  misc_feature (1)..(770): Xaa is any amino acid
MIFLFLKQGNKMKKRAYKFCRIFFFLILSLIPIFQLSAVNFSGLTVSNDDRLLFKADFQGQHAVFLTRLNDMSMQQLTMHPEKLYLVDNGRTIIALNRLGAASIPVSGGLPTPLPVYPSFASGNTPLRGRLQDLAASADGRWVLIVEPISPGYGNLFLVDLANGTKKIVCEKIELPNAEFPAKWSPDSRIFVYAKGGRLFYFPILNDLSVLVDERFRMIGSGGIESVLWDQLGVFYYMTGNTLYRVTNPELFTRTIYGDFLSIGSVAAVLPLDFNSGFDRYWISPDSGSILINKSGKGLFFFLLGENQTSAADSASTILPHVLTPNGADNFNVLWPAIEQEQSAVNSARPGRKITSGNITVIYSMRGETFVLRFDVKGRTISSLPNNSFPLASSCALSPDGTKAVFWGENGLELWDYTNWRLIQRLSNSPVFSCVWINNRQLITGNSRFIEDINISTSSYPRRRICLSSADEYGFEEGSNPSQIVARAGNEWFSNDGKNAWIPIANAQLRAPILYSDRYRVFLEPQMTGHYSNIPMIRNTRATGTLSLVSKYTVNKSYTLGRSMPVALCFDLYDDDTGLPQVLAALRRLNIKATFFLNGEFIRRNPHAAAAIAEAGHETASLFYTPIDLSDTRYRITNEFITRGLARNEDEFNKATGKELSILWHPPFYRSSNAVNANAAAAGYITVNRSVDPGDWVSREEALRLNLRQIPPSEMIEQIIHKRESGAVIPIRLGLLPGGRDEYLFQRIEALLDALLRSGYEIVPVSSVIR

SEQ ID NO: 72507 - DNA, 342 bp, Unknown
  Obtained from environmental sample
  misc_feature (1)..(342): n is a, c, g, or t
atgcgaaaagacccgataaacggggctttaagtttccattcaggcattgattttagggcgaatacaggcacgcctgttctggcttcccttgagggtgttgtttcatttacgggggaaaattggctttacggaaaacatatcattttaacccacgctaacggctacaagacgctttacgcccatttaaactctttttccgtaaaacagggggacagggtggcaacgggcaagaaaatagccgaatcgggcaatacggggcacagtacgggaccgcatctgcaccttggggtatacgataagaacaataaattgattaatccattggaacttttaaataaataa

SEQ ID NO: 72508 - protein, 113 aa, Unknown
  Obtained from environmental sample
  DOMAIN (11)...(107): Peptidase family M23
  misc_feature (1)..(113): Xaa is any amino acid
MRKDPINGALSFHSGIDFRANTGTPVLASLEGVVSFTGENWLYGKHIILTHANGYKTLYAHLNSFSVKQGDRVATGKKIAESGNTGHSTGPHLHLGVYDKNNKLINPLELLNK

SEQ ID NO: 72509 - DNA, 516 bp, Unknown
  Obtained from environmental sample
  misc_feature (1)..(516): n is a, c, g, or t
ttgcgttatctaccgatattgcgggcggcgggcgccgtccatacgaatcacgtatgtgtgattagcgtaaacccacaaaaatcaaaggaggccggtgtggctatgtcgcaaaaattatacgtcggtaatctgccctacaggactacggaggacgacctgcgcaaactctttgagaagtacaagcccattcactcgctgatactcatcgccgacaaggaaacggagcggccgcgcggctacagtttcgtcgagcttgacgaacctaaggccgattacgcgcttagcgaactgagcgacaaggagttccacgggcggagtttgaagatccgcgtggcgacgggaagggatcccaacgacaaagcgcctagtgaaaaaacgccggaaaagaaagcgtccggaaaacacacatttaacaaacccgctacggcgacgcatacggtgatgctacgacgcagccgccagagccggactaccactacggagtatatcgtttcgaatatgaataactacggatga

SEQ ID NO: 72510 - protein, 171 aa, Unknown
  Obtained from environmental sample
  DOMAIN (39)...(109): RNA recognition motif. (a.k.a. RRM, RBD, or RNP domain)
  misc_feature (1)..(171): Xaa is any amino acid
MRYLPILRAAGAVHTNHVCVISVNPQKSKEAGVAMSQKLYVGNLPYRTTEDDLRKLFEKYKPIHSLILIADKETERPRGYSFVELDEPKADYALSELSDKEFHGRSLKIRVATGRDPNDKAPSEKTPEKKASGKHTFNKPATATHTVMLRRSRQSRTTTTEYIVSNMNNYG

SEQ ID NO: 72511 - DNA, 372 bp, Unknown
  Obtained from environmental sample
  misc_feature (1)..(372): n is a, c, g, or t
atgctaatcctaatacaaatcataaccgccgccgccttcgccgtcgtaatcctcttcctgcgtcgcggactgtacaagctctcgcccgccgccgaacaaaacgacgccggccgcaaccaaagcgccaacacccgaaacaaattctcgataatcgtcgccgcccggaacgaagccctaaaccttcccgcctgcctagactccatattctcccaaaacgtccccgccgaccgatacgaggtgatagcggccgacgaccgctctaccgacgccaccccgcaaatactgcgcgacgcggcggccaagtaccaaaaccttcgggtagtgaccgtaacggaaaccccgccaggagtctcccctaaaaacacgccgtga

SEQ ID NO: 72512 - protein, 123 aa, Unknown
  Obtained from environmental sample
  misc_feature (1)..(123): Xaa is any amino acid
MLILIQIITAAAFAVVILFLRRGLYKLSPAAEQNDAGRNQSANTRNKFSIIVAARNEALNLPACLDSIFSQNVPADRYEVIAADDRSTDATPQILRDAAAKYQNLRVVTVTETPPGVSPKNTP

SEQ ID NO: 72513 - DNA, 720 bp, Unknown
  Obtained from environmental sample
  misc_feature (1)..(720): n is a, c, g, or t
atgaaccgcctcttctggggcctgcaatcggtagacttcctatcccacggagtaatagccgccgccgccatagccgcgaacctgcccgtaaactcaaacgcgaacaacatggccttccgcagggaggtcttcgagaaagtcggagggtacggagagaacgccggcgtcgttcttggcgacgacgatcatttattgcagcgggtctgggcttataggaggggtaagaataaaattatcgcggacgataccgctactagtaataatattaataatagtagtaataataattctgatgtaagcaacatagtctttatgaccgaccccgcgggcgccgtggagaccgcgcctaccccgaccccgtcggcgctatttgaacaacgccgccgctggggctccgtcacagtccactacggagcgcggcaaatagccctgctctccgccgtattcgccttctacgcaacaatagccgcaacagcagtcgtatcaatattttccccgacccgctggctgccggtcttcttatcgttaatgcttgtaaaactaaccggagaactggcgttgttgatcccgggaacgcgtatctttaataagaaaagcctgcgcaagtacataatacccgcgtcaataatacagttacctatggtgttgattgccgtcgtttccggagtgtttggaaagtttgaatggaagggattaaagacgggacgaaaagtgggctaa

SEQ ID NO: 72514 - protein, 239 aa, Unknown
  Obtained from environmental sample
  misc_feature (1)..(239): Xaa is any amino acid
MNRLFWGLQSVDFLSHGVIAAAAIAANLPVNSNANNMAFRREVFEKVGGYGENAGVVLGDDDHLLQRVWAYRRGKNKIIADDTATSNNINNSSNNNSDVSNIVFMTDPAGAVETAPTPTPSALFEQRRRWGSVTVHYGARQIALLSAVFAFYATIAATAVVSIFSPTRWLPVFLSLMLVKLTGELALLIPGTRIFNKKSLRKYIIPASIIQLPMVLIAVVSGVFGKFEWKGLKTGRKVG

SEQ ID NO: 72515 - DNA, 3579 bp, Unknown
  Obtained from environmental sample
  misc_feature (1)..(3579): n is a, c, g, or t
ttgattgcgaggggagttttgtcggccgccctgattttgggcggggctgttattggaacggggaaaatagtcgcgaagacgatatcttcgttcactacggactacaccgatgtctacacgggtaaggatcgatgtccggcggatttgtccgaggtcacgataaaggacgacggcgagtcgccggcaaccgtttccgggttggaagggacgctgaagtgcgattacagcgtaaacgcgtcggacaccgcaaagcttaaaataatcgcctccacggcgccggaagtctccgtagacgccactgaaatagaggtgggcgataccatcgtggtttcattcgcaatatccaaggcgaccgcggttcatgggctgatagatacatccgccgcgctcaaagcgtggttcgactcgatgacgacgagcagcccggcctttgtcagcgcctcctccgacggcaaatcgctgaattcaaaatccgctccgacgggcggcgtcacggcaaagacgggaattaccggtctaggggatatcaagtactcctacgtgaagcaaaacccggtcacggaactttgggactccgtaggcgtcgcgtccgtagccgactccggtacgtacaaacttacgatctccttcaccggcggaaacaacttgacggattgcgaaataacgcatccgtttaagatcgcctacctgaagttcccgagcaacccgcttctggccataccgcgctccgttgatttcaacggcgccaacgcctactcgacgtcttggccctccatagtggctccgacggtcttcggcacgcttgactctatctataatgtcagggcgaagttcataccctcgggcaacgatctcgattggtcggccgactacgccaaggatctgaacaagaaggacgtgacaaataagaaaaccggcacgctcggagtcgggtcggtcgatttcacgatcgacggcgagggcgtgacgcacggcgtgggcaccatccgcttgattttcgacgtcaggggcaagagcgtcgataatcctaagcgcgtgtggcgtttggagaacgagacaatggacgttcagatcgccgagaggcccttgaccgacaacatgatcacgctcaccgattatcccattgcgtacacggggagcaatattacggacgtcgaattgaacaagaagttcatcgtcattcagaacagccagcttataatgggcgacgactacgagatagtcgctcacgggaacgcggcgggccagaccacgctcaaccgcaaagacgccggcgtgaaccacggctgggtcgtgatcaagggcataggcaactacgccggaacggccatgaaggcgttcaccatcgaacgcgccccgatcaccgtcagcctcgtagtcgtgaacagccctaaggtgtacgacggcaaatcggacatcgacacgaactcgctcttaccggatacgttggccgataatccgaaagcgttcgtaaaggcggtgtttgaagggtatctcgccggcgacaccgccgttaaattcagcaacggcttggactacgagatccgcagcgccaagtacagcgactccacggccgggtcggtatgctcgcttacggctaagatcgccttgaagggcggcacgaccctatcccgtaactacaagttcaccggggcctctcccgactccatcgtcgccaaggcttacggtttggagatcaagaagctgagcatagacagcacgaacgtcgtctacaccatccctaaggaccactactacaacggcacgcagcgcggcgtggccgcgccgacgctcaaggcgccgctcgccctggccggcgggaccctcaccacgctgtataggtacgccgcgggcaccgcgaagccggacttcgatacgacaatcgccgcgctggccgcgtccaaagacaccgcctacattcccatcaaggccgggaactacggcctgatgctcaaggtggccggcagccccaacttgaaagacacgctcatagagctcgggacgtacgccatcaaagagccggctcaggccgttatctccttcccgtcggctccggaagatttggtggtctccgttcggcaggggcggacggtcaacctcaaggtgtcggccaagtcgcccaacggcggcgcgctgacctacaagtggcacaccgtggagtccatcggcggcaatccggacagcgccaaagcgatgaacgttccggggctgaacaccgccgactccgtcttgaccgtcacggtcagcagcgccgtcgggtcgacgctcaggtaccgcgcgtcggtcgtcaacacggcgccgcccggtattcaggatcccagggcggttacggcttggaccgggatattcgtagttaccgttgaagcggcccccatcagcatcgtagacgcgaaagtcgtcgtcgacaccactaaggtgtggcactacaccggataccccgtcaccccgtccggcagcgacgtgacggtatggctgcccggcgccgtgagcggcgcggacacgacgtgggacgtcgcggtcgagccggacgagtacacgctctcctacgtggccaacaccaacgtgggcacggcgacgatcagggcgacggccgttcccgccggcaagtatcagggcaccgcgtccgcgacgttcgccattatccagaagacgttcagcaccgtggacatcgcctacacgacggagcggacgtacaccggcgacacgctgagcgcacaggtcagggcgaacccgccgatgaccggaatgggcgcgatctccgtacgctacggcacgtccgccgaattaccggtgaacgccggcgactacgacgtgtacgtcagcgttacgggcggcgcgaacatctcctcgagcaacggcttccagtacctgggcgcatacaccatcaataagatgacgcccgtcgccgccgatttggcctacacggatttggcgtcgatcaaccacgtggagggcgacaccgccacggagtacggcatcggcgaggtaacgctgaaggccgggaactacgagggcacaatcgacgtcttctacaacggcgaagaggaggtgcccacgacggccgggtcctacgccgttaccgttgagatcggcggggacgacaatgtggaggccggattcgtgacgctcggcgtctacaagatcaagagcaaggtcaccgacatcgacgacgacgacgacgatacggataccacagtggtcagcgtggccatgggtaaccgcgagattcccggcaaggctacggtagaggaagcggccgtggcgccggtaaaggcgacgagagtggcggcggcgtttacagccggtcccagccccgtatcgatgaacgccgggaagattacgttcttctcctctaagcaggtcaagggcggtactctgtacgtgtttgacgcggctgggaacgccgtggcgaaagtaccggcggcgaaatcaggggccggcggcgaaatagccgtttggaacctgcgcgaccagaagggcaccgcggtttccgagggttcttacttggttaagggagccttgctcggtaaggacgggagacgggataaagtgtcttttgtgtttagcgttgtgaggtaa

SEQ ID NO: 72516 - protein, 1192 aa, Unknown
  Obtained from environmental sample
  SIGNAL (1)...(25)
  misc_feature (1)..(1192): Xaa is any amino acid
MIARGVLSAALILGGAVIGTGKIVAKTISSFTTDYTDVYTGKDRCPADLSEVTIKDDGESPATVSGLEGTLKCDYSVNASDTAKLKIIASTAPEVSVDATEIEVGDTIVVSFAISKATAVHGLIDTSAALKAWFDSMTTSSPAFVSASSDGKSLNSKSAPTGGVTAKTGITGLGDIKYSYVKQNPVTELWDSVGVASVADSGTYKLTISFTGGNNLTDCEITHPFKIAYLKFPSNPLLAIPRSVDFNGANAYSTSWPSIVAPTVFGTLDSIYNVRAKFIPSGNDLDWSADYAKDLNKKDVTNKKTGTLGVGSVDFTIDGEGVTHGVGTIRLIFDVRGKSVDNPKRVWRLENETMDVQIAERPLTDNMITLTDYPIAYTGSNITDVELNKKFIVIQNSQLIMGDDYEIVAHGNAAGQTTLNRKDAGVNHGWVVIKGIGNYAGTAMKAFTIERAPITVSLVVVNSPKVYDGKSDIDTNSLLPDTLADNPKAFVKAVFEGYLAGDTAVKFSNGLDYEIRSAKYSDSTAGSVCSLTAKIALKGGTTLSRNYKFTGASPDSIVAKAYGLEIKKLSIDSTNVVYTIPKDHYYNGTQRGVAAPTLKAPLALAGGTLTTLYRYAAGTAKPDFDTTIAALAASKDTAYIPIKAGNYGLMLKVAGSPNLKDTLIELGTYAIKEPAQAVISFPSAPEDLVVSVRQGRTVNLKVSAKSPNGGALTYKWHTVESIGGNPDSAKAMNVPGLNTADSVLTVTVSSAVGSTLRYRASVVNTAPPGIQDPRAVTAWTGIFVVTVEAAPISIVDAKVVVDTTKVWHYTGYPVTPSGSDVTVWLPGAVSGADTTWDVAVEPDEYTLSYVANTNVGTATIRATAVPAGKYQGTASATFAIIQKTFSTVDIAYTTERTYTGDTLSAQVRANPPMTGMGAISVRYGTSAELPVNAGDYDVYVSVTGGANISSSNGFQYLGAYTINKMTPVAADLAYTDLASINHVEGDTATEYGIGEVTLKAGNYEGTIDVFYNGEEEVPTTAGSYAVTVEIGGDDNVEAGFVTLGVYKIKSKVTDIDDDDDDTDTTVVSVAMGNREIPGKATVEEAAVAPVKATRVAAAFTAGPSPVSMNAGKITFFSSKQVKGGTLYVFDAAGNAVAKVPAAKSGAGGEIAVWNLRDQKGTAVSEGSYLVKGALLGKDGRRDKVSFVFSVVR

SEQ ID NO: 72517 - DNA, 474 bp, Unknown
  Obtained from environmental sample
  misc_feature (1)..(474): n is a, c, g, or t
gtggcactacaccggataccccgtcaccccgtccggcagcgacgtgacggtatggctgcccggcgccgtgagcggcgcggacacgacgtgggacgtcgcggtcgagccggacgagtacacgctctcctacgtggccaacaccaacgtgggcacggcgacgatcagggcgacggccgttcccgccggcaagtatcagggcaccgcgtccgcgacgttcgccattatccagaagacgttcagcaccgtggacatcgcctacacgacggagcggacgtacaccggcgacacgctgagcgcacaggtcagggcgaacccgccgatgaccggaatgggcgcgatctccgtacgctacggcacgtccgccgaattaccggtgaacgccggcgactacgacgtgtacgtcagcgttacgggcggcgcgaacatctcctcgagcaacggcttccagtacctgggcgcatacaccatcaataa

SEQ ID NO: 72518 - protein, 157 aa, Unknown
  Obtained from environmental sample
  misc_feature (1)..(157): Xaa is any amino acid
MALHRIPRHPVRQRRDGMAARRRERRGHDVGRRGRAGRVHALLRGQHQRGHGDDQGDGRSRRQVSGHRVRDVRHYPEDVQHRGHRLHDGADVHRRHAERTGQGEPADDRNGRDLRTLRHVRRITGERRRLRRVRQRYGRREHLLEQRLPVPGRIHHQ

SEQ ID NO: 72519 - DNA, 6951 bp, Unknown
  Obtained from environmental sample
  misc_feature (1)..(6951): n is a, c, g, or t
gtgaataacaaatttctaaacggcgcccgcagagcgggtgtaatgcttgccttggtgttgttgggggtcagcagcgtctgggctcgtcaagttactgtgaatttggcaagtcttaccgtagtgaacgggggcgtcgcgcagacgggccccgcggcggccggagcgaccttgcttgcgggcaacgcgggtctgggtaccgacgtgttcggtgtgtggggaggcgttctcgggtcagacacggcggtaagcgcgacgatgacctacaaggcggcgggttccgccgaccgcccggctccgatgaccgcgagctacgacagcatcctgacggtgaccgtgggctcgaacgtcgacacggttctcataaccgggaacaaagcggcgacgggcgggacgacggtgaacaagatcgtgttcgcgggcggcaagtccggcaacgcgactgaggtgatctggtcgggcggctccatcaccggcggcacttcggcttgggccaagagggaagacgtgttcttgaataaaggtacgatgaagaggatcgcgatattcagcggctccatcacatcggacgcgaagagcataatcacgggcgtgggcgacggcacgatggcgtcggcgggtacggataacataatcggcgctcccgacctggccacagccggcgggaacaagattacgcttatatcgaactgcgccgacctcggtacggcggccattatcggcaaggtgggaacggccacagcggccgcgactctgcgcatcaacccgccgaacaccggcgagtacattataacgagcgccggcgtggcgatactgggcgacgtggtcataatcggaaaagagatgaacgacaactcgcccggcgcggtgacgatcaccggctggagcggcggtgttgtggcgaacccgagcgacgcggcgatcgtgacgcggtcgggcgtgtacgcgagcgtcaaagtttggggccgcagcgggaacgtcaagatcgtctccaagggcaaggacgcaatccgtgttccgaatacgtatactctgggcgcttcggagggttatgagaccgcgtcgacgggcggcgataagatcgcccttgagatccgttgggcgaaggtggagcactcggcggcgtccggcgtcggcacgtccggcggctcggcgttccgcgtcggcgagggtacgggcttgggcgcgagcatgaagctctacgacgtcgctctgacggctggcgcgacggcatcgtcgaagctgatcggtcagatcgcggtcgccaccggtaaagtggacatcaacggcggaacctacgccgacgcgacgggcgagcacggcaacgccatccaaggcaacgtggtagttcttaactccgtgaaaattgtggcgagcgcctcgagcggtacgggcgactacgtcgtggtgggcgacaagagcgtgacgcttcaggccggtccgaacgcgaaagactccgcgatcgtggcctggtcgggaaccaccggttcgaacaactcgcctgtgggcggtatcaaatctaagcaagtaaccgtgttcgccgacggcgcccgcaaagcggaagtcagggtaggcggcggaacgggaacggccatctacattacaaccggtctgagcggcggcgcgagtaacgccgacgcctcagcgtggaacgcgacgacaaaaacgtttactcctggcgcctttaggctcctgacggtaagcggcgacgcgaacggttcggctatcgttaaggccgcgacgggcaaggcgatcgttgttgagaacaactggtatctttccgctcccggagcgactcctgtcaaggccgggctcggctgggtggcgctcaacgacgcggtcatagtgagaacgggcagcccggttgcgggcgttgacaacctcgtcgaggttatcggcgcgaacgtggttgtaaacggcacgaaactgagcacttcggcgatcaacgtggcgggcgcgtcgggcggttccacgacccctgcgggcgtcggtcttttcgcggcacctaacaaggacgagacgaccctcgaacccgcgaacggcggtaaggtctggatcgtcggcggccaggtacacggcggcgtcggcgcggttcacgcggatgaggtcgtcgtcggcgggacaaggaacggcacgggtatcaacactgcgaccgttaacgtggataccgtgtggtcgatccgtccgacggctatccagtcgacgaacggcgtcacgatcaggtctacgaaaaacatcgttatcaacaataataacgcaaagatcaccaacgtaagcggcgttctcggtacggtcgcggccccgagcgcggtagtatacagcacaaagggcagcataacgatccacaacgtcgactccgtgaagacgggcgccggcgctcaggccaccggtctgttgaccacgaccaagggcacgagcgtgacggtgaacagcggcgtggtcaggtctgcggctggtccggcgatcgtatcggcgggcccggtcgtcatcgacacgactatcggcaggacggcctataacgcgagaggttccgcgaataccggcaccattatcggatccagctccgggaagcccaacgcccgcaaggacatagtgatctcctccggctccaccaacgccgcggcgacctacaacagcgcggtcacggctgagtacggttacgacgtgttcgtaggcatagcgaaggtagaggcgaccggcgcgaccggtttggcttcggcgatcaggaactccgacggcaacgtttatgttatcggcacgaccgatcagggcaagacgatggtcgtatcctcctccggatcggcgataatggtctccaagggccgtattcttgtagacggcggcgagatcaagtccgagggccgtgcgagccccgctgcgggcacgttcgtcgcggcggttcacatgaccgacggcgaggttttggtcggcggtaacgccggcggcggcactttcggcggcaacttctcctatcagtggacgggcgaagagagcgtccttacctccgacctgaacgcgctggcggtttactccacaggcgcggccggcgagaacgtgcagatcggtcccgaaggcgtgattaacgtcaagggtaccagcgcgaacttcggcggcatcaaggtaacggacaaaatcgacgtgatgttcgcgggcggcctcacggtcagcacggcggcttccagggccttctccatcgacgcggtctccggcaacgttgtggtctacgaacgcgccaagatctactcgaaggacggcaacgcggtcacgacggccggcggcaacatcgtggtgaacggcggcgagattctcggcgacaagggcatcctgctctactccaagaagaacgccgttaccggcaaagccggcgacataacgatcaacgccaccgacgacagctcggcgacggacaagaaaaagggcatctacaataagaacggcaccgcgatacgcggcgacgacaccgtatacgtgaccggaaccggcaacgggtccacggcgaccagctgctgggttcacaccgacacggacacggcgatcactgccggcacggcgacgctcgccggtttggtgcagatcacgggcggcacggtgcaggccagcggccagcacgggaagtccagccctgtggcggtctcctcgaagaaagtccgcatgtacggcggcgtagtgcttgccaacgagccccgcgcctccaccgacaataacgagcgctatgtagacgcgaaggccaccggtatccttatccgcaccggcggcggcagaggcgagctcattattgagaacagaagcggcgacaggaactccagagtcgaggcgtacggcgccgacacgggtatcagcaaccgcgatacggccgtgacggtgatggtcgcccagcgcggcaagatcgtggccggcaacaacggcgtcgcgatcaagtccttgggcccgatcgacatccgcggctacgagatccccgaagagggccagcgcgacgacacgacgtacagcgcgtgggtgaagaccggcaacggccccaacgcccgcggtatcttcatgccgatcaaacccggcgcgaagaagaaggatctgtacatctacaatacattcgttgaggccggttccgacggcgcgttcggcatcgactgcgacacgaacacgacggtcaaggccgagcacagcgtagttctcgtccgtcacggcagcacgggcatccgcgctcagggcggcgtgcacatcatcggcacgtacgtcgaggttctggcgacgaacgacaaccgcaccggtacggcgataacgggccgcgagatccgcatcgacggccgcgacctggaagtcgacgaggacacgaagagcgaagtccactccaaggacgtcgcggtgtatgacggcaaggaaggcgcggttgttgaggttacgggcgtcgtccacatgagcggcgaggtcaagacgcacctgaacatcggttcgagcgtagtgggccgtcccgcgaccctctctatgggttcggagaactcccgcaacctgtggaagctgaacacgacctccgagatcgagacgaacgtcacggacgaggtcgagctcggcaagactctgtccatccccgccggcatccgcgtcagcgttcttgacaacggcagccgcctcgaggccgagaagtccgacacggttaagatcgagggtacggtgaccacggccggccagcaggccaacgccgagttcatcagcagcggcaagatcatagtgaaagacggcggcaacattaagttcaaccccgccaacgtgaactcgctcaagaacaacagcgacggcaaagtggtgctgtccctgggcgcgaaactgaacgacagcgttctggttcacgacacgggcgcgttcatgcagcgcaagtacacgttcctgaagtgggcggacaccctcagcggcgagaaccgcggtcccggccaggtcatcatcccgccgatctacgccacgctttacggcaatcagagcgtgttcatcgatccggaagaccttgagccgctcgccggcacctccgtcaaccgcgactactggagcgccgacggaatacgcgtcgactccgtgtacaccgcgaagctcgtgaagttcccggtcgacaagcgctacaagccgtacatcggcaccgaccctgaagacctgcccaagggcgatctctccgtcacgggcctcgacgccatccgcgttgacaccggcgacggcctgtccacggttctgttcaccgaggctggaacgttcgtaaggcacgccgaactcacaaacgaggccggcacgggcacgaaggactacacccacaccatcaaccgcgtcactctgaagcagatcaaagagtggcaggctgaaggcagcggccagaacttcttcgacggctacctcaataacctcgacgagcgcgtagtgacgagcaccgacagcatcgtgaccgtctggagcgacgtgcacgacgtcaagtacaccggcaacaccgcgaagctgcttgacggcgtcaagggcgcgaagttcacctcgccgctctacgacgacgtcgacaaccccaacaagcccatctacttcaagggtctgggcgtgcaccagttctggtacaagggcgttgacggcacgtcatacccgctgacctccacagtgcctgtgaaagtcggaacgtacgagatatgggcctccttcgcgcagggcatcaacttcgaggccgtgccgacagatccgagctcgctcgtctacatcggcaaggtaaacgtggttgagggcgacctgacgtccatcttcggcgtcaaggacaacgagtatctgatcaacatccgcctgcagggccgtaccgcctacagcgaggtgaagatcgatcttcccggcctgctccgcttcggcgccaagtacgacatcgaccagctcgagccgaccgcgaacagcaccgctatcgccggtctgggcggcaaccccgtctccctgaaagccgacagcgtcctgtcgttccgcatcgttaagaacagcgtggacagcgccgactacaaccagttcctcgagttcgacctcggcatcgtcaacaccgccgatcccgcgaacctcgtagagccgctgtcggtaatcgtccgcgtagacttcgtaacgcccgacgagctcaagaaagcgaagcccacctatctgacggtggactacgtgaacgagagaatcacgggcctgctgtccaacacgctctacaccgtcaacggcgccgcgatcaaagccggcgtgaccgagacggacatagccgaggactggatcggccaaacgatcaaggtggtggccctccccggtcccggcagctacgagtacccgagcgacaccgccaatatagtaatcggcgtacgccccgcggttaacgacgctctgaacgccgttaaaggcgacagctcctccggcctcagggccgccgacggccgcctgaacggcacgacgctcgcgatggagtacaaacacgccgactcggcccagtggaagcccgcgatcgccgttgtaacgaccggccttgtagccggcacgtacaacgtccgcctggccgccaccaagaccgccttcgccagcgcctctgtcgacgtggtggtcaacgcgaagaagggcgacgccatcctcgagtccgaccgcgaactcccgagcgtagttacgacggagcaagcggcgatcaagccggtcgcgaagctggcggccacgttcaccgccggcccgagccccgtgtccaagaacgccggcaagatcgcgttcttctccacgaagccggtcaagagcggcgctctgtacatcttcgacgcgacaggcaagtcgctagccaaggtgaaagcctccggcagcggcgaaatcgccagctggaacctgaaagacaagagcggcagtgtggttgctgaaggctcttacgtcgtgaaaggctcgctgacgggcaaggacgggaagaaggacaaggtctcgttggtgttcagcgtcccgacctaa

SEQ ID NO: 72520 - protein, 2316 aa, Unknown
  Obtained from environmental sample
  SIGNAL (1)...(25)
  misc_feature (1)..(2316): Xaa is any amino acid
MNNKFLNGARRAGVMLALVLLGVSSVWARQVTVNLASLTVVNGGVAQTGPAAAGATLLAGNAGLGTDVFGVWGGVLGSDTAVSATMTYKAAGSADRPAPMTASYDSILTVTVGSNVDTVLITGNKAATGGTTVNKIVFAGGKSGNATEVIWSGGSITGGTSAWAKREDVFLNKGTMKRIAIFSGSITSDAKSIITGVGDGTMASAGTDNIIGAPDLATAGGNKITLISNCADLGTAAIIGKVGTATAAATLRINPPNTGEYIITSAGVAILGDVVIIGKEMNDNSPGAVTITGWSGGVVANPSDAAIVTRSGVYASVKVWGRSGNVKIVSKGKDAIRVPNTYTLGASEGYETASTGGDKIALEIRWAKVEHSAASGVGTSGGSAFRVGEGTGLGASMKLYDVALTAGATASSKLIGQIAVATGKVDINGGTYADATGEHGNAIQGNVVVLNSVKIVASASSGTGDYVVVGDKSVTLQAGPNAKDSAIVAWSGTTGSNNSPVGGIKSKQVTVFADGARKAEVRVGGGTGTAIYITTGLSGGASNADASAWNATTKTFTPGAFRLLTVSGDANGSAIVKAATGKAIVVENNWYLSAPGATPVKAGLGWVALNDAVIVRTGSPVAGVDNLVEVIGANVVVNGTKLSTSAINVAGASGGSTTPAGVGLFAAPNKDETTLEPANGGKVWIVGGQVHGGVGAVHADEVVVGGTRNGTGINTATVNVDTVWSIRPTAIQSTNGVTIRSTKNIVINNNNAKITNVSGVLGTVAAPSAVVYSTKGSITIHNVDSVKTGAGAQATGLLTTTKGTSVTVNSGVVRSAAGPAIVSAGPVVIDTTIGRTAYNARGSANTGTIIGSSSGKPNARKDIVISSGSTNAAATYNSAVTAEYGYDVFVGIAKVEATGATGLASAIRNSDGNVYVIGTTDQGKTMVVSSSGSAIMVSKGRILVDGGEIKSEGRASPAAGTFVAAVHMTDGEVLVGGNAGGGTFGGNFSYQWTGEESVLTSDLNALAVYSTGAAGENVQIGPEGVINVKGTSANFGGIKVTDKIDVMFAGGLTVSTAASRAFSIDAVSGNVVVYERAKIYSKDGNAVTTAGGNIVVNGGEILGDKGILLYSKKNAVTGKAGDITINATDDSSATDKKKGIYNKNGTAIRGDDTVYVTGTGNGSTATSCWVHTDTDTAITAGTATLAGLVQITGGTVQASGQHGKSSPVAVSSKKVRMYGGVVLANEPRASTDNNERYVDAKATGILIRTGGGRGELIIENRSGDRNSRVEAYGADTGISNRDTAVTVMVAQRGKIVAGNNGVAIKSLGPIDIRGYEIPEEGQRDDTTYSAWVKTGNGPNARGIFMPIKPGAKKKDLYIYNTFVEAGSDGAFGIDCDTNTTVKAEHSVVLVRHGSTGIRAQGGVHIIGTYVEVLATNDNRTGTAITGREIRIDGRDLEVDEDTKSEVHSKDVAVYDGKEGAVVEVTGVVHMSGEVKTHLNIGSSVVGRPATLSMGSENSRNLWKLNTTSEIETNVTDEVELGKTLSIPAGIRVSVLDNGSRLEAEKSDTVKIEGTVTTAGQQANAEFISSGKIIVKDGGNIKFNPANVNSLKNNSDGKVVLSLGAKLNDSVLVHDTGAFMQRKYTFLKWADTLSGENRGPGQVIIPPIYATLYGNQSVFIDPEDLEPLAGTSVNRDYWSADGIRVDSVYTAKLVKFPVDKRYKPYIGTDPEDLPKGDLSVTGLDAIRVDTGDGLSTVLFTEAGTFVRHAELTNEAGTGTKDYTHTINRVTLKQIKEWQAEGSGQNFFDGYLNNLDERVVTSTDSIVTVWSDVHDVKYTGNTAKLLDGVKGAKFTSPLYDDVDNPNKPIYFKGLGVHQFWYKGVDGTSYPLTSTVPVKVGTYEIWASFAQGINFEAVPTDPSSLVYIGKVNVVEGDLTSIFGVKDNEYLINIRLQGRTAYSEVKIDLPGLLRFGAKYDIDQLEPTANSTAIAGLGGNPVSLKADSVLSFRIVKNSVDSADYNQFLEFDLGIVNTADPANLVEPLSVIVRVDFVTPDELKKAKPTYLTVDYVNERITGLLSNTLYTVNGAAIKAGVTETDIAEDWIGQTIKVVALPGPGSYEYPSDTANIVIGVRPAVNDALNAVKGDSSSGLRAADGRLNGTTLAMEYKHADSAQWKPAIAVVTTGLVAGTYNVRLAATKTAFASASVDVVVNAKKGDAILESDRELPSVVTTEQAAIKPVAKLAATFTAGPSPVSKNAGKIAFFSTKPVKSGALYIFDATGKSLAKVKASGSGEIASWNLKDKSGSVVAEGSYVVKGSLTGKDGKKDKVSLVFSVPT

SEQ ID NO: 72521 - DNA, 1293 bp, Unknown
  Obtained from environmental sample
  misc_feature (1)..(1293): n is a, c, g, or t
ttgcttagatttgataccgcccacaggcgagttgttcgaaccggtggttcccgaccaggccacgatcgcggagtctttcgcgttcggaccggcctgaagcgtcacgctcttgtcgcccaccacgacgtagtcgcccgtaccgctcgaggcgctcgccacaattttcacggagttaagaactaccacgttgccttggatggcgttgccgtgctcgcccgtcgcgtcggcgtaggttccgccgttgatgtccactttaccggtggcgaccgcgatctgaccgatcagcttcgacgatgccgtcgcgccagccgtcagagcgacgtcgtagagcttcatgctcgcgcccaagcccgtaccctcgccgacgcggaacgccgagccgccggacgtgccgacgccggacgccgccgagtgctccaccttcgcccaacggatctcaagggcgatcttatcgccgcccgtcgacgcggtctcataaccctccgaagcgcccagagtatacgtattcggaacacggattgcgtccttgcccttggagacgatcttgacgttcccgctgcggccccaaactttgacgctcgcgtacacgcccgaccgcgtcacgatcgccgcgtcgctcgggttcgccacaacaccgccgctccagccggtgatcgtcaccgcgccgggcgagttgtcgttcatctcttttccgattatgaccacgtcgcccagtatcgccacgccggcgctcgttataatgtactcgccggtgttcggcgggttgatgcgcagagtcgcggccgctgtggccgttcccaccttgccgataatggccgccgtaccgaggtcggcgcagttcgatataagcgtaatcttgttcccgccggctgtggccaggtcgggagcgccgattatgttatccgtacccgccgacgccatcgtgccgtcgcccacgcccgtgattatgctcttcgcgtccgatgtgatggagccgctgaatatcgcgatcctcttcatcgtacctttattcaagaacacgtcttccctcttggcccaagccgaagtgccgccggtgatggagccgcccgaccagatcacctcagtcgcgttgccggacttgccgcccgcgaacacgatcttgttcaccgtcgtcccgcccgtcgccgctttgttcccggttatgagaaccgtgtcgacgttcgagcccacggtcaccgtcaggatgctgtcgtagctcgcggtcatcggagccgggcggtcggcggaacccgccgccttgtaggtcatcgtcgcgcttaccgccgtgtctga

SEQ ID NO: 72522 - protein, 430 aa, Unknown
  Obtained from environmental sample
  misc_feature (1)..(430): Xaa is any amino acid
MLRFDTAHRRVVRTGGSRPGHDRGVFRVRTGLKRHALVAHHDVVARTARGARHNFHGVKNYHVALDGVAVLARRVGVGSAVDVHFTGGDRDLTDQLRRCRRASRQSDVVELHARAQARTLADAERRAAGRADAGRRRVLHLRPTDLKGDLIAARRRGLITLRSAQSIRIRNTDCVLALGDDLDVPAAAPNFDARVHARPRHDRRVARVRHNTAAPAGDRHRAGRVVVHLFSDYDHVAQYRHAGARYNVLAGVRRVDAQSRGRCGRSHLADNGRRTEVGAVRYKRNLVPAGCGQVGSADYVIRTRRRHRAVAHARDYALRVRCDGAAEYRDPLHRTFIQEHVFPLGPSRSAAGDGAARPDHLSRVAGLAAREHDLVHRRPARRRFVPGYENRVDVRAHGHRQDAVVARGHRSRAVGGTRRLVGHRRAYRRV

SEQ ID NO: 72523 - DNA, 3927 bp, Unknown
  Obtained from environmental sample
  misc_feature (1)..(3927): n is a, c, g, or t
gtgcacgcccagacccttgaagtagatgggcttgttggggttgtcgacgtcgtcgtagagcggcgaggtgaacttcgcgcccttgacgccgtcaagcagcttcgcggtgttgccggtgtacttgacgtcgtgcacgtcgctccagacggtcacgatgctgtcggtgctcgtcactacgcgctcgtcgaggttattgaggtagccgtcgaagaagttctggccgctgccttcagcctgccactctttgatctgcttcagagtgacgcggttgatggtgtgggtgtagtccttcgtgcccgtgccggcctcgtttgtgagttcggcgtgccttacgaacgttccagcctcggtgaacagaaccgtggacaggccgtcgccggtgtcaacgcggatggcgtcgaggcccgtgacggagagatcgcccttgggcaggtcttcagggtcggtgccgatgtacggcttgtagcgcttgtcgaccgggaacttcacgagcttcgcggtgtacacggagtcgacgcgtattccgtcggcgctccagtagtcgcggttgacggaggtgccggcgagcggctcaaggtcttccggatcgatgaacacgctctgattgccgtaaagcgtggcgtagatcggcgggatgatgacctggccgggaccgcggttctcgccgctgagggtgtccgcccacttcaggaacgtgtacttgcgctgcatgaacgcgcccgtgtcgtgaaccagaacgctgtcgttcagtttcgcgcccagggacagcaccactttgccgtcgctgttgttcttgagcgagttcacgttggcggggttgaacttaatgttgccgccgtctttcactatgatcttgccgctgctgatgaactcggcgttggcctgctggccggccgtggtcaccgtaccctcgatcttaaccgtgtcggacttctcggcctcgaggcggctgccgttgtcaagaacgctgacgcggatgccggcggggatggacagagtcttgccgagctcgacctcgtccgtgacgttcgtctcgatctcggaggtcgtgttcagcttccacaggttgcgggagttctccgaacccatagagagggtcgcgggacggcccactacgctcgaaccgatgttcaggtgcgtcttgacctcgccgctcatgtggacgacgcccgtaacctcaacaaccgcgccttccttgccgtcatacaccgcgacgtccttggagtggacttcgctcttcgtgtcctcgtcgacttccaggtcgcggccgtcgatgcggatctcgcggcccgttatcgccgtaccggtgcggttgtcgttcgtcgccagaacctcgacgtacgtgccgatgatgtgcacgccgccctgagcgcggatgcccgtgctgccgtgacggacgagaactacgctgtgctcggccttgaccgtcgtgttcgtgtcgcagtcgatgccgaacgcgccgtcggaaccggcctcaacgaatgtattgtagatgtacagatccttcttcttcgcgccgggtttgatcggcatgaagataccgcgggcgttggggccgttgccggtcttcacccacgcgctgtacgtcgtgtcgtcgcgctggccctcttcggggatctcgtagccgcggatgtcgatcgggcccaaggacttgatcgcgacgccgttgttgccggccacgatcttgccgcgctgggcgaccatcaccgtcacggccgtatcgcggttgctgatacccgtgtcggcgccgtacgcctcgactctggagttcctgtcgccgcttctgttctcaataatgagctcgcctctgccgccgccggtgcggataaggataccggtggccttcgcgtctacatagcgctcgttattgtcggtggaggcgcggggctcgttggcaagcactacgccgccgtacatgcggactttcttcgaggagaccgccacagggctggacttcccgtgctggccgctggcctgcaccgtgccgcccgtgatctgcaccaaaccggcgagcgtcgccgtgccggcagtgatcgccgtgtccgtgtcggtgtgaacccagcagctggtcgccgtggacccgttgccggttccggtcacgtatacggtgtcgtcgccgcgtatcgcggtgccgttcttattgtagatgccctttttcttgtccgtcgccgagctgtcgtcggtggcgttgatcgttatgtcgccggctttgccggtaacggcgttcttcttggagtagagcaggatgcccttgtcgccgagaatctcgccgccgttcaccacgatgttgccgccggccgtcgtgaccgcgttgccgtccttcgagtagatcttggcgcgttcgtagaccacaacgttgccggagaccgcgtcgatggagaaggccctggaagccgccgtgctgaccgtgaggccgcccgcgaacatcacgtcgattttgtccgttaccttgatgccgccgaagttcgcgctggtacccttgacgttaatcacgccttcgggaccgatctgcacgttctcgccggccgcgcctgtggagtaaaccgccagcgcgttcaggtcggaggtaaggacgctctcttcgcccgtccactgataggagaagttgccgccgaaagtgccgccgccggcgttaccgccgaccaaaacctcgccgtcggtcatgtgaaccgccgcgacgaacgtgcccgcagcggggctcgcacggccctcggacttgatctcgccgccgtctacaagaatacggcccttggagaccattatcgccgatccggaggaggatacgaccatcgtcttgccctgatcggtcgtgccgataacataaacgttgccgtcggagttcctgatcgccgaagccaaaccggtcgcgccggtcgcctctaccttcgctatgcctacgaacacgtcgtaaccgtactcagccgtgaccgcgctgttgtaggtcgccgcggcgttggtggagccggaggagatcactatgtccttgcgggcgttgggcttcccggagctggatccgataatggtgccggtattcgcggaacctctcgcgttataggccgtcctgccgatagtcgtgtcgatgacgaccgggcccgccgatacgatcgccggaccagccgcagacctgaccacgccgctgttcaccgtcacgctcgtgcccttggtcgtggtcaacagaccggtggcctgagcgccggcgcccgtcttcacggagtcgacgttgtggatcgttatgctgccctttgtgctgtatactaccgcgctcggggccgcgaccgtaccgagaacgccgcttacgttggtgatctttgcgttattattgttgataacgatgtttttcgtagacctgatcgtgacgccgttcgtcgactggatagccgtcggacggatcgaccacacggtatccacgttaacggtcgcagtgttgatacccgtgccgttccttgtcccgccgacgacgacctcatccgcgtgaaccgcgccgacgccgccgtgtacctggccgccgacgatccagaccttaccgccgttcgcgggttcgagggtcgtctcgtccttgttaggtgccgcgaaaagaccgacgcccgcaggggtcgtggaaccgcccgacgcgcccgccacgttgatcgccgaagtgctcagtttcgtgccgtttacaaccacgttcgcgccgataacctcgacgaggttgtcaacgcccgcaaccgggctgcccgttctcactatgaccgcgtcgttgagcgccacccagccgagcccggccttgacaggagtcgctccgggagcggaaagataccagttgttctcaacaacgatcgccttgcccgtcgcggccttaacgatagccgaaccgttcgcgtcgccgcttaccgtcaggagcctaaaggcgccaggagtaaacgtttttgtcgtcgcgttccacgctga

SEQ ID NO: 72524 - protein, 1308 aa, Unknown
  Obtained from environmental sample
  misc_feature (1)..(1308): Xaa is any amino acid
MHAQTLEVDGLVGVVDVVVERRGELRALDAVKQLRGVAGVLDVVHVAPDGHDAVGARHYALVEVIEVAVEEVLAAAFSLPLFDLLQSDAVDGVGVVLRARAGLVCEFGVPYERSSLGEQNRGQAVAGVNADGVEARDGEIALGQVFRVGADVRLVALVDRELHELRGVHGVDAYSVGAPVVAVDGGAGERLKVFRIDEHALIAVKRGVDRRDDDLAGTAVLAAEGVRPLQERVLALHERARVVNQNAVVQFRAQGQHHFAVAVVLERVHVGGVELNVAAVFHYDLAAADELGVGLLAGRGHRTLDLNRVGLLGLEAAAVVKNADADAGGDGQSLAELDLVRDVRLDLGGRVQLPQVAGVLRTHREGRGTAHYARTDVQVRLDLAAHVDDARNLNNRAFLAVIHRDVLGVDFALRVLVDFQVAAVDADLAARYRRTGAVVVRRQNLDVRADDVHAALSADARAAVTDENYAVLGLDRRVRVAVDAERAVGTGLNECIVDVQILLLRAGFDRHEDTAGVGAVAGLHPRAVRRVVALALFGDLVAADVDRAQGLDRDAVVAGHDLAALGDHHRHGRIAVADTRVGAVRLDSGVPVAASVLNNELASAAAGADKDTGGLRVYIALVIVGGGAGLVGKHYAAVHADFLRGDRHRAGLPVLAAGLHRAARDLHQTGERRRAGSDRRVRVGVNPAAGRRGPVAGSGHVYGVVAAYRGAVLIVDALFLVRRRAVVGGVDRYVAGFAGNGVLLGVEQDALVAENLAAVHHDVAAGRRDRVAVLRVDLGAFVDHNVAGDRVDGEGPGSRRADREAAREHHVDFVRYLDAAEVRAGTLDVNHAFGTDLHVLAGRACGVNRQRVQVGGKDALFARPLIGEVAAESAAAGVTADQNLAVGHVNRRDERARSGARTALGLDLAAVYKNTALGDHYRRSGGGYDHRLALIGRADNINVAVGVPDRRSQTGRAGRLYLRYAYEHVVTVLSRDRAVVGRRGVGGAGGDHYVLAGVGLPGAGSDNGAGIRGTSRVIGRPADSRVDDDRARRYDRRTSRRPDHAAVHRHARALGRGQQTGGLSAGARLHGVDVVDRYAALCAVYYRARGRDRTENAAYVGDLCVIIVDNDVFRRPDRDAVRRLDSRRTDRPHGIHVNGRSVDTRAVPCPADDDLIRVNRADAAVYLAADDPDLTAVRGFEGRLVLVRCREKTDARRGRGTARRARHVDRRSAQFRAVYNHVRADNLDEVVNARNRAARSHYDRVVERHPAEPGLDRSRSGSGKIPVVLNNDRLARRGLNDSRTVRVAAYRQEPKGARSKRFCRRVPR

SEQ ID NO: 72525 - DNA, 660 bp, Unknown
  Obtained from environmental sample
  misc_feature (1)..(660): n is a, c, g, or t
atggagaaaaaaatcactggatataccaccgttgatatatcccaatggcatcgtaaagaacattttgaggcatttcagtcagttgctcaatgtacctataaccagaccgttcagctggatattacggcctttttaaagaccgtaaagaaaaataagcacaagttttatccggcctttattcacattcttgcccgcctgatgaatgctcatccggaatttcgtatggcaatgaaagacggtgagctggtgatatgggatagtgttcacccttgttacaccgttttccatgagcaaactgaaacgttttcatcgctctggagtgaataccacgacgatttccggcagtttctacacatatattcgcaagatgtggcgtgttacggtgaaaacctggcctatttccctaaagggtttattgagaatatgtttttcgtctcagccaatccctgggtgagtttcaccagttttgatttaaacgtggccaatatggacaacttcttcgcccccgttttcaccatgggcaaatattatacgcaaggcgacaaggtgctgatgccgctggcgattcaggttcatcatgccgtttgtgatggcttccatgtcggcagaatgcttaatgaattacaacagtactgcgatgagtggcagggcggggcgtaa

SEQ ID NO: 72526 - protein, 219 aa, Unknown
  Obtained from environmental sample
  DOMAIN (6)...(209): Chloramphenicol acetyltransferase
  misc_feature (1)..(219): Xaa is any amino acid
MEKKITGYTTVDISQWHRKEHFEAFQSVAQCTYNQTVQLDITAFLKTVKKNKHKFYPAFIHILARLMNAHPEFRMAMKDGELVIWDSVHPCYTVFHEQTETFSSLWSEYHDDFRQFLHIYSQDVACYGENLAYFPKGFIENMFFVSANPWVSFTSFDLNVANMDNFFAPVFTMGKYYTQGDKVLMPLAIQVHHAVCDGFHVGRMLNELQQYCDEWQGGA

SEQ ID NO: 72527 - DNA, 1227 bp, Unknown
  Obtained from environmental sample
  misc_feature (1)..(1227): n is a, c, g, or t
ttggtggaggaacatattttgtcgttaggtgaaacgaacgatgtttacatcaagcgccacaccgaagtaaatttaggtgataataaattggataaacttttatctaaagaagaattctatgccgccgcgccacccgcgtcgaaatttgaggacgatggtatgtcggtcaaaataacctacagatggagaaacgtcccggtttatttaccggaagaagctaaaaagcacaacctttataatgattggatgaatgaaaaaaagaaaattgaggattatttaaataatattctgcagaaaatatacgagactgaaaaaaaagaaactgactttaaaaaggttctgcggatctttcttggaacgaaacaggtattcaaattattgaaagacgaaataaatgatctgaaaaattacaattttgaaaaggcggcacctgacgacttaaaagacaaagtaaataggataaacgagattcgtaaaaaagtcgcgaacaagataactgaaatagccgaagaaaagcataaggaggaaataaaagatgagattgaagacattgaaaaaagaattaaggaaaagaatgacaaaaaagcagatttaaaaaaagaactagacgaccatgaagcaacgctgggagtagacatagcgtgtattaatggagaaattgaggggaaaaaagagacaatagaaaaattgaagaaggatgtcaccgatgttaaggaagacggatcaaaaaaacaggaagatgagataaatggaaaaaccactaccgacgccgaaaaagacccggacgcgatgatttccgatctccgaagcaatataaacaaaatcgaaaatgatataaaaatattgaacagcgaaatccagcgaaaaaataaagattttgcgatgataaaaattagaaatcaaaatgatacaaataatattgagcgtgaaattaaacaatcgcaaaataaaattgagcaattaagaaaaaagataaataatgttacagtgactcagaataaagaatcgtctttaaatgtttttaacaaaaaccaaagtcaaaacgaaattaagggtgagcttaccgtacccaaattacattctttgcccaaagtaggaacgttatatcaaattggcggaaataaccaaaaatgttatttagccatatcggattgggatgattttgattcgggaaaacgagaggcaaaaagattatacgaagcaaaactttgcgtggaaaggagttag

SEQ ID NO: 72528 - protein, 408 aa, Unknown
  Obtained from environmental sample
  misc_feature (1)..(408): Xaa is any amino acid
MVEEHILSLGETNDVYIKRHTEVNLGDNKLDKLLSKEEFYAAAPPASKFEDDGMSVKITYRWRNVPVYLPEEAKKHNLYNDWMNEKKKIEDYLNNILQKIYETEKKETDFKKVLRIFLGTKQVFKLLKDEINDLKNYNFEKAAPDDLKDKVNRINEIRKKVANKITEIAEEKHKEEIKDEIEDIEKRIKEKNDKKADLKKELDDHEATLGVDIACINGEIEGKKETIEKLKKDVTDVKEDGSKKQEDEINGKTTTDAEKDPDAMISDLRSNINKIENDIKILNSEIQRKNKDFAMIKIRNQNDTNNIEREIKQSQNKIEQLRKKINNVTVTQNKESSLNVFNKNQSQNEIKGELTVPKLHSLPKVGTLYQIGGNNQKCYLAISDWDDFDSGKREAKRLYEAKLCVERS

SEQ ID NO: 72529 - DNA, 534 bp, Unknown
  Obtained from environmental sample
  misc_feature (1)..(534): n is a, c, g, or t
atgaatcttgcgcatatagaagagcgctcatttatttacggcccgggctgcaggtttgtcgtttgggttcagggttgctctatccgatgcgaagggtgctggaaccattggatgtgggactttgaacctcgaaatgttctctcagtctatgagatatttgaaatggttaccgtagaaaaggattttatcgagggaataactatacttggcggggaaccgttagatcaataccacgaaactgtcaaactgcttagtttatgtagaagcgcggggttaacaactatgctttttaccggatatgaaacagatgaaatatgcgatagaagtgtctttgagttatgtgatatccttattaccggtcgttatgaccagacaaaaaggacattgtgccatcagtggatcggttcgacaaatcaagagattctgtttttgacagatgtttataaggactatgaattgaaaaacgcgaactatgtggagatcaatatcgatgaaaacggcatggttacatttttaggttttccgcccgggtaa

SEQ ID NO: 72530 - protein, 177 aa, Unknown
  Obtained from environmental sample
  misc_feature (1)..(177): Xaa is any amino acid
MNLAHIEERSFIYGPGCRFVVWVQGCSIRCEGCWNHWMWDFEPRNVLSVYEIFEMVTVEKDFIEGITILGGEPLDQYHETVKLLSLCRSAGLTTMLFTGYETDEICDRSVFELCDILITGRYDQTKRTLCHQWIGSTNQEILFLTDVYKDYELKNANYVEINIDENGMVTFLGFPPG

SEQ ID NO: 72531 - DNA, 2553 bp, Unknown
  Obtained from environmental sample
  misc_feature (1)..(2553): n is a, c, g, or t
gtgcgggtatcgactaatatggccaaaatacgcggtatattgcgccggatgtcgtatggcaaagacggtcgggtatctatacccaaagccgtaattatcgcgttagccgccccgcctttgttattcgtgctgacagctttcgtgttcagcttgaccgacattcgcattgccgagcataacccgtcttggatcattctcgaccgtaactaccgcttcatagccgagatcgagtcgccgcagggcgagataggttattggccggcgccggacgctctgccgcaaacgctagttacggccgttctggccgccgaagaccgcagattccgtaaacatatcggcgtagacttaaagtccgttggacgcgcgtttgtcaataactacataaagagaaaggggttttcaggcgcttctactatcgctatgcagaccgcgcggttgcagaggggcgggcgcagcggtctgttctccaaggttagagactcgtttgcggcggtgtggctgacgctcttctacgggcgggagcgggtgcttagacagtacgtatccatatccccatacggaaacagaatcgccggcgccccgtgcgcgtcgcgacggtactttaggaaaccggtgcaggatctgagtttagccgagagcgccctcttagtatcaataccgagagcgccgggacggatgaacctattcacatcggacggtttcgccgccgctcgttcccgcgctgcgtttattatcgggcggtgcgcgaagtacggatggatcgacagcacggagtaccggcaatcgacggcggaactgaaagcgtttgtcgtcccgccgaaagatatcagagacgaggcgtccatacatgtcgctcttagatatacgaaaatgttgcacggcatgatcggcggtaacggtaatagcataaacagtcgcaatatcaataataacaatgtcaaaagaagtatcaacggtatcgatattgacgatttagaccttacggatacaggcgacagcgtcgtcagccacggacttgtggtctcatctatagacatagacctccagcggcacgtgcaacgcgaactcgcaaatcacctcgaccatatcaagacccacgatgtggaaaacggcgcggtgattgtgcttgacaaaaacacccgccaagtattggcatacgtcggctccggcgggtatttcagttttgataacgggatgctcgactacgcggcgataaagaggtcgaccggcagcctgatgaaaccgttcatcttcgcgatgggcatggaggatttggggtacacggcggcgacggttctcaaagacatcaactacgatttcggcgaggggacgcgttcgttcattcctgtcaacagcgacaggcagtatcaaggccccatactgtacaagtacgccttagccaacagcagaaatattccggcggtgcaactgctaaaggagcttggcatcaacaatgtctacgagcgtctgggcgcccttagattggcggaggaggacgggcgctgggactactacggcctcgggctgtcaataggcgggctgtactgcggcctcacgtcaatcgccagagcgtacttgacattagggaatgacggaaaatttggagaactcgcttggtttagggataagacagacctacaacgcaaacaagtatttactccgcagtctgcaagaatgatacagcgttttttggccgacccgcaagcgaggctcccgaccttcccgcgcgaggggaattttgagtacccgttcgccgttgccgttaaaaccggcacctccgaaggatttcgggacgcgtggtgcgtagcgtggagcaaccgctaccttgttgcggcgtgggcgggcaacgccgacaaccgttcaatgaaacacgtgaccggctacacgggcgccgcgccgctggtgaagaagattatgctacacctccacccaaacgaacgcgacggactctacgagggcggttttcccgtccccgacgggtggacacccttcgctatctgccgcctgaccggaatgctcgccaacgaaaacactccctacgtgacaagcgactactttgcctccggcacggaacccatggaagcaagcaccgtgctacgcgtactgcccgtagacaagcgcaacggtcttctagcaaatcaacgctgccccaaacgatacgtggagcacaggcaatttttatctctctctccagagtacgaacagtggggacgcgcctacggcctaccaatcgccccgcgcctgcatagcccgctatgcccgggcagcgagagcctgccgacggactacacgcttgagatcacctggccgcgatcaggcgcccgcttcttcgttgaccccgagtcgccgcccgaccaagtattcctgccggtcaactgcgtggcggaaccggaggcgcgaagccttttgtggttcgtcaacggcgaagaacactcggtaacaaacccgccgcacacactgcggctaccgctcaagaacgggaagtacgcggtacaagcggcggtggcgggaacgccggtgcgcagtcgggttgttcggtttgaggtttattaa

SEQ ID NO: 72532 - protein, 850 aa, Unknown
  Obtained from environmental sample
  DOMAIN (371)...(640): Penicillin binding protein transpeptidase domain
  misc_feature (1)..(850): Xaa is any amino acid
MRVSTNMAKIRGILRRMSYGKDGRVSIPKAVIIALAAPPLLFVLTAFVFSLTDIRIAEHNPSWIILDRNYRFIAEIESPQGEIGYWPAPDALPQTLVTAVLAAEDRRFRKHIGVDLKSVGRAFVNNYIKRKGFSGASTIAMQTARLQRGGRSGLFSKVRDSFAAVWLTLFYGRERVLRQYVSISPYGNRIAGAPCASRRYFRKPVQDLSLAESALLVSIPRAPGRMNLFTSDGFAAARSRAAFIIGRCAKYGWIDSTEYRQSTAELKAFVVPPKDIRDEASIHVALRYTKMLHGMIGGNGNSINSRNINNNNVKRSINGIDIDDLDLTDTGDSVVSHGLVVSSIDIDLQRHVQRELANHLDHIKTHDVENGAVIVLDKNTRQVLAYVGSGGYFSFDNGMLDYAAIKRSTGSLMKPFIFAMGMEDLGYTAATVLKDINYDFGEGTRSFIPVNSDRQYQGPILYKYALANSRNIPAVQLLKELGINNVYERLGALRLAEEDGRWDYYGLGLSIGGLYCGLTSIARAYLTLGNDGKFGELAWFRDKTDLQRKQVFTPQSARMIQRFLADPQARLPTFPREGNFEYPFAVAVKTGTSEGFRDAWCVAWSNRYLVAAWAGNADNRSMKHVTGYTGAAPLVKKIMLHLHPNERDGLYEGGFPVPDGWTPFAICRLTGMLANENTPYVTSDYFASGTEPMEASTVLRVLPVDKRNGLLANQRCPKRYVEHRQFLSLSPEYEQWGRAYGLPIAPRLHSPLCPGSESLPTDYTLEITWPRSGARFFVDPESPPDQVFLPVNCVAEPEARSLLWFVNGEEHSVTNPPHTLRLPLKNGKYAVQAAVAGTPVRSRVVRFEVY

SEQ ID NO: 72533 - DNA, 903 bp, Unknown
  Obtained from environmental sample
  misc_feature (1)..(903): n is a, c, g, or t
atgaaatgtccgatttgcggcgtcgagatggcggaggggtcggaggtatgttccaagtgcggttgcgagattcatacgtgtttcggtatgaacgagcttttgataaccgttaatagagagtacgacgcttgggaaaaaagcccgcccaatatcataaataaaggtcttggagtgattaccgctccggtcgattatcttcttcgtccggttatgaaaaaaatcgcgccgctcttggagggcgtagtctccggtgcgaataactatatcgcgtccgccgtagagagcgtttcatccaaaattccagattttgagaatttggaagaaaggctgttttccaattggtttaccgaggctgatgcaagcgctaaaaactggaagaccgcgggtatcgccgcaatggcgacggaaggcggcgccttgggagcgggcggagtatttctgatattggccgatattccggcgtcgttcggaatcattatggcgttcgccaataaaatcgcgttgtcttacgggctacctattaaaacggaagagactcaaatcgcgatactcaaagcggtatccgcaggttcggcaaacaacatcagggagaaagcgtccgccgctttcgcgctgagagccaccggaaagacattgcaggaaaaaacatggcggcagatatacaacttatcggttgacaacgttctaagtacggagaagttgatagtggcggtgcgggaaattttgaaaaagttagggattaccattacggagaaaaaggcgtcgcaattacttccggcgataggcgcggcggtgggcgcgggcataaacgccgcgtgggccgccgacgcgttggaggcggtcagacagtatgcgcgtcagtggactgtggaaaattacgttaagcacaacgggggaaagtaa

SEQ ID NO: 72534 - protein, 300 aa, Unknown
  Obtained from environmental sample
  misc_feature (1)..(300): Xaa is any amino acid
MKCPICGVEMAEGSEVCSKCGCEIHTCFGMNELLITVNREYDAWEKSPPNIINKGLGVITAPVDYLLRPVMKKIAPLLEGVVSGANNYIASAVESVSSKIPDFENLEERLFSNWFTEADASAKNWKTAGIAAMATEGGALGAGGVFLILADIPASFGIIMAFANKIALSYGLPIKTEETQIAILKAVSAGSANNIREKASAAFALRATGKTLQEKTWRQIYNLSVDNVLSTEKLIVAVREILKKLGITITEKKASQLLPAIGAAVGAGINAAWAADALEAVRQYARQWTVENYVKHNGGK

SEQ ID NO: 72535 - DNA, 4878 bp, Unknown
  Obtained from environmental sample
  misc_feature (1)..(4878): n is a, c, g, or t
gtgttgttgaacccgtctgctatcaaagatgcggcggggcgcgcgcttacgaacaagaagccgagttcgttttacgtgtatttacccaaagtaaggccgaatgccaagtggagccgcgggtttggcatagtggagcggctgggcccgcagcactttccgataaccgcggccggcgtttcgagcttagacttcagggtgcacaagatagacccattgcacacggcgttcggagacttcccgtcctcgcaaattgaggtgagcgaaacgtccatgccccccggaccgggcgaggagccctcctccatggactcaaagtacggcaagggcgaacgctgggattacccgtcttacgttgaaaagcacataaggatgctcggcagcccgcattattccggagttgtggacctcggcaacttgggcggaagcaagattaacagcgtagacctgaaaccgatgttcgccgcagtcagcggcaaggacaaacccggtacgtatctggtcggctttaggttgctggacggagcgcagaagcgatactacgcaaaagtgaccgtgacggatttatgcctcagcgcggtggagtctaagtcgaaaggcgacaaggtgatgtttgcggttacgaactattcgagcgacaaacccgtggccgacgcgacgataaggatagacggcctgatagacgatgagatgacgacgctcacgcagggcaagaccggctcggacgggttcttctcattcgagcacactaaggcgaccatggagaggctgaacaactcgacggtgcgcagggtcgtggtctccaagggcgacgacgtgctggttatcaataccgaaaacgatagaagcggcacgctggacgtcttttcggacaaccactggagcaagagcgacgacgggtggcttaattggccagggcgcaacacgacgtttaaggcggagaaggcggaggtacgcgggttcgtgcgcaccgagcgcccaatctaccgcccggaggacagcgtctttataaagggatacgtgagggagctgctttacggcgccataaacctgcctaccggcggcggcgagtataccgttaaagtcagcaacccgtccgacgtttacgccacgcgaaaaattacgctgaatgagttcggcgcgtttcatttgaaggttgcgccgccgtcggatgaaaccgcgccgacggggacttacgaggtatcgctgtataagagcgtcaaaggcgagggtgagaggctgattacccgcacggatttcttggttgacgcctaccgtattccgcgttttgaggttcgggtcagcggcgccgaccgcgttcccaacgacgggccggcgctggtacgcgccacggccacatactacgccggcggccgcttggtcgagagggacgtcgcgtggaaggtgacgtcttacccctacgaccacaggccgcgcgggttcgccaattacatattgtcgagcgacagccgctacggcgcgtcgcaggaacccgccagacaaagcgtgtttgaggagaatggaaaaacggacggaaacggtaacgccgccgtaacgctcaacccgcaggcggcgacggcgggaaatcctacaaagtacgttgtggaggcgacggttaccgacgccgatatgcaaacggtatcgggacgccacaccgttatcgcgttgccgccgtttatactcggcatacgcgccaataggcacataacaagcgggaatacgatatccgcccgcatagccgcaataggcgtcaacgactcccttgtcgccggacagaaggtgcgcgcggagctcaaacgggtctcgtggacctcctacttgacagactcggatttttcttccggcaagccgaagtatataacaaacgagacggcggagttgattgaggagaaggaagtggttacgagcgcgaatccgacggcgattgagttcaagaatcaacagcccggcgtgtacatactggcgctgtcttcgcgtgacaggctggggcggctgcagacggtcaagatagacctatacctcgccggcggcgagcagcaggcatggaagaaagccgagcagagcgtctttgaaacggtaatggacagaaactcctacgagccgggacagcaggcgaagattttgctgaagagcccgtataagaaagcgctcgctcttgcggtaacggaaatgccgaacggcgagaacgcgtacaaatgggtaagcgtggacaacggtcagggcacgttcacgctcgatatcaagcaggagatggcgccgcgtgtacctgtgagctttttgctgatgcgcccgcgagccgccgcgccgcgccgcgccgcggacggaacgtctgttgacgccggaaaaccggagacggtggggaacacgacgtggctgacggtgaacccggtggccaatatgctcgacgtgaaactgtcgcacgcgccgacagtaacgcccggcgcgacgctcgaagtgaccataaacctccgcgacatacagggcaaggcgcgtcccggcgaggtcgctttgtggttggtcgacgaggcggtgctgtcgctgcgcaaagagcacagcttagacccgcttgaggcgtttttgaaagaggtcgaaacgcacgtgagcataatggacagccgcaaccttgtgttaggcgatctcatcgtgtcgcaaaatcccggcggcgacggcggcgatgaggaagacgacgggctcgggaaaatcaccccgcgcaaaaatttcaaagtggtgccgtattggaatccctctataaaagttgacaaaaacggaaccgccgttgtgaagattcagatgtcggacgaccttacaaactacgccgtacgcgctatggcggtcagcgggccggataggttcggcacggccaagtcgcgggtgtcggtgcgcctcccggtaacgattcaaccggcgttgccgcgatttgtgcggctcggcgacaaactgcgcgccggcggtatagcccgcgtggttgagggcggcggcggcgcggctacgtttatgataaacgccaaagggctgtccgtcaagaatattcccgacaagcagatacagctcgactcggtcaagccgatgcgactctacgccgacctcacggtagagacgccgccgttcacaaagcgcggtaagctgcagtgggactcggtgtcaatcaagatggcggtaaagagaagcgccgacaacgccggcgacgcctttgaggtcaagataccggtgctgttagacagacagttcgtagaggagacgcaattctctcagattagcaagggcggaaatttctcgtggcaagccctacccgcaccggcaaggcccaacacgattgccggaaatttattcataagcgagaaccaatacctgcccaaaatcatctcggctacggcgagccttacgcgctttccatacggatgttcggaacaggtcgtgtcgcagtcgtacccgtccgtcgtctacaagggaatgtgggaaaagtatggcgttgaaccgcccgatacgtcggtgaccgaaagcgtgaagagggcgatggcgtttttgaagacgacgcaacatagcgacggtctcttcggctactggccgggtactaaggggtacgtttacctcacggcatacgtggtaaatttcttgacggagctaaacgccgtgaacaagacgctggaaaagccgttaccgtttgaccaaagtatgtatctgtccgccatagaggctttgaagcggtcgctgcgcagcgattacagccgctttgtgggcggtcagtcggcgtacgagagaagttgcgccctcgttgcgcttgcgagaagcggacacaccgacataggctacactcgggaacttgccgccgcgtcgaacgagttggatattatgggcaaggccaacgtgttcaaggccatttcggaaaaagagggaattctcggcaagcagtacgccgcgttggaagaccagctctggaaatccgcgatatttatggatcgcaaaggcaaggaggtcttcggcggattccagaagtacggcgtgccggtaggagcgaggatgcactcgagcgacgcagtagcgctggcttcgtttgtgggcgcgatgtcgtcgtcgtcaaagaccaagtcgaacccgaggacgcagctcttagcccaagagctggcgaacatcggcgcggacgacggctggggcaacacttacgcgaacagtatgtcgcttcttgcgctacgcgactttatggacagcagggaagagggagcggcgagcaatacttttaaactcaacgacggcgataataagcctaagcaactgaccatgaaaaccgcgacgacggcctactttacaaacggcaaagccggcagcgtaacccccgacggccagtcggcgagccgcccgttttgggtaaggctctcccgccgctacataccgcaggcgttgggcggcacagccgaaccggagcaacgcgggttcgccgtgaaacgcgacttgttcagaatcaaaaaaggagccccgccgtcaagagttacgatagacaaaggcggcaccacgataaccgtcaaaagcggcgacattgtggaagagcacgtacaagtagtcaattcggaagagaggctgttcgtagccgtatccgtcccgatggccgccggtttcgaaccgctgaacccgagattggagaacgcgtcgagcgacgccgtccccacaaacaaaacgacaaacggcggcgactacagcgccttctacgacgaccgagtagtatacttcttcgagcggatgccgcagggtacctatgacttctacttccggtcgcaagcgataacggaaggagaattctcgcaacccccggcacgagcggagatgatgtaccaaatgaacgtgttcggagcgagcgccggcggcgtggttgtggttgagaagcagtaa

SEQ ID NO: 72536 - protein, 1625 aa, Unknown
  Obtained from environmental sample
  DOMAIN (685)...(849): Alpha-2-macroglobulin family N-terminal region
  misc_feature (1)..(1625): Xaa is any amino acid
MLLNPSAIKDAAGRALTNKKPSSFYVYLPKVRPNAKWSRGFGIVERLGPQHFPITAAGVSSLDFRVHKIDPLHTAFGDFPSSQIEVSETSMPPGPGEEPSSMDSKYGKGERWDYPSYVEKHIRMLGSPHYSGVVDLGNLGGSKINSVDLKPMFAAVSGKDKPGTYLVGFRLLDGAQKRYYAKVTVTDLCLSAVESKSKGDKVMFAVTNYSSDKPVADATIRIDGLIDDEMTTLTQGKTGSDGFFSFEHTKATMERLNNSTVRRVVVSKGDDVLVINTENDRSGTLDVFSDNHWSKSDDGWLNWPGRNTTFKAEKAEVRGFVRTERPIYRPEDSVFIKGYVRELLYGAINLPTGGGEYTVKVSNPSDVYATRKITLNEFGAFHLKVAPPSDETAPTGTYEVSLYKSVKGEGERLITRTDFLVDAYRIPRFEVRVSGADRVPNDGPALVRATATYYAGGRLVERDVAWKVTSYPYDHRPRGFANYILSSDSRYGASQEPARQSVFEENGKTDGNGNAAVTLNPQAATAGNPTKYVVEATVTDADMQTVSGRHTVIALPPFILGIRANRHITSGNTISARIAAIGVNDSLVAGQKVRAELKRVSWTSYLTDSDFSSGKPKYITNETAELIEEKEVVTSANPTAIEFKNQQPGVYILALSSRDRLGRLQTVKIDLYLAGGEQQAWKKAEQSVFETVMDRNSYEPGQQAKILLKSPYKKALALAVTEMPNGENAYKWVSVDNGQGTFTLDIKQEMAPRVPVSFLLMRPRAAAPRRAADGTSVDAGKPETVGNTTWLTVNPVANMLDVKLSHAPTVTPGATLEVTINLRDIQGKARPGEVALWLVDEAVLSLRKEHSLDPLEAFLKEVETHVSIMDSRNLVLGDLIVSQNPGGDGGDEEDDGLGKITPRKNFKVVPYWNPSIKVDKNGTAVVKIQMSDDLTNYAVRAMAVSGPDRFGTAKSRVSVRLPVTIQPALPRFVRLGDKLRAGGIARVVEGGGGAATFMINAKGLSVKNIPDKQIQLDSVKPMRLYADLTVETPPFTKRGKLQWDSVSIKMAVKRSADNAGDAFEVKIPVLLDRQFVEETQFSQISKGGNFSWQALPAPARPNTIAGNLFISENQYLPKIISATASLTRFPYGCSEQVVSQSYPSVVYKGMWEKYGVEPPDTSVTESVKRAMAFLKTTQHSDGLFGYWPGTKGYVYLTAYVVNFLTELNAVNKTLEKPLPFDQSMYLSAIEALKRSLRSDYSRFVGGQSAYERSCALVALARSGHTDIGYTRELAAASNELDIMGKANVFKAISEKEGILGKQYAALEDQLWKSAIFMDRKGKEVFGGFQKYGVPVGARMHSSDAVALASFVGAMSSSSKTKSNPRTQLLAQELANIGADDGWGNTYANSMSLLALRDFMDSREEGAASNTFKLNDGDNKPKQLTMKTATTAYFTNGKAGSVTPDGQSASRPFWVRLSRRYIPQALGGTAEPEQRGFAVKRDLFRIKKGAPPSRVTIDKGGTTITVKSGDIVEEHVQVVNSEERLFVAVSVPMAAGFEPLNPRLENASSDAVPTNKTTNGGDYSAFYDDRVVYFFERMPQGTYDFYFRSQAITEGEFSQPPARAEMMYQMNVFGASAGGVVVVEKQ

SEQ ID NO: 72537 - DNA, 972 bp, Unknown
  Obtained from environmental sample
  misc_feature (1)..(972): n is a, c, g, or t
gtggagtcggatgagtcgggggatggcgacgacgacaactatgagtacgtttatgacgaagaagagggcggttattacaagcgttataagagcggcgggtctaacggttggaagcctaaggaaaatttggcctctacccgctacctcggcggcgccgggcctgtaaagtgggtcgggtttgtcttttccacgaaggttgacccgagcagcctgtcgcgccttgtgagcgttgaggtgtgcccgcttcccggggtcggcggcaaggggtgccgggcggtcaggcagagcgagtacaaggttcgggaggatatcctcggggctaagtcgtttgcctaccgcgtgatgttcaacgagcctgtcggttacggtcagcgggtgaacgttacgctgaagtttgctgacaaggcggagtttaagggggcgcaggagacctatgtaattgagactaagccggagtttacgttggaaaaggcgggggtgtacgggcagatgtacacgctcaacgcgaacggcgtctcctacgacgcccgtcaggcggttaagttgggcagcgacagggagtttacactggagttttcgtcggcgccggcagatccggggatttcggtgcttcggagcatggtaagcgtatcgccggcgccgtcggatttcaagtaccggtttaacgaaaacaaaattacaatcggccctcgggatagagcaggagaagctatacaaagtgttgttgaacccgtctgctatcaaagatgcggcggggcgcgcgcttacgaacaagaagccgagttcgttttacgtgtatttacccaaagtaaggccgaatgccaagtggagccgcgggtttggcatagtggagcggctgggcccgcagcactttccgataaccgcggccggcgtttcgagcttagacttcagggtgcacaagatagacccattgcacacggcgttcggagacttcccgtcctcgcaaattga

SEQ ID NO: 72538 - protein, 323 aa, Unknown
  Obtained from environmental sample
  misc_feature (1)..(323): Xaa is any amino acid
MESDESGDGDDDNYEYVYDEEEGGYYKRYKSGGSNGWKPKENLASTRYLGGAGPVKWVGFVFSTKVDPSSLSRLVSVEVCPLPGVGGKGCRAVRQSEYKVREDILGAKSFAYRVMFNEPVGYGQRVNVTLKFADKAEFKGAQETYVIETKPEFTLEKAGVYGQMYTLNANGVSYDARQAVKLGSDREFTLEFSSAPADPGISVLRSMVSVSPAPSDFKYRFNENKITIGPRDRAGEAIQSVVEPVCYQRCGGARAYEQEAEFVLRVFTQSKAECQVEPRVWHSGAAGPAALSDNRGRRFELRLQGAQDRPIAHGVRRLPVLAN

SEQ ID NO: 72539 - DNA, 645 bp, Unknown
  Obtained from environmental sample
  misc_feature (1)..(645): n is a, c, g, or t
atgcggaaattgtctgttaagagcgtttgcggcgcgttgctggcggtcgccgccgtcggtatcgccgtggttatggcttacgagccttatggctacatccccgccgaccgggggcaggcggcgggagtgccgggcggggacgccaagattctgccgacggcgtacctcagggagtacgacccggtcacggtgttcttcgagagggacgcggtgccgggggaggccgggccgatcgacgcgccggggcaactcttatcgatcacgccggcgcatccgggggagtacgtcaaantagacgggcgcacgcttgagttcaggcccacggcgccctgggagccgctcnaacgctancagatcacctcgcggaagagcgtgcgcgagctgtttcgctgctgcccgacccggagtcggtcttctgcgggcagatcggcggcggcgacgacgtccccatcggcaaaaccaaggtcaggaacggggctgtggagtcggatgagtcgggggatggcgacgacgacaactatgagtacgtttatgacgaagaagagggcggttattacaagcgttataagagcggcgggtctaacggttggaagcctaaggaaaatttggcctctacccgctacctcggcggcgccgggcctgtaa

SEQ ID NO: 72540 - protein, 214 aa, Unknown
  Obtained from environmental sample
  SIGNAL (1)...(24)
  misc_feature (1)..(214): Xaa is any amino acid
MRKLSVKSVCGALLAVAAVGIAVVMAYEPYGYIPADRGQAAGVPGGDAKILPTAYLREYDPVTVFFERDAVPGEAGPIDAPGQLLSITPAHPGEYVKXDGRTLEFRPTAPWEPLXRXQITSRKSVRELFRCCPTRSRSSAGRSAAATTSPSAKPRSGTGLWSRMSRGMATTTTMSTFMTKKRAVITSVIRAAGLTVGSLRKIWPLPATSAAPGL

SEQ ID NO: 72541 - DNA, 756 bp, Unknown
  Obtained from environmental sample
  misc_feature (1)..(756): n is a, c, g, or t
atgaacgaaaaagaattcaacgaacagtacggcgcttttataaaaaaggctctgccgcttgctgaaaaggcaagaagggaaggtctattatcgctgaccgccgaccccgaaaaagtaagcgagcgcgacatttttgaatacggattgagcttcgtcatagacggaacagacccaagctatatcgaaaaaatcctaaacaacatcatcgctcaggaaaaagacgagtacgcgcgtgtttacaaaaccattcaaaaggaagccgtcatgggcatacaacaggggcttaatccgcaaatgctctactacatcttaaactcactgtccactatatcattgaaagatgatgaagcgtacaacagcatgaacgccggtaaagcaaaagaaagggacgaggcttttgacaaagaaatgaccgccatcctggaagcgttagacaaacaaatgggcattcagccgaaaaatgaagcggataaagaccaaccgtttgtatttgacgacattatccggcttgacgaccgttgtgttcaacacatactgcggaatgtagactcccatgatcttgccgtagctctaaagaccgcaagcctggcggtacagggcaaaatattcaaaaacatgagccgaaacgccgcgcttatgattaaagaagacatggattatatgggacagttaagcgaagaatatgtacatgaagcccaacaaaaaatcatcgacatcatcatggttttggaagaacgaggagagattgtaatatga

SEQ ID NO: 72542 - protein, 251 aa, Unknown
  Obtained from environmental sample
  DOMAIN (138)...(251): FliG C-terminal domain
  misc_feature (1)..(251): Xaa is any amino acid
MNEKEFNEQYGAFIKKALPLAEKARREGLLSLTADPEKVSERDIFEYGLSFVIDGTDPSYIEKILNNIIAQEKDEYARVYKTIQKEAVMGIQQGLNPQMLYYILNSLSTISLKDDEAYNSMNAGKAKERDEAFDKEMTAILEALDKQMGIQPKNEADKDQPFVFDDIIRLDDRCVQHILRNVDSHDLAVALKTASLAVQGKIFKNMSRNAALMIKEDMDYMGQLSEEYVHEAQQKIIDIIMVLEERGEIVI

SEQ ID NO: 72543 - DNA, 870 bp, Unknown
  Obtained from environmental sample
  misc_feature (1)..(870): n is a, c, g, or t
atgacagagaaactgacatttaatgacggcagagtgtacgaaggcgaaacacagggcggcatagcttccgataggaagctcccgcacggcaaaggaaaaatgacatggactgacgacgacggagatgtcgatgtctacgaaggcgattgggttaagggcaaaaaacacggcaaaggaaaatacacatgggcagacggctctgtttatgaaggcgattacgcagacaacagcgccaacgtcaaagggaaagagacgaaagctaacggcgacgtatacgaaggtgattttgttgacggcaatcctcacggcaaaggtaaaaaaacattcgccaacggcgatgtctacgaaggcgatttcgattttgccgattgcattggcaaaggaaaaaaaacttatgccaacggcgatgtctacgaaggggatttttacggcgaaccgcacggcaaagggaagaaaacttatgctgacggtagaattgaagaaggcgagtggaaaaggggcgtatttatgaacaagaaacccctggacggaaaaaactttttcgacagcggggagcagattgtttatgaccctgaaaaagacgtagagctcgttgaagaaacaaaaaaaatccttttaatttttgaagaagccgttattcggcttgacggacgtccccttcaaaaaattattagagaagcggattttacggatttgtgtaaagccataaaagccgcaggcaaacaggcgcaggacacaattttcaaaaacctgagtgacagggcaggtacggagcttagggaaataatggcaaacatggggcggatacgcttgatcgaagcgaaaacggctctgcaaaagatgaatgacattattaggagattatcatga

SEQ ID NO: 72544 - protein, 289 aa, Unknown
  Obtained from environmental sample
  DOMAIN (192)...(289): FliG C-terminal domain
  misc_feature (1)..(289): Xaa is any amino acid
MTEKLTFNDGRVYEGETQGGIASDRKLPHGKGKMTWTDDDGDVDVYEGDWVKGKKHGKGKYTWADGSVYEGDYADNSANVKGKETKANGDVYEGDFVDGNPHGKGKKTFANGDVYEGDFDFADCIGKGKKTYANGDVYEGDFYGEPHGKGKKTYADGRIEEGEWKRGVFMNKKPLDGKNFFDSGEQIVYDPEKDVELVEETKKILLIFEEAVIRLDGRPLQKIIREADFTDLCKAIKAAGKQAQDTIFKNLSDRAGTELREIMANMGRIRLIEAKTALQKMNDIIRRLS

SEQ ID NO: 72545 - DNA, 2640 bp, Unknown
  Obtained from environmental sample
  misc_feature (1)..(2640): n is a, c, g, or t
gtgggcgtatggagtaatgaaatgagaaatgaacagaccgaacaggaaatcttgaaccaactcaacacgctgatcaaacttgatcccgacaaggacaagaattactataatcggggactgctctacaaagaccaaaaactttgggaaaaagccgaagccgatttcgctaaagcgttctccctctggaaagacccgctctaccttagcgaatggcggcaagccgcaatggaaagacaggcgctgcaaaccgttgaagagcgaatggctccttacgagaaaattatcaagaataaaactgaaatcatcccgtccgcggaaataatagcggcgatagctttatttgaagaatatgaattgctggaagccctgtttgaaaaaaagatgtttacagctaacatgctcaatgaaaccgtcagcccctctttctcgtactatcagcctacgcccatgtatttaatcacgggaaaaaaagcgctcaaaaaaatgaaagaccctgttaaaatgatacgaactctcgcgagtttcggcgcagaccccaacgttccggcgggagacggttctaccatgctttggaaccagtgcaatcccggctatccaatagaaataatgaaaacgtttttggaaatcggagctgaccccaatcaaacaagcgaagacggcgaattcgcatggacgccccttgcgtactgcttaataccaagtaacccggaggacgaaaacggcaacccaatcgcagaccaatatcttcctttggaaagcgagacgctggaaaaagcgaaactgttgctcgatcacaacgccgacccaaacctcgcaaacccttcagtgctggacagcccgccgctaatgttcaccatcagatacgcctcccgtcaaaatgatgagactgagcgtcttcggcctcaggacatggaactgattaaactgctccttgaaaaaggcgcaaacccgaacttcaccgacagcaaaggcgatacgccgatgatagtagccctcgaaaaaggaatgtgggaaacggcggaattattgttgaaatacggcgcaatcatgcccaatgtaaaaataaaaacgcttacgcaaaaaatcaatcgtataaaagaagagtacgccgatttgccgccgatgatccttccgcccgccggcgatgaagaaataaaacggcacagcagaatgttaaccggatatggttttccgactatacccgacggatacgccgagttccttaaaatatgcgacggttacgcttttgacggcgtggaactttacggaacggaatgcgttacggaagaaggctcaacattcattctgcatgacataggcagtatgacattcaagatgaacaagaggtacgaggaatactgcgaacaatcaaataaaagcctgctctggcttggaagtgacgcaggcggcaactactacacctacgatgacaagacaggcaagtatcagcttcgctcccatgagtcaatcggcgaagtctattttgaatacggcaccttcgaagaattatttgacagattgatatacgaaaatcagataacggacgatgaagacaatatcaaatacatctataaagaaggcgcgacagtatcggaaacttacgacaaaataaaaaccgatgacgccgttgcgaaagacgcgctggaatattaccgcgcccttgccgaaaaaggcaacaggtcagcccaatttgaacttgccgcaatgctgttcctcgacagccgttttgaagacaaggaacaagccaaagaatggctgaaacgcgccgccaagctcggtcacaagcaggcgaagaacgccctgcaaaacatcaaagactatgagaatatgccgaagggacgccatcgccccgaagtcgctccgccggtcggttacacgattgaccccggcttcgatcaaaagtttgaagatgatttccgcgaacttttcacctcacgcttaaaagaagacgaagacttcggctgtgaactctggtcagcgctggcaaacgtcagttggatacacgaagacgaccccgaagaaacccactgcggacgcggcttccgaagcgccggagcgatgattgcgtcaatgctcggcataggcgattatatcgactggtactgctcaggcccatacgaaacagtcagcgaatacatagccgaaaaaatggcgtccaaaggctggcgctataaacttgacggagacggcagcgacataaacactggaagactgacattcaaagacggcagtctctacgaaggcgaaatcgaaaacggtaaacccaacggcaaagggaaatatacatttatttccggtgatttttcccaacgttacgaaggcgattttgttgacggcaaattccacggcaaaggaaaatttacaatgtcggacgaccatgaatatgaaggtgattttgttgaaggcgcgtttcaaggaaaaggaaaatggataaacttacgttacgatgacatttatgaaggggattttttcaaaggcagaagacacggtaaagggaaaattatatacgccgacggcagagtttacgaaggcgaatgggccaaaggaagctggaacggccacggcaaaatgatctacgccgacggcagaatcgaagaaggcgaatggaaagacggaaattttgtaggacgaaacatttga

SEQ ID NO: 72546 - protein, 879 aa, Unknown
  Obtained from environmental sample
  DOMAIN (560)...(594): Sel1 repeat
  misc_feature (1)..(879): Xaa is any amino acid
MGVWSNEMRNEQTEQEILNQLNTLIKLDPDKDKNYYNRGLLYKDQKLWEKAEADFAKAFSLWKDPLYLSEWRQAAMERQALQTVEERMAPYEKIIKNKTEIIPSAEIIAAIALFEEYELLEALFEKKMFTANMLNETVSPSFSYYQPTPMYLITGKKALKKMKDPVKMIRTLASFGADPNVPAGDGSTMLWNQCNPGYPIEIMKTFLEIGADPNQTSEDGEFAWTPLAYCLIPSNPEDENGNPIADQYLPLESETLEKAKLLLDHNADPNLANPSVLDSPPLMFTIRYASRQNDETERLRPQDMELIKLLLEKGANPNFTDSKGDTPMIVALEKGMWETAELLLKYGAIMPNVKIKTLTQKINRIKEEYADLPPMILPPAGDEEIKRHSRMLTGYGFPTIPDGYAEFLKICDGYAFDGVELYGTECVTEEGSTFILHDIGSMTFKMNKRYEEYCEQSNKSLLWLGSDAGGNYYTYDDKTGKYQLRSHESIGEVYFEYGTFEELFDRLIYENQITDDEDNIKYIYKEGATVSETYDKIKTDDAVAKDALEYYRALAEKGNRSAQFELAAMLFLDSRFEDKEQAKEWLKRAAKLGHKQAKNALQNIKDYENMPKGRHRPEVAPPVGYTIDPGFDQKFEDDFRELFTSRLKEDEDFGCELWSALANVSWIHEDDPEETHCGRGFRSAGAMIASMLGIGDYIDWYCSGPYETVSEYIAEKMASKGWRYKLDGDGSDINTGRLTFKDGSLYEGEIENGKPNGKGKYTFISGDFSQRYEGDFVDGKFHGKGKFTMSDDHEYEGDFVEGAFQGKGKWINLRYDDIYEGDFFKGRRHGKGKIIYADGRVYEGEWAKGSWNGHGKMIYADGRIEEGEWKDGNFVGRNI

SEQ ID NO: 72547 - DNA, 507 bp, Unknown
  Obtained from environmental sample
  misc_feature (1)..(507): n is a, c, g, or t
atgacagaaaaactgatattaggcggcggcgatatttacgaaggcgaggtaaaagacggcaagccgcacggcaaagggaaaataataaaaaatcccggcaagacaaacgaattaacttatgaaggcgattttgttgacggacatttccacggaaaggggaaattgaaattttcgaatggagagatatacgaaggcgattttgtcaacggcagcgctcatggaaaagggaaactgacaagcagttacggcgatgtctacgaaggcgattttgttgacggcaataaacaaggcaaaggcacatacacaagcgatgacctcacctttgaaggcgagtttgttaacggaatgcaatctaaagggaaatgcacctacaaggacggcactgtaaaagaaggtaactggaaaggctttactttttacgggaaaaagaaaccgcctaaagacaaaccgtacaaactcacgcccgaagaagaagcgatgagattacgctacgaaatttgtccatga

SEQ ID NO: 72548 - protein, 168 aa, Unknown
  Obtained from environmental sample
  DOMAIN (13)...(35): MORN repeat
  misc_feature (1)..(168): Xaa is any amino acid
MTEKLILGGGDIYEGEVKDGKPHGKGKIIKNPGKTNELTYEGDFVDGHFHGKGKLKFSNGEIYEGDFVNGSAHGKGKLTSSYGDVYEGDFVDGNKQGKGTYTSDDLTFEGEFVNGMQSKGKCTYKDGTVKEGNWKGFTFYGKKKPPKDKPYKLTPEEEAMRLRYEICP

SEQ ID NO: 72549 - DNA, 555 bp, Unknown
  Obtained from environmental sample
  misc_feature (1)..(555): n is a, c, g, or t
atggcggattattatgttgtatgttaccagtgtgaaggtacaggttataacaggtttgaacaaaagggcaaatggattggttatgacggaactcgtgaaggaatatgtcataattgctggggtgaaggaaaagtcttaactaacgatgaaaaagaagaccttcataagtctgttatgaaggattataccacgcctccaagaataacaacaggaaaatatacattgcccgacaaaacagtttacacaggcgatttagtcaatggactgccacatggtcaaggaaaagtaaaatggcccgagggagacagttacgagggaacatggataaaaggcaaacggcacggacatggaaaatacacctacgaagacgggacagtttacaaaggcgaattcactaacgaaaaaagaacaggctacgccaaagaaacatatccaaacggtgacgaatacgaaggcgattttgttgacggcattcccaacggaacaggaaaatatacatacgaagatggcgaagttcaggaaggaacatggaaagacggcgagtttgtggggtaa

SEQ ID NO: 72550 - protein, 184 aa, Unknown
  Obtained from environmental sample
  DOMAIN (81)...(103): MORN repeat
  misc_feature (1)..(184): Xaa is any amino acid
MADYYVVCYQCEGTGYNRFEQKGKWIGYDGTREGICHNCWGEGKVLTNDEKEDLHKSVMKDYTTPPRITTGKYTLPDKTVYTGDLVNGLPHGQGKVKWPEGDSYEGTWIKGKRHGHGKYTYEDGTVYKGEFTNEKRTGYAKETYPNGDEYEGDFVDGIPNGTGKYTYEDGEVQEGTWKDGEFVG

SEQ ID NO: 72551 - DNA, 1206 bp, Unknown
  Obtained from environmental sample
  misc_feature (1)..(1206): n is a, c, g, or t
ttgaagaaggaagatttgagaacaacaaatttgttgaaggagaaaaacatggctaaagcgcagtatctgaaagtttcgtatgattttgttgacgatgaaaagggcgatgtaatgctgataatcgaagcgcccaagggcagggcggacgaagataacgtgaaactcgtctatgactcgcgggaagcaatgctgtacagaaacagcgaacaaataatccaactgccgattgtgaataaaaaaaccggcgatatgctgctggacggacgtacaatcatccttgttaccgaaatggaaggtgaagatataggcgacgtttacgaagcgaaacttgagattgtgagcaaactccctgctgaggaaactcaaacaacgaacaacaaaaaaattgacatcgaaaattcttacgacattctgcaaaacaaagacggcgacattatgttcagcgtcctggaacgggagacggagcctgacaagccggaacttgtctatgacggcggcgaacacgcgctgttgtgcagaaacagcggacataccgtcatcctcgactacattaaccctgacgttcgccaatcgctggcgcaggcaaaggaagtgctggtagcggaacatctcaaaacagacaaaaagaactttgtccgcgaatacatggcagccgtaaacattgtgaagcgcctgcccgaagaatacgattcgcttctgagcaaacatgaaaacgaaacggaaggcaaaaacgatttttcttttcttaacggacacggcgatgaccccgataaagccggcgagcgcgtccgccgtatgttacggcaaaaccccaaagagataccgcgagtcgtacaattctacatcgacatggcaaacaacggcaacgccggcgcccagtacgagctggcaaacttctatctggaaggcctcggcgtggaaaaggacgaggcgaaggcaaaggagtggcttcaaaaagccgcccaacagggacacaaggccgcaatcgagttactcgattacagggagaaaaacccgatagtcattaccgatgagagaatgtttcgcagaacggaaataacctgtgaaaaatgcggaacgattgtcaaattagatcaatcgtcttctgataaatataatctaagcgtctgtcccaaatgcggcgtgtattacaaatatatctgcgtcgagccgccaatggacggtgggccggacgagtgggcttaa

SEQ ID NO: 72552 - protein, 401 aa, Unknown
  Obtained from environmental sample
  DOMAIN (290)...(325): Sel1 repeat
  misc_feature (1)..(401): Xaa is any amino acid
MKKEDLRTTNLLKEKNMAKAQYLKVSYDFVDDEKGDVMLIIEAPKGRADEDNVKLVYDSREAMLYRNSEQIIQLPIVNKKTGDMLLDGRTIILVTEMEGEDIGDVYEAKLEIVSKLPAEETQTTNNKKIDIENSYDILQNKDGDIMFSVLERETEPDKPELVYDGGEHALLCRNSGHTVILDYINPDVRQSLAQAKEVLVAEHLKTDKKNFVREYMAAVNIVKRLPEEYDSLLSKHENETEGKNDFSFLNGHGDDPDKAGERVRRMLRQNPKEIPRVVQFYIDMANNGNAGAQYELANFYLEGLGVEKDEAKAKEWLQKAAQQGHKAAIELLDYREKNPIVITDERMFRRTEITCEKCGTIVKLDQSSSDKYNLSVCPKCGVYYKYICVEPPMDGGPDEWA

SEQ ID NO: 72553 - DNA, 435 bp, Unknown
  Obtained from environmental sample
  misc_feature (1)..(435): n is a, c, g, or t
atgagcaaatttagaattggtgacggcgatgaatacgaaggcgatgtcgtcaacggacagcccaacggcaaaggcgtatatacgttgacagcatacggctccgtgtacgaaggcgatttcgtagacggcaagccccacggtaatgggaaatttacatggccggaaggctctgtatacgaaggcggttgggtaaacggcaaacccaacggcaaagggaaaatgacgctcaatgacggaacggtgtacgaaggcgattgggttgacggaacggagaacggcaaaggcaaaataacatttgcggacggcaattcttacgaaggcgatttcgtcaaccgcaagtgccacggcagagggaaaatgacctacgccgacggcacagttgaagaaggaagatttgagaacaacaaatttgttgaaggagaaaaacatggctaa

SEQ ID NO: 72554 - protein, 144 aa, Unknown
  Obtained from environmental sample
  DOMAIN (12)...(34): MORN repeat
  misc_feature (1)..(144): Xaa is any amino acid
MSKFRIGDGDEYEGDVVNGQPNGKGVYTLTAYGSVYEGDFVDGKPHGNGKFTWPEGSVYEGGWVNGKPNGKGKMTLNDGTVYEGDWVDGTENGKGKITFADGNSYEGDFVNRKCHGRGKMTYADGTVEEGRFENNKFVEGEKHG

SEQ ID NO: 72555 - DNA, 1518 bp, Unknown
  Obtained from environmental sample
  misc_feature (1)..(1518): n is a, c, g, or t
atgaaataccaaactttcgccagaaccaccttagagggcggggagaaccataaaaaacataacaagccttgtcaggatcgttctttcagattttccggcgagggcatgcacatcgccgtggtcgccgacggccacggcagcgacaactgtttccgcagcgagtacggcgcgcaattcgcggtgaacgccgccagaaaaggcatcaatgcttttatcaagagccttcagggtaatgaactccccctcgaagacaacttcgcgcggcaggtaaaaaaactcgtcgggactatcgtggacaactggatataccttgtttcggagcattacaaacgctaccccatcaccgaggaagacagggaatacgacacgcccgaaggcaaaaaactgtttaaggggctaaaaagttttgaggtggacaaaacctaccgcgatctctatttgcaggaagccgccgggggcagttccggcaaaggcggcctgcttgccgatgacgagcggcccgttactcgccatgcctacggcgccaccctcatcgccgccgccgtcacggatgatttctggttcggcatacagatcggcgatggaaagctcacggctttctatcccgacggcagttttgaccagcccgtcccctgggacgacaaatgctacctcaatgtaaccacgtccatctgcgatgacgacgcggcggaacgggcgaggttgtacgtcaaaaagcgcggcggctgcgccgccgccatcgacgctataggggcgataaaaaaactggaagacagccgccccctgccctcggcggttttttgtaacagcgacggggtggacgacagcttccccatcgaagacaacatggatcacatggcgaagaaattctactactccgtcctgcgtatgtttatagaaaacgacgcggatccgtccaaaggctggggagcttcagaaaaagagcttgccgattaccttcccgatctcagcaaacgcggctccggggacgacatctcggtggcgggcatcatcgacatggacgcggtaaaagccgcgcctttccgcgatgctctccaaaaagcaaaagttgaggccgaagaacgcagggcgagggagaaggaagaacgggaaaaagccctgaaagaggcggaagaagcaagggcgaaagcggcggaagaaaagaaagccgccgaagaagcggccgcgaaaaaagcggaagagaagaaggccgccgaaagcgccgccaaaggcggggctgactatagcgcgagggacggatcagcaaccggtacagcccaacgcgcaaggcccgtttccggcaaacaggtgaccgtagaccccctggttcaggaggcggcgcagaaggttaaaaaggtgcaggaggagatgaacaaagccagaaaggaatttgcggatgcaattcagttgagccgccggaagaacaccggcgaagacgacaccgacatcccctcaagcgacgcctacaaacagcctcccaaaggtcaagcgggaacgaatgttgatacgtcagcgtaa

SEQ ID NO: 72556 - protein, 505 aa, Unknown
  Obtained from environmental sample
  misc_feature (1)..(505): Xaa is any amino acid
MKYQTFARTTLEGGENHKKHNKPCQDRSFRFSGEGMHIAVVADGHGSDNCFRSEYGAQFAVNAARKGINAFIKSLQGNELPLEDNFARQVKKLVGTIVDNWIYLVSEHYKRYPITEEDREYDTPEGKKLFKGLKSFEVDKTYRDLYLQEAAGGSSGKGGLLADDERPVTRHAYGATLIAAAVTDDFWFGIQIGDGKLTAFYPDGSFDQPVPWDDKCYLNVTTSICDDDAAERARLYVKKRGGCAAAIDAIGAIKKLEDSRPLPSAVFCNSDGVDDSFPIEDNMDHMAKKFYYSVLRMFIENDADPSKGWGASEKELADYLPDLSKRGSGDDISVAGIIDMDAVKAAPFRDALQKAKVEAEERRAREKEEREKALKEAEEARAKAAEEKKAAEEAAAKKAEEKKAAESAAKGGADYSARDGSATGTAQRARPVSGKQVTVDPLVQEAAQKVKKVQEEMNKARKEFADAIQLSRRKNTGEDDTDIPSSDAYKQPPKGQAGTNVDTSA

SEQ ID NO: 72557 - DNA, 789 bp, Unknown
  Obtained from environmental sample
  misc_feature (1)..(789): n is a, c, g, or t
atgggtttgaatgacgatgtagaagtatcaagaagagtgatggtcttgttctttctggtggacacatcgggaagcatgagcggctcaaaaattggcgcggtcaaccacgccatagaagaagttatcccggagataaaaagcatctccgtggggaacgcggacgcgcagatcaaaatcgcggtgatgaagtttgacaacagcgtcgaatggatcaccaaaaacgggcccgaagattcggaaacctttatctggcgcagtctggacgccaacggcatgacctacatgggcgatgcttgcaaacagcttgacaagaaactctccaccaaagaaggcgggtttatgcgcgaagcctccggctcttacgcgcccgcgatttttatgatgtccgacggccagcccaacgacgactttgacggagggcttggggcgttaaagcaaaacaactggttcaaagccgcggtaaaagtcgccatagccatcggcgacgacgcggacaaggacgtactcgcccagttcgtaggctcgccggaaggggtgattaccgcccacgacgccgccacattaaaaaaatggataaagttcgtcagcgtaaccgccagcaaggtagccagcaagagttccaacgccaaatccaacgcggacggaacccccgcgccggataacgccaaacaggacgaactgaacaaggccatagccggacaggcgcaagccacaggcgcggtcaaatcggctgacggcacaataaacgcgccgcccacatcctcggctcctcccgacgacgtatggtaa

SEQ ID NO: 72558 - protein, 262 aa, Unknown
  Obtained from environmental sample
  DOMAIN (16)...(192): von Willebrand factor type A domain
  misc_feature (1)..(262): Xaa is any amino acid
MGLNDDVEVSRRVMVLFFLVDTSGSMSGSKIGAVNHAIEEVIPEIKSISVGNADAQIKIAVMKFDNSVEWITKNGPEDSETFIWRSLDANGMTYMGDACKQLDKKLSTKEGGFMREASGSYAPAIFMMSDGQPNDDFDGGLGALKQNNWFKAAVKVAIAIGDDADKDVLAQFVGSPEGVITAHDAATLKKWIKFVSVTASKVASKSSNAKSNADGTPAPDNAKQDELNKAIAGQAQATGAVKSADGTINAPPTSSAPPDDVW

SEQ ID NO: 72559 - DNA, 1242 bp, Unknown
  Obtained from environmental sample
  misc_feature (1)..(1242): n is a, c, g, or t
gtgtcaggcacggaaacaatgagcaatgaggagaagaagaagatggacaattttatggaacagggatttatcgacattctgaaacagattgtaacggaacaagtcaacgccgtactttcggacacgaaacaatttaagtcggttttggctgactacaccagaaacgaattcaagaaagaaagccgcttccttatacaggcagtcgaggcaggagtggcgaaagcgattaaggaaacggacgatcttccggcttgcaagagaggaaagattaacgaacttgtggaagattacgggctttcacaggaagtatcggcggcgatagttgacacccttgcgctggttctgcgaggagacacaagcaagagcgtaacggcaacgccagcagttgcgccgtcctgcccggtcgccactgaagccaatgccgctgtttatgccaagaccgccgcgcctgcgccttcaatagaaatggttttggttcccggcggcagttttaagatgggagatgttaaagatgaatcttgggatgaaagtgaaaagccggtacacacggtaacgctgactaagttttacataggtaagtacgcggtaacgcaggcgcagtatcaggcggtgatgggtagcaaccccagtaaatacaattcaaacccgacaagcggggaggcgcaggagaaccgtccggtagagatgataagctggtatgacgcgatagtattctgcaacaagttgagtatgatggaaggtttaagccccgcgtaccgcataaataacagcacgaaccccgctgactggggaagtgtgccgataagcagtaacagtacatggaatgcggtacaaatcgtcagcggttctaacggctaccgactgccgaccgaggcgcagtgggaatatgcggcgaaaggaggcaatggatcgccggggaattacacgtttgcggggagcaacaatgcgagagatgtggcgtggtatgaagttaaattgacccatgaggtgggaaagaaagcgcctaacggattgggtttatatgacatgagcggtaacgttaatgaatggtgctgggactggtatggggactactccgccagcgcacagaccgatcctgccgggccctctgtcggcactcgccgggtgcgccgtggcagcaactttttccacgtcgccgcctacacgacatcctgtattcgggcaagcggcgaaccacacaatagatacgaatacgacggcttccggctggtgcgcccatga

SEQ ID NO: 72560 - protein, 413 aa, Unknown
  Obtained from environmental sample
  DOMAIN (152)...(412): Domain of unknown function (DUF323)
  misc_feature (1)..(413): Xaa is any amino acid
MSGTETMSNEEKKKMDNFMEQGFIDILKQIVTEQVNAVLSDTKQFKSVLADYTRNEFKKESRFLIQAVEAGVAKAIKETDDLPACKRGKINELVEDYGLSQEVSAAIVDTLALVLRGDTSKSVTATPAVAPSCPVATEANAAVYAKTAAPAPSIEMVLVPGGSFKMGDVKDESWDESEKPVHTVTLTKFYIGKYAVTQAQYQAVMGSNPSKYNSNPTSGEAQENRPVEMISWYDAIVFCNKLSMMEGLSPAYRINNSTNPADWGSVPISSNSTWNAVQIVSGSNGYRLPTEAQWEYAAKGGNGSPGNYTFAGSNNARDVAWYEVKLTHEVGKKAPNGLGLYDMSGNVNEWCWDWYGDYSASAQTDPAGPSVGTRRVRRGSNFFHVAAYTTSCIRASGEPHNRYEYDGFRLVRP

SEQ ID NO: 72561 - DNA, 1032 bp, Unknown
  Obtained from environmental sample
  misc_feature (1)..(1032): n is a, c, g, or t
atgacagaaaaactgatattaggcggcggcgatatttacgaaggcgaggtaaaagacggcaagccgcacggcaaagggaaaataataaaaaatcccggcaagacaaacgaattaacttatgaaggcgattttgttgacggacatttccacggaaaggggaaattgaaattttcgaatggagagatatacgaaggcgattttgtcaacggcagcgctcatggaaaagggaaactgacaagcagttacggcgatgtctacgaaggcggttggagtaacggcaataaaagcggcagatgcaaatatacctatgcaaacggaaatgtatacgaaggcgattgggaaggcgaaaatgccaacggaaaagggaagatgacattggcaaacggctctgtatacgaaggcgattttgttgacggaagtccgaacggcgaaggaaaagaaatcaactctgacggcactgttaaaaaaggaaagtggaaaaacggcgaattcaaaggactttttggcttttcatcatcatcaggcagttacggcgaaccatacggcgtaatcatttcgattattataagcggtgtcatttcgctttttggcgccgcttattttggcggctttttagaaaagttactcccgtataatgctactgttattgagatagcggtatttgtaccggtatttatcctctgtatgataacctgcctcaacgaaagaggatggaaaataatcaagctcgccgttattattgtcgcatttgtagcagccggcattcttggtaataaagtgttagcaaacaaatccccaaaaccgcaaacaacagagacaacgcaaggcgcaaacacaaacccgtcggctgaaataacgaaaaatgtaaacttccgcaaaggtccttcaactaacgatgcagtaatcaggcaattaaagcagggcgacattgttatattgacaggcgaagtatcaggcggttggacgcaaataacccacaacggcgatacaggttgggtcagcacggagtatttgaaagtgtgggggaagtga

SEQ ID NO: 72562 - protein, 343 aa, Unknown
  Obtained from environmental sample
  DOMAIN (285)...(342): Bacterial SH3 domain
  misc_feature (1)..(343): Xaa is any amino acid
MTEKLILGGGDIYEGEVKDGKPHGKGKIIKNPGKTNELTYEGDFVDGHFHGKGKLKFSNGEIYEGDFVNGSAHGKGKLTSSYGDVYEGGWSNGNKSGRCKYTYANGNVYEGDWEGENANGKGKMTLANGSVYEGDFVDGSPNGEGKEINSDGTVKKGKWKNGEFKGLFGFSSSSGSYGEPYGVIISIIISGVISLFGAAYFGGFLEKLLPYNATVIEIAVFVPVFILCMITCLNERGWKIIKLAVIIVAFVAAGILGNKVLANKSPKPQTTETTQGANTNPSAEITKNVNFRKGPSTNDAVIRQLKQGDIVILTGEVSGGWTQITHNGDTGWVSTEYLKVWGK

SEQ ID NO: 72563 - DNA, 1119 bp, Unknown
  Obtained from environmental sample
  misc_feature (1)..(1119): n is a, c, g, or t
ttgtatgaatattggaattacatttactttttaggagaaaaagtgaaaagaaaaataaaatggctgatattgccggtagcggttttattgtctgcgtgtcagttttttttaggacctgaccccgatactagtccctccgaagtattaaaaagcctctggaatgattttaataatatccatgcaaatttggattttagaatgagtaataattttaagtatgacagttggtatgacgtatatcataacaaacagataggatacgcccttaaaatttatcctgatatgtctgaagaatcattatttaacgtatgcgcgaatatgttaaaagaattaaacgatcctcatgtcgggttatacgttcccggcaagtattccagcagctataatgccgaacgtgatgattttaacatttcagatgtaagaaataaattaatcggaaagggcagcgttgtatataaaaattttgtatatggcgtattttcttccaatcccgatataggctacatttatatcttatcatttttaaacgaagacgccgagtttgaagacgacaaatggggaaaagtaatagacaatattataagccatcttgcaaacacaaaggctcttgttttggatattcgcagtaacagaggcggggatatatacgcaatggaatatattgccacccgttttgcgtccgagacaaaagattatatgaaggcaagaatcaaaaggggtcctggaccaaatgacttatccaagcctataatttatacggtaaaaagcataaaaaaactttctgataacaagtatggttatacaaaaccaattgtacttttaacaaataaaaacacggtttccgccgcggaatggtttactgtagcgttacggacgcagagtcatgtaacgcatgtgggaatgccgacatgcggagcgctctccgcgcgtaatgatcgttttatgataaacggatgggtttattcaatatcgcctggaagagttacggatatgaacgacaaaatttatgaaggaatcggaatatttcctgaaaaaataatagaaaatatgtcgaatcaggaagattatcagcttttatgcgctgtagaaatagcggcgtcagaaatatcgggagaataa

SEQ ID NO: 72564 - protein, 372 aa, Unknown
  Obtained from environmental sample
  DOMAIN (165)...(347): Peptidase family S41
  misc_feature (1)..(372): Xaa is any amino acid
MYEYWNYIYFLGEKVKRKIKWLILPVAVLLSACQFFLGPDPDTSPSEVLKSLWNDFNNIHANLDFRMSNNFKYDSWYDVYHNKQIGYALKIYPDMSEESLFNVCANMLKELNDPHVGLYVPGKYSSSYNAERDDFNISDVRNKLIGKGSVVYKNFVYGVFSSNPDIGYIYILSFLNEDAEFEDDKWGKVIDNIISHLANTKALVLDIRSNRGGDIYAMEYIATRFASETKDYMKARIKRGPGPNDLSKPIIYTVKSIKKLSDNKYGYTKPIVLLTNKNTVSAAEWFTVALRTQSHVTHVGMPTCGALSARNDRFMINGWVYSISPGRVTDMNDKIYEGIGIFPEKIIENMSNQEDYQLLCAVEIAASEISGE

SEQ ID NO: 72565 - DNA, 1422 bp, Unknown
  Obtained from environmental sample
  misc_feature (1)..(1422): n is a, c, g, or t
atgcgctgtagaaatagcggcgtcagaaatatcgggagaataatgaaaataaacaatttaaaaaaaattatttttgccgcgttttttttggtaattttttttattacttgtaaagaagaagattccggcgacgatagctgcgctattgtttcgctttccgccgaagacatacctacaaccaaactgatttttacggttaataatgataaatttactcttaccgcggatgacataaaaataaacgccgccttttctgtgataaaaggcgttatatcgcagataggagcgatggcttatgagcttccaataacatccggaggtacaggtgcgattaaagtagggcttgatccgtatcgcggttttaccgggtggaacgcaaaaaacgcgaccgtaaacgctgattggcgctttagcggaacttcagaattaacgataacaggcagacagtcatcctttcctgtaagggaaatacctcttgtaatagccggtttaccggttacggcaataggaaacaacgcttttcccatgaaagaactgaccggaattattattccgtatgatacggataaaaaagttattggtattaaggttatcggagataatgcgtttgcctataatcagcttaaaaagattgatattccctatagcgttacaactattgggactacttcatttgcttataatcaattgtccgacgttattattagtgatagcgttacttctattggctccggcgcgtttggttataaccagttgactgaaatttatataccgaaaaaacttaccgctattagaaattcaacatttgcctttaataagcttaaagagattgatattccttatagcgttacaactattggcgtcgatgcgtttaccgataacaatttatcccgtgttactattccgccgagcgttacttctattggaaacggcgcgtttggaaataacaaattggaagaaattgaaatccatagcggtatcgtctttctttcaggttttaataacaataaattaaccgaaattacaatacccatcaccgttacttccataggaaacagcgcgtttgcctctaattgtcttacagatatttatattcccaacggcgttacagctatcgggagcaatgcatttgcgcataacgcactggaagaagttattatttcaaatacagttactgaaataggatacagagcgtttgcatacaataatctaagcgaaattaccatacctgtcggagttagaaatatagaaattcaagcgtttataggcaactcgttgaccaaaattaccattggagaaaacgtaacgcttggcagttccgcttttggcgatgactttgaaaatttttattatagaaacaataggaaaaaaggaatttatacttttgatactgtcaaccaaaaatggattaaagaagaatag

SEQ ID NO: 72566 - protein, 473 aa, Unknown
  Obtained from environmental sample
  misc_feature (1)..(473): Xaa is any amino acid
MRCRNSGVRNIGRIMKINNLKKIIFAAFFLVIFFITCKEEDSGDDSCAIVSLSAEDIPTTKLIFTVNNDKFTLTADDIKINAAFSVIKGVISQIGAMAYELPITSGGTGAIKVGLDPYRGFTGWNAKNATVNADWRFSGTSELTITGRQSSFPVREIPLVIAGLPVTAIGNNAFPMKELTGIIIPYDTDKKVIGIKVIGDNAFAYNQLKKIDIPYSVTTIGTTSFAYNQLSDVIISDSVTSIGSGAFGYNQLTEIYIPKKLTAIRNSTFAFNKLKEIDIPYSVTTIGVDAFTDNNLSRVTIPPSVTSIGNGAFGNNKLEEIEIHSGIVFLSGFNNNKLTEITIPITVTSIGNSAFASNCLTDIYIPNGVTAIGSNAFAHNALEEVIISNTVTEIGYRAFAYNNLSEITIPVGVRNIEIQAFIGNSLTKITIGENVTLGSSAFGDDFENFYYRNNRKKGIYTFDTVNQKWIKEE

SEQ ID NO: 72567 - DNA, 570 bp, Unknown
  Obtained from environmental sample
  misc_feature (1)..(570): n is a, c, g, or t
gtgaaaaaaatgaaaatgcaaataattgaatggcggcaatttttagaaaagggattttctcataacggaaaactttcctctatgacggtcggcgtttttgacggcgtacacatcggtcatcaggaattgttaaagcggattgtttcgcataatgcggataaaataccggtggttatcacttttaaggacaaccataaaattgagagcggacatattttaacttttgaacaaaaactggatatatttgaaagtttaggcgtagagataacgattgtcattgattttaccaaagaagttaagcaaatgtcggggattgattttttaaaaattttgttggaacgaggcaacgtcggctttttcgcggtcggcagcgattttaagtgcggtcatcagcaggacaccgacgctgaggcgattcaaaaatttttcgctgagcataacattcccgcggaaattgtgccgaaagttacggagggctccgcgcctgtcagttcaagccgtatacgcgcggcaatcagcgcgggagacattaatttggcgcaaaagatgttgggacggaaatacccgtaa

SEQ ID NO: 72568 - protein, 189 aa, Unknown
  Obtained from environmental sample
  DOMAIN (28)...(171): Cytidylyltransferase
  misc_feature (1)..(189): Xaa is any amino acid
MKKMKMQIIEWRQFLEKGFSHNGKLSSMTVGVFDGVHIGHQELLKRIVSHNADKIPVVITFKDNHKIESGHILTFEQKLDIFESLGVEITIVIDFTKEVKQMSGIDFLKILLERGNVGFFAVGSDFKCGHQQDTDAEAIQKFFAEHNIPAEIVPKVTEGSAPVSSSRIRAAISAGDINLAQKMLGRKYP

SEQ ID NO: 72569 - DNA, 1650 bp, Unknown
  Obtained from environmental sample
  misc_feature (1)..(1650): n is a, c, g, or t
atgttcactttttccaaaaggttcatttacgcgctctccaataaattacggcaaatagctccgaggcataataaagagggcggtattgtatccgaaggtaaactgataattgactttgccaaaataaaaaaatccccttttgatattaaatcagaatcttcatataatgcctacctgtcagacacctctcttacgctcggtttaaaaaaggaaagctgtatcgcgtgggtagatatgcccgactatgaatttgaagatcacataattgaagcgaaaattcgcatggaaacccttggtaattacgcggcggcgggcattattttccatattatggacgaaggttcgtactatttagcccttgtctcaaacaaggggtatttccgccttgatgttgtaaaagacaattcccccaaaaccctgattgcatggaccgatataccgcattttgacaaaatcaattttaacatgaaaatagtcacctgcggcacatatttgatttttctcgtaaacaacaaatggcttggagaagtaaacgacgattccgcggagtacggcgcgcttggttttgttatggcttcctatgaatccgacgaaaaaaagcctgacggcgaattcgggggacattcaaatgaaaatgacgaatatgtttgtaaagctcatcttgattatatttccgttgattcacggacaaaacatgtagaggatacttttaaaaaattaaccaacgatataaatatcaatgccgaggggcggttaaggcttgcggaaacttttgccgtaatgggcgagccggcaaaagctctggatcagatcagcagggcgtggaaacgcagggacgaggttatccgcactgtttccgcctcgtcggaagtaaggacaaaaagggaattgcttcttgcggcgagaatgtcattccgtctagggcaatacagcaaagcggaagaatttattgacgcgattcttgatcaatggcccgattctcccgaaggaaaagtagcgcacaccgaaaaaataaaaatattaaacgagttgaataaatttgcggagttaaatgattttataattaataatccttttaaaatagaaaaaaatattgactactacacactgctcgcgaaatgccgttgggaacttaaaaattacgctgattccgccgaagcgtgggacatggcgtttaaaatgagcgaacaaaacggcgtttacgccgttaacgcggctaacgcgtatgaaatggcgggcgacgaaaaagaagctctgtcgcgttatatcgccgccggaaaaatttttcttaatcaggacaatataccggagcttgccgccctcatgcaaaaattatccgtccttggaaaagacaactgggaagcccacgctcttgccggaaaatgggcgttcagtatggaggactacgacaagagcgcgaaagaatttgagatttcccataaaatcaggtgcgccctaagaccgcgcccgaaacccgatcctgctctttattatttatgggggcttattttttacattaggggcagtattaaaaccgcaatacgtttaataaaaagagcctgcaaccttgccccggactataaacctttccgtaaaaaactgaatgaacttatattaatctgtgaaaaaaatgaaaatgcaaataattga

SEQ ID NO: 72570 - protein, 549 aa, Unknown
  Obtained from environmental sample
  misc_feature (1)..(549): Xaa is any amino acid
MFTFSKRFIYALSNKLRQIAPRHNKEGGIVSEGKLIIDFAKIKKSPFDIKSESSYNAYLSDTSLTLGLKKESCIAWVDMPDYEFEDHIIEAKIRMETLGNYAAAGIIFHIMDEGSYYLALVSNKGYFRLDVVKDNSPKTLIAWTDIPHFDKINFNMKIVTCGTYLIFLVNNKWLGEVNDDSAEYGALGFVMASYESDEKKPDGEFGGHSNENDEYVCKAHLDYISVDSRTKHVEDTFKKLTNDININAEGRLRLAETFAVMGEPAKALDQISRAWKRRDEVIRTVSASSEVRTKRELLLAARMSFRLGQYSKAEEFIDAILDQWPDSPEGKVAHTEKIKILNELNKFAELNDFIINNPFKIEKNIDYYTLLAKCRWELKNYADSAEAWDMAFKMSEQNGVYAVNAANAYEMAGDEKEALSRYIAAGKIFLNQDNIPELAALMQKLSVLGKDNWEAHALAGKWAFSMEDYDKSAKEFEISHKIRCALRPRPKPDPALYYLWGLIFYIRGSIKTAIRLIKRACNLAPDYKPFRKKLNELILICEKNENANN

SEQ ID NO: 72571 - DNA, 1515 bp, Unknown
  Obtained from environmental sample
  misc_feature (1)..(1515): n is a, c, g, or t
atgaaccttttggaaaaagtgaacatatttaagatttacattaaaaaggtaaaaaagtcgatatgtaatatctgcaaaattatcgccgttaaggtaaaagaatttatatattttttaggcaggatatgcgtttttgcctttaaaaagataaaagaagcgatatttttcataggtaaaaacatagctgttattgccaaaattattgtcgtcaatataaaagaagcggtatgccatattgggcggataataatttatgcctttttaaagacaatagacgcgatatgttatacctgcaaaaagattgccgtcttagcaaaaaaaactgccggcattaccgaaaaaattgccggcaaaataaaagattcgatgcaccctgtaagccggacagatatttttattcttacggctttgttgattgtaattttaaccccgataattattaatctgttttttaaaatggaagcaaaatcaaaacagttgaacctgtatttatccgaaagcggcgaagaattattcgggaaagattttatggaaacgctgatacgggaattcgaggaaaaaaatcccgatattaatttgaattttgccaatgccgcttccgccgcggagcccgacgttcttttttttaatgaaggcgattacggcgcgtttatcgccgcgaacgctttaatggaattaaacgcgtttaccgagtatgattcaggcgcgaaacaaatggcaatccctcttgtctcttttatggatatgcttttttacaacattgatattctctccgccgccggttttgatcacccgccgaaaaccagagatgagtttttaacttacgcaagggcggtttcacgcggtgattctggcgcggcgggatacgcgttaagtttaagtcaaagagatcgtcaggctttggcaagagatgtcttttcatggatatgggcttcgggcggcagtttattttcggaagatgagaacggagttcttgttttaaccaaagttccggcaaaagaactttcatttttcggcgtacttaacaaagatggattgcttgcgccggatatttttgaaacaacaggcgatgaacgtcttgaggcgtttgttcaaggaaagaccgcgatgataatcgcctctaccgctgtaattccgtacctgagagagaaaatgggagacgacgcgtttggcgtaacgacaattcccgtttcagggacgggcggaaaatacaccgtcggcatttcctctgtttacgcgggtatctccgccaataccgcctacccggaatcagcgtggagttttctttcgtttcttgccggcaaaagcaatcttctttgcgagaatctaaatgccgttcccggcttggtttccaatattatccccggcgattatgtaagagtcgatcctttttactccaaagcgtgggaaatttttgaagcttccgttgttgcggaaagtttgtctgttaaaccggaggcgatggaatatgagaataattttttggaagagctaaaaactttttttgagaaataa

SEQ ID NO: 72572 - protein, 504 aa, Unknown
  Obtained from environmental sample
  DOMAIN (134)...(439): Bacterial extracellular solute-binding protein
  misc_feature (1)..(504): Xaa is any amino acid
MNLLEKVNIFKIYIKKVKKSICNICKIIAVKVKEFIYFLGRICVFAFKKIKEAIFFIGKNIAVIAKIIVVNIKEAVCHIGRIIIYAFLKTIDAICYTCKKIAVLAKKTAGITEKIAGKIKDSMHPVSRTDIFILTALLIVILTPIIINLFFKMEAKSKQLNLYLSESGEELFGKDFMETLIREFEEKNPDINLNFANAASAAEPDVLFFNEGDYGAFIAANALMELNAFTEYDSGAKQMAIPLVSFMDMLFYNIDILSAAGFDHPPKTRDEFLTYARAVSRGDSGAAGYALSLSQRDRQALARDVFSWIWASGGSLFSEDENGVLVLTKVPAKELSFFGVLNKDGLLAPDIFETTGDERLEAFVQGKTAMIIASTAVIPYLREKMGDDAFGVTTIPVSGTGGKYTVGISSVYAGISANTAYPESAWSFLSFLAGKSNLLCENLNAVPGLVSNIIPGDYVRVDPFYSKAWEIFEASVVAESLSVKPEAMEYENNFLEELKTFFEK

SEQ ID NO: 72573 - DNA, 5505 bp, Unknown
  Obtained from environmental sample
  misc_feature (1)..(5505): n is a, c, g, or t
atgaaaaagtcaaaatatttatcattctttcttttttccgtcggtttattaatatttgccggtagtttatttatttcttgtaaagggaagaaaaaccttcccgatcctgagtatgttggagcggtttcaggcggaatcctgaataaaaacgcccctgtaattgttgaattcagattcgctcaggatacatccgcgccgttagcgtctaacgcgatagttttaagcccgaaagttaagggaactgtttcatggcaggacgagtatactcttgtttttactccttccgaaagctataaacagggacagcagtacaatgtgaacgtaaatatcgggacgattccgtcttttagttttactttttcagccgcgcttcccgttttttttgtagaacttgaacctatacagttaggcgacgatgattatgtcgttgtggcgggaaaagtcaatgccgatgaagacgcggaaatttccaaaatagaacaaactgtcagctcaaaagagttgggtaaaatttcatggacgcatacagacggcgttcatcgttttgtttttgagcctgccaaacgcggcgaggcttccagaactgttgaagttacatggaaaggaaaacctttgggaacagacgtagacggatttactaccgtaatgattcccggcttggatattttccaaatgcttgatattcaatttaataacaatataatcgaggtttctttttcaaaaaatcttaagtctaatcaggatttaagaggatttatttctcttgccaataatacggacgtacgttattcgctggaaggaaatattgttaaaattttcggaaataattccggcggcattcccgcgggcgcggaacttgtaattcaggatttggtagatgtggacggcaaacgtttaagcactccggttcagtatacgattccggattcatgggaattaccggaaatacgttttgccggaaacggcgctattctgccgacaagccagggagcgcagcttgtaatcgaaaccagaaatgttacgggcattttggtggaagcgtttcaaatttacaatcaaaatatggtttattttttgcaatccaacgaccttgcggacgattccgaacttgatcgcgtgggagagcctgtgtggtcaaaagcttttgatttccaatgggctgcctcggatcaaaaccgttggatgcgcagagggctggatatggcggaactcagcaagaagtttcccggcggaatgtttcatgtaaggatcagtttcagacaaaggcatgttaaatatgtttgtgataaaggtcacggagatttttccggctatgaatttcccgatgactctttttcaccgcgttatacgataagcggcgcgaaatatacaagttcttatgataataaagattacaactggagagaatgggataactacgaaactgatccatgccatccggctttttattataataggtacgatcacaagataacaactggccggaatgtgcttgtttcggatttaggacttatcgcaaaacgctcacttgacggttcatggcttatcgcgacgacaaatcttattaccgcccgcgccgcgccaaatgttgaattcaaagtttacaattatcagggacgcattcttcatcagggcaaaacgaacgcgaacggcattgcgtctgttcccgcgtccgcggatacggcaagcggttcgcgtccatttgtgttcgccgaaagcggtttaggcagagcttatcttaaagttaatgattctcttgctctttcggtaagccattttgatatttcaggcggcactccttcttcgggactgcgcggacttatctacggtgagcgcgatgtctggcgtcccggagacgatatatatcttacattccttcttgccgatccgctgggcagtcttcctcaaaatcaccctgttatatttgagttggaagacccaagaggcagacccgttataaaccgcacttacacttcttccgtggacggattttattcccttgcggctgtcaccgcgtccgacgctcccaccggagactggaccgcaagagtgagggttggcggcaaaacatttaacaaaaacataaaaatagaaaccattatgccaaacagattaaaaattgatcttgatttcggcgcaaatgaatttattaaaagcggttctcaaaaagttcctttggaatcccaatggctttacggcgcgccggcttccggtttaaaagccgatatttccgctatttatgtggacaaagaaacaacgttcaaaggatatgaagattattctttccgtgatccttccagaggtatttcgacggaacgtcagaacatttggagtggaaatcttgacagcgatggaaaagcgatagtaacaatgaattttaatcccggacccgccgttcccggcagagtaacggcgcggtttatgacgaggatttttgagccgtcaggcgtattttcatcggaacaaatcagcaaggagtattcgccttacagccgttatgtcggaataaaactgcccaaaggcgacacaagggatatgctgcttaccgatacggatcacaaggcggatatagtaattcttgatgaagacggaaaaccgcttcgcggaaacattgagcttgattgcgctatttataaaatacattggcgctggtggtgggaaaaaggagaagacgagtccgcggaatttacatcggcgttatccagcactccgatttcacgtcaaactgttaccgccgcaaacggcaaggcgtcttttactttcaatataaagcatcccgattggggacgctacattgtgatagccaaagacagtaaaggcggacacgcggcggctaaaacggcgtacattgattggcccggatgggcgggacgcgcgcgggatgaaggtcagggttcgcagtcaatgttgacattaaccaccggaaaacctacgtataacacaggtgaaaaaatacagataacattcccgtcaaataaagaagccgccgctcttgtcgtaatggagaagggcggaaacgtaataaaaagcgaatgggttagctgtcaggaaggaacaaccaagtatgaatttaacgcggaacagtcaatggttccgaatctatatgtgcatgtaactcttgtccaaccgcatttgcaaacgcagaacgatcttccaatccgcctttacggcattactcccgtaatggttgaagacgcaagggttgtaattaatccgcagattaaaacgcaggaaaactggcaagccgaatcaaaagtttcatttactgtcagcgaggcgaacggaagaccgatggcgtataccgttgcggtagtggacgagggacttctggggcttacccggtttaatttgcccaacccgaaaaatactttttacgcaagagacgcgtcgtttatcaattcatgggacctttttcaggaagttataggcgcttattcgggcagactggaaacattgctcgcaatcggcggcggtgacgacggcgaggttgattcgcaaaaagagacacagaggtttaaacctgtggtgcgtttcttcggaccgtttgaaatcggcaagaacggacaaaagaccgaaacttttgatctgcccccgtatatcggcgcggtgcgtataatggttctcgccgcttcttccacaagcgaaccgcaaaccggcagagctctgcgcggttacggaaccgcccaaacaacggtaaaagtaacttccgatctcatggttttcgcttccttgccgcgcgtactctcgcccggcgataattttgaagtgcctgtctatgtaaacgcacaaaaggacggaaggagaaccgttaaagtaaatctctccgcgcctggcgcgtcaattcagggtgcgtcaacgcaggatgtgtcttttgaaaaaagcgaagaaaaattaatccgctttaaagtaaaatctcccgataatccgggaaaattaaagtttactgtaacggcggaatcatcgggattaaaagcggctcagcaggttgtagaaatcgaagttcgctctacggcaattcccgtaacaaaatctttgcaagcgttactctccgccggcgaaacatggaagggaactcttgattatcccggcagagagggaacaaataacattgtcgcaagtttctcaagacttccgcctctcaatcttgagtcgcggctggagtatctggttaagtatccccacggctgcgcggaacaaacgacaagcggctcgttccctcagctttatcttgacaaggtgcttttactggacgacaaacaaaaagccgaaatcagaaaaaacgtaaacggcggaatagagcgcgttttgggaatgcagttaatgtcgggaggtttttcgtactggcccggcgaatcggttgtaaatgactggtgttcttcttatatcgggcatttccttcttgaagcgcggcgggcgggctacgaggtgcgtacaaccgcgattaaaaattgggtaaattaccaaaagaacgcgtcggcgcaatggcaggtaaacagtaataagcataccgagcaggcgtatcgtctttacactctggctcttgcgggagaagccgaccttggatcgatgaaccgcctgcgaagccataaactgccgtttcaggcaagctggcgtcttgccgcggcgtattggctagcgggacagcgtgatacagcccgaaacatgataaaaggtttggctttgcctgaaaaagattaccgtgagctttccgcgacattcggctcgaacctcagagacaaggcgatgattcttgaaactttgcttttgttgaattctccggaggaagcgggaagaaccaagaagctctttgaagaaataacaaatacgctttctcaggattcatggctttccactcaggagacagcttacgcccttattgccatagttccgtatatgtcgggtaactcaggaagcggtatgctgactttggattattccgtagccggaaaaacgggaaacatctcttttaccgctcctgtcgcggaacgctcttttgaaaatgtaaccggaacaagcgccgctttgtcggtgactaaccgttcatcttctcctgtttatgtaaggtatacggcaaaaggactgcctgttgaagggaaagaacccgcgctctccgaaggtctttcgcttgccgttgaataccgcgacgccaacaaggtattaatcgctcctgaaaatttaaaactcggcgatgatatggaaatctctgtccgcgtgcgtaatacattttctcagtctgtggaagaagccgctcttgttattcccattcccgcgtcatgggaaatcgtcaacacgcggcttggcggaagcgcgtcctcgtcgaatttccgttatcaggatataagggacgacagggtgatgacatactttgatcttaacagaggcgaagaaagaacgataactttcagggtaaacaaagcctatgaaggctctttcttcagaccggcaatccatgtttacgcaatgtatgacgagtcaatcagggctttaataccgggcgtacgatag

SEQ ID NO: 72574 - protein, 1834 aa, Unknown
  Obtained from environmental sample
  SIGNAL (1)...(20)
  DOMAIN (966)...(1115): Alpha-2-macroglobulin family N-terminal region
  misc_feature (1)..(1834): Xaa is any amino acid
MKKSKYLSFFLFSVGLLIFAGSLFISCKGKKNLPDPEYVGAVSGGILNKNAPVIVEFRFAQDTSAPLASNAIVLSPKVKGTVSWQDEYTLVFTPSESYKQGQQYNVNVNIGTIPSFSFTFSAALPVFFVELEPIQLGDDDYVVVAGKVNADEDAEISKIEQTVSSKELGKISWTHTDGVHRFVFEPAKRGEASRTVEVTWKGKPLGTDVDGFTTVMIPGLDIFQMLDIQFNNNIIEVSFSKNLKSNQDLRGFISLANNTDVRYSLEGNIVKIFGNNSGGIPAGAELVIQDLVDVDGKRLSTPVQYTIPDSWELPEIRFAGNGAILPTSQGAQLVIETRNVTGILVEAFQIYNQNMVYFLQSNDLADDSELDRVGEPVWSKAFDFQWAASDQNRWMRRGLDMAELSKKFPGGMFHVRISFRQRHVKYVCDKGHGDFSGYEFPDDSFSPRYTISGAKYTSSYDNKDYNWREWDNYETDPCHPAFYYNRYDHKITTGRNVLVSDLGLIAKRSLDGSWLIATTNLITARAAPNVEFKVYNYQGRILHQGKTNANGIASVPASADTASGSRPFVFAESGLGRAYLKVNDSLALSVSHFDISGGTPSSGLRGLIYGERDVWRPGDDIYLTFLLADPLGSLPQNHPVIFELEDPRGRPVINRTYTSSVDGFYSLAAVTASDAPTGDWTARVRVGGKTFNKNIKIETIMPNRLKIDLDFGANEFIKSGSQKVPLESQWLYGAPASGLKADISAIYVDKETTFKGYEDYSFRDPSRGISTERQNIWSGNLDSDGKAIVTMNFNPGPAVPGRVTARFMTRIFEPSGVFSSEQISKEYSPYSRYVGIKLPKGDTRDMLLTDTDHKADIVILDEDGKPLRGNIELDCAIYKIHWRWWWEKGEDESAEFTSALSSTPISRQTVTAANGKASFTFNIKHPDWGRYIVIAKDSKGGHAAAKTAYIDWPGWAGRARDEGQGSQSMLTLTTGKPTYNTGEKIQITFPSNKEAAALVVMEKGGNVIKSEWVSCQEGTTKYEFNAEQSMVPNLYVHVTLVQPHLQTQNDLPIRLYGITPVMVEDARVVINPQIKTQENWQAESKVSFTVSEANGRPMAYTVAVVDEGLLGLTRFNLPNPKNTFYARDASFINSWDLFQEVIGAYSGRLETLLAIGGGDDGEVDSQKETQRFKPVVRFFGPFEIGKNGQKTETFDLPPYIGAVRIMVLAASSTSEPQTGRALRGYGTAQTTVKVTSDLMVFASLPRVLSPGDNFEVPVYVNAQKDGRRTVKVNLSAPGASIQGASTQDVSFEKSEEKLIRFKVKSPDNPGKLKFTVTAESSGLKAAQQVVEIEVRSTAIPVTKSLQALLSAGETWKGTLDYPGREGTNNIVASFSRLPPLNLESRLEYLVKYPHGCAEQTTSGSFPQLYLDKVLLLDDKQKAEIRKNVNGGIERVLGMQLMSGGFSYWPGESVVNDWCSSYIGHFLLEARRAGYEVRTTAIKNWVNYQKNASAQWQVNSNKHTEQAYRLYTLALAGEADLGSMNRLRSHKLPFQASWRLAAAYWLAGQRDTARNMIKGLALPEKDYRELSATFGSNLRDKAMILETLLLLNSPEEAGRTKKLFEEITNTLSQDSWLSTQETAYALIAIVPYMSGNSGSGMLTLDYSVAGKTGNISFTAPVAERSFENVTGTSAALSVTNRSSSPVYVRYTAKGLPVEGKEPALSEGLSLAVEYRDANKVLIAPENLKLGDDMEISVRVRNTFSQSVEEAALVIPIPASWEIVNTRLGGSASSSNFRYQDIRDDRVMTYFDLNRGEERTITFRVNKAYEGSFFRPAIHVYAMYDESIRALIPGVR

SEQ ID NO: 72575 - DNA, 834 bp, Unknown
  Obtained from environmental sample
  misc_feature (1)..(834): n is a, c, g, or t
atgattaattggcgtatttttcagcgtgaacgttttcctttgcatactcatttgccattaattttggcattgctttttgctcatatagcattgataggtacttccataactgaaccgtggtcatatattgcgctttttttcgtattgatttcctttttcttccgtatgcgcttatttgatgaaatcaaagattatgcaacagactgtgaaaaaaatccttctcgtcctttgccacgcggagttttgaaaatctgcgatttgcaacgggctattctcatattatttggttttgaaattgtgattgcctgtgttgcaaatcatgttgctttagcgatattattgcctgcgcaaggttattcgcttcttatgtacagagaattctttataggaaaaattcttcgtccgcatttaaccacttatgcggtgtgccatacggttattatggttctgctttctgccttgtgcagtatatggttgttggagtgcctcccttggcaattagagactcgcaactggatttttgccatcggttgttttggtattttcaatgtttttgaatttgggcgcaagacatttgctaaaatcgaagagcagcacggtgtggacagttattctaaaatttggggacacacgggtgcggtgtttttgaatttatcccaaagtttgctaggtttgtgcgcaatgggctacgcctatccttacaaaaattatcaatggctgataggaagctcagtaataacctgcttgttaatcgcangagttgcttatatatttttaaacacagtaaaaagtgcaaaaatctatcgtaccataagcagtgcgagtattttgtaa

SEQ ID NO: 72576 - protein, 277 aa, Unknown
  Obtained from environmental sample
  misc_feature (1)..(277): Xaa is any amino acid
MINWRIFQRERFPLHTHLPLILALLFAHIALIGTSITEPWSYIALFFVLISFFFRMRLFDEIKDYATDCEKNPSRPLPRGVLKICDLQRAILILFGFEIVIACVANHVALAILLPAQGYSLLMYREFFIGKILRPHLTTYAVCHTVIMVLLSALCSIWLLECLPWQLETRNWIFAIGCFGIFNVFEFGRKTFAKIEEQHGVDSYSKIWGHTGAVFLNLSQSLLGLCAMGYAYPYKNYQWLIGSSVITCLLIAXVAYIFLNTVKSAKIYRTISSASIL

SEQ ID NO: 72577 - DNA, 870 bp, Unknown
  Obtained from environmental sample
  misc_feature (1)..(870): n is a, c, g, or t
atgcttgcgaaaaaaaacgaattatcactgattagacaagaacttaatgcggtagagcttgaacaccaacacttttgtaaatgttgcaattacaactacgaactctttttacagtatttgaaaccttccactacttccgccaccgcattaaaattatggtttgtctgcgaaaaatatattgagcgggaagaaaaattatttgggcgatttatcaatcgttttgtatacagagtaataaacaaatatttacatggagtaataaacaagagattctacggtgaaccggatataatgattgcaatttgtcaaaagcgttggtatatagcgcgaattgatgaattaaagagaagcgttttgttattgcagacggaacttaccagctttaattttgatgagaaaatgaaagaatattcctcgttatcaatgcgactatttcgcgattatctcgctgaaaaatttaaaaatagtaaacggcaggtatttgatattgatgatttgtggaaaaattcggatacatttatcaaaaactaccctgtaattttgagtactacctattcgttacgtagcagtctttctcatagagttatgtacgactacgttataattgacgaatcgtcacaagttgatcttgctacaggtgctctcgcattgtcatgcgcaagaaaagcggttattgtaggtgatttgaaacagcttcctaatgtagttgattctgaaatggagcagaaaaccgatgcggtttttgcagaattcgatttgtcggaagtttatcggtacaaaaatcacagtctactgcttgcactttcagaattattcccgaccgtgccgaggacgctcttacgtgagcattatcgctgtcaccaaagataa

SEQ ID NO: 72578 - protein, 289 aa, Unknown
  Obtained from environmental sample
  misc_feature (1)..(289): Xaa is any amino acid
MLAKKNELSLIRQELNAVELEHQHFCKCCNYNYELFLQYLKPSTTSATALKLWFVCEKYIEREEKLFGRFINRFVYRVINKYLHGVINKRFYGEPDIMIAICQKRWYIARIDELKRSVLLLQTELTSFNFDEKMKEYSSLSMRLFRDYLAEKFKNSKRQVFDIDDLWKNSDTFIKNYPVILSTTYSLRSSLSHRVMYDYVIIDESSQVDLATGALALSCARKAVIVGDLKQLPNVVDSEMEQKTDAVFAEFDLSEVYRYKNHSLLLALSELFPTVPRTLLREHYRCHQR

SEQ ID NO: 72579 - DNA, 756 bp, Unknown
  Obtained from environmental sample
  misc_feature (1)..(756): n is a, c, g, or t
gtggggggaaatatattaggacggggtgtaacatttccaaatctgcaaacaattttttattctcgtaccgcgagaacgccacaagcagatacatattggcaacactgtcgcatgtttgggtacgatcgtgatcgaagcttaatgagactttttataccattttctatttttaaattatttcaagaattgaatgagtctcaaaaggcgctaataaaacaagtttctgagcgtggaattaataaaactcaattattatatgtaaacggtataaaaccaactcgaaatgcagtgattaattcacaaagactatctcaaattgtaggtggtgtaaactacttcgccgccttccctgtaaacaactctctgcaagatttggatgcactattgcttccctatgatggtaaaggctttattgattgtccaatatcactaattgtagaaattttttcgcacatagaaagtgaaaagcaagatagtgattggaattcgcatgaatacataaatgctctaaatattattgctgaaaaagaaaaaattaaaaaggcaaaactttttgtaagtacaggacgtagaattacaaagggtaaaggtacaatgctatctgaaaaagatcgaatagatattgacagatataattctgatattgctttaattgtatatcgtatggttgatgatcctgaacttgnctgggggtgttctatatggatgccaaatattaagttaccggaaggttttacgttctttaaaatgaaataa

SEQ ID NO: 72580 - protein, 251 aa, Unknown
  Obtained from environmental sample
  misc_feature (1)..(251): Xaa is any amino acid
MGGNILGRGVTFPNLQTIFYSRTARTPQADTYWQHCRMFGYDRDRSLMRLFIPFSIFKLFQELNESQKALIKQVSERGINKTQLLYVNGIKPTRNAVINSQRLSQIVGGVNYFAAFPVNNSLQDLDALLLPYDGKGFIDCPISLIVEIFSHIESEKQDSDWNSHEYINALNIIAEKEKIKKAKLFVSTGRRITKGKGTMLSEKDRIDIDRYNSDIALIVYRMVDDPELXWGCSIWMPNIKLPEGFTFFKMK

SEQ ID NO: 72581 - DNA, 576 bp, Unknown
  Obtained from environmental sample
  misc_feature (1)..(576): n is a, c, g, or t
atggccaattatcaaacaggtatacgnaaccaaatcggctacctacgaaaatattgccgtgccggtgagcgacggacacaagatttaccaaatggtggtaaacctgaaaaaagcntacgaaacgcaaggcaaggaatagcgcgcaccatcggcaaaaccattacgctggtgatgattgacgattactggcgcgagcacctgcgcgagatggacgagttgcggcaatcggtacagaacgccgtgtacgagcagaaagacccgctgttgatttacaaattcgagagctacgaattgttccaaaccatggttaccaaaatcaaccgcgatgtattggcctttttgctgcgcgcccacattccgctgcgcgacccgcaaaacgtgcgtcaagccgagcaacgccggcgcaacgacaaccacctgcaaacaagccggccggacgcattagccgccgccgccaatgccggtgggccgcgtgcacaaatgccggtgcacgtcgagaaaaaaacggggcgcaatgacccttgtccctgcgggagtggcaagaaatataagaattgccatggagcgaatagctga

SEQ ID NO: 72582 - protein, 191 aa, Unknown
  Obtained from environmental sample
  DOMAIN (3)...(119): SecA Wing and Scaffold domain
  misc_feature (1)..(191): Xaa is any amino acid
MANYQTGIRNQIGYLRKYCRAGERRTQDLPNGGKPEKSXRNARQGIARTIGKTITLVMIDDYWREHLREMDELRQSVQNAVYEQKDPLLIYKFESYELFQTMVTKINRDVLAFLLRAHIPLRDPQNVRQAEQRRRNDNHLQTSRPDALAAAANAGGPRAQMPVHVEKKTGRNDPCPCGSGKKYKNCHGANS

SEQ ID NO: 72583 - DNA, 564 bp, Unknown
  Obtained from environmental sample
  misc_feature (1)..(564): n is a, c, g, or t
atgagagaaatcagcgttgagcaaataaagtcgcgtgtcgtgccgctgtgcctgaccgcagcttacgacctgcctgaggacgtgcgccgcgccatcgagagcgcgattgggggcgagccttccccgcttggcaggtcaatgctggagcaagtgctggaaaacagccggatagcctccaaagaccacatgcccatctgccaggacaccggcgtggccgtcttttttgtggagatgggtcaggacgcgcacatcaccggtggctcgttgggtgaggccttggcagaagcgaccgaaaaggcctggaaggacgcatacctgcggatgagcatagttgccgatccactgtttgcaaggaagaacacgcacacaaacaccccgccgattgtccatctgcggctggtgccgggcgacggcctaaagataaccattgcgccaaaggggggcggctccgaaaacatgagccgcatggcaatgctgaagcccacggccggcatacccgccgtcgcggacttcatctatgagaccgtcgtcttggcaggcggaaacccttgcccccctgtatag

SEQ ID NO: 72584 - protein, 187 aa, Unknown
  Obtained from environmental sample
  DOMAIN (9)...(187): Fumarate hydratase (Fumerase)
  misc_feature (1)..(187): Xaa is any amino acid
MREISVEQIKSRVVPLCLTAAYDLPEDVRRAIESAIGGEPSPLGRSMLEQVLENSRIASKDHMPICQDTGVAVFFVEMGQDAHITGGSLGEALAEATEKAWKDAYLRMSIVADPLFARKNTHTNTPPIVHLRLVPGDGLKITIAPKGGGSENMSRMAMLKPTAGIPAVADFIYETVVLAGGNPCPPV

SEQ ID NO: 72585 - DNA, 792 bp, Unknown
  Obtained from environmental sample
  misc_feature (1)..(792): n is a, c, g, or t
ttgggattgccttatgcagcggttcgccgacatttttgccctgttcacagccagacgaccgcgctttgcctatccgccgcacgtattcggggcgcggcacggatatccttggagtcaggaggggacaagatgcgcccgacagctttgatactattactatccaccgccttggcggtttctgttgcctgtcggttgccggatcgtgcggatgcaagcaggactgtgacgcaaacgctggacttaaagcctggcggcgagcttcgcgcctcgacgttcaatgggcgcatttctgtggagggctgggagcgcgacgaggttttgctggttgccgagatcacggaaagaatggaaggggatgtccgattcaacactgaatccagggacggctgcgtggagatacttgcagagcaggcgggcaggagcaagtatgccatcaatctgggcaggtctagtggagccagctatacgctgaaagttccaatgaaggtcacggctacgctggtttcctcgaatgggcgcatagaaatccgcaaaattgacggcgaggtggaagccgacaccagcaacggttccataaccgccgaagacatcggcggcactgcgcggcttgcgacgagcaacagcagaatcaccgcaagcacgatcaaaggcgggctgatagctaggacgtccaacgcgaagctggaggccaaggacatcaccggcgacgcggacttaggacccacaatggcgnggttgacgcgaagacatcaaaggcaaagccgacgttgtgacaagcaaacggtccgatag

SEQ ID NO: 72586 - protein, 263 aa, Unknown
  Obtained from environmental sample
  misc_feature (1)..(263): Xaa is any amino acid
MGLPYAAVRRHFCPVHSQTTALCLSAARIRGAARISLESGGDKMRPTALILLLSTALAVSVACRLPDRADASRTVTQTLDLKPGGELRASTFNGRISVEGWERDEVLLVAEITERMEGDVRFNTESRDGCVEILAEQAGRSKYAINLGRSSGASYTLKVPMKVTATLVSSNGRIEIRKIDGEVEADTSNGSITAEDIGGTARLATSNSRITASTIKGGLIARTSNAKLEAKDITGDADLGPTMAXLTRRHQRQSRRCDKQTVR

SEQ ID NO: 72587 - DNA, 855 bp, Unknown
  Obtained from environmental sample
  misc_feature (1)..(855): n is a, c, g, or t
gtgctttggcgttggcatgttcatggacatcggcatgttcatggaaaacgtaatgaccgccgcccgcgcccgtgggctggacacttgtcctcaggccttctttgccgactaccccgatacggtcagggcttgcttgggcatcccccaaaacgagatggtcgtatgcggcatggcccttggctacgcggacgctggggcgcccataaattcactccggccagggagggagccagtggaagtttttgccgattttcgtgggttttgaaggagacagccatgtcgcagtacggcaccgtccaagacaggattcgctgcaagcggctactggacaaagtggttccagtggaagaagtcctaaagcacttcaagcacgggatgagcctcggctggtctgggttcacgcctgctggctacccaaaggccattccaattgctttggcggactacgtcgaaaagaacgggttgcagggcaagatgcgctttgatttgttcgttggcgcgtccgtgggggccgagactgaggacaggtgggcctcgctggacatgatagaccgccgctggccataccagacggggaaacacatagcccaggggatcaacgaatgccgcataaggatgggcgacaagcacctgtccatgtttgcccaggaccttggatatggcttttacacgaaggacaccgagtcgggcaagctcgacttggcgatgattgaagtcggggccgtcacggaagaaggcggtctgatccttggcacctctgtaggggcggtgccagaaatactgatggtggcggatcgagtaattctggaagtcaacacttcaatgccgtcgctcgaaggcctcggccgattctga

SEQ ID NO: 72588 - protein, 284 aa, Unknown
  Obtained from environmental sample
  misc_feature (1)..(284): Xaa is any amino acid
MLWRWHVHGHRHVHGKRNDRRPRPWAGHLSSGLLCRLPRYGQGLLGHPPKRDGRMRHGPWLRGRWGAHKFTPAREGASGSFCRFSWVLKETAMSQYGTVQDRIRCKRLLDKVVPVEEVLKHFKHGMSLGWSGFTPAGYPKAIPIALADYVEKNGLQGKMRFDLFVGASVGAETEDRWASLDMIDRRWPYQTGKHIAQGINECRIRMGDKHLSMFAQDLGYGFYTKDTESGKLDLAMIEVGAVTEEGGLILGTSVGAVPEILMVADRVILEVNTSMPSLEGLGRF

SEQ ID NO: 72589 - DNA, 378 bp, Unknown
  Obtained from environmental sample
  misc_feature (1)..(378): n is a, c, g, or t
atgtatggtctcttgggcattccaaaggacgaccgcgagggcatgaagcgccagacggccaggaacttcctgttcttcgatgcgccagtcggtctggttttcacgatggacaggtgctttggcgttggcatgttcatggacatcggcatgttcatggaaaacgtaatgaccgccgcccgcgcccgtgggctggacacttgtcctcaggccttctttgccgactaccccgatacggtcagggcttgcttgggcatcccccaaaacgagatggtcgtatgcggcatggcccttggctacgcggacgctggggcgcccataaattcactccggccagggagggagccagtggaagtttttgccgattttcgtgggttttga

SEQ ID NO: 72590 - protein, 125 aa, Unknown
  Obtained from environmental sample
  misc_feature (1)..(125): Xaa is any amino acid
MYGLLGIPKDDREGMKRQTARNFLFFDAPVGLVFTMDRCFGVGMFMDIGMFMENVMTAARARGLDTCPQAFFADYPDTVRACLGIPQNEMVVCGMALGYADAGAPINSLRPGREPVEVFADFRGF

SEQ ID NO: 72591 - DNA, 534 bp, Unknown
  Obtained from environmental sample
  misc_feature (1)..(534): n is a, c, g, or t
atggccgacgcgatcgctctgcccatagaacaaccggaagaacccgcgatcggcgccgaggccgaaaccatcgctctgcctgtggaacgagcggaagaaccgcccgcgatggctgaagaactgcccgcaatgagcgaagccgctgtcgaaatcgtcgccgtgcccgtggaacagccggaagaacccgcgatcggcgccgggggcatcgttgtgcacggcgtcaacttcaagaacgattcgcatgatctggacgacaaggcgatggacgtcctctatgaagtctacgcccggatcaaggacacgaccggcgcgatcttcattgaaggctggaccgattcccacggttccgatgaacacaacatggcgctctctcagcgccgcgccgactccgtgaaggactacctggtcagattgggcatgcccgcctcccgcctcatcgcgatcggcaggggcaagtcctccaagtacgacaacgcgaccgccgaagggcgcttcatgaaccgccgcattgaactgctggcaaacgaaggctga

SEQ ID NO: 72592 - protein, 177 aa, Unknown
  Obtained from environmental sample
  DOMAIN (75)...(168): OmpA family
  misc_feature (1)..(177): Xaa is any amino acid
MADAIALPIEQPEEPAIGAEAETIALPVERAEEPPAMAEELPAMSEAAVEIVAVPVEQPEEPAIGAGGIVVHGVNFKNDSHDLDDKAMDVLYEVYARIKDTTGAIFIEGWTDSHGSDEHNMALSQRRADSVKDYLVRLGMPASRLIAIGRGKSSKYDNATAEGRFMNRRIELLANEG

SEQ ID NO: 72593 - DNA, 900 bp, Unknown
  Obtained from environmental sample
  misc_feature (1)..(900): n is a, c, g, or t
atgtacgtcacgcttgagccgtgttcgcacttcggtcggacgccgccgtgcgttgacgctgtaatagaggcggggttcggcgcggtggtggtgctgttaaaagatccaaatccgcttgtgaacggcaagggattaaggcgtttgcgggcgcgcggggtcgcggtgcggacggggcttttgggcaaggaggcggcgcttgtcaacgaagacttcttttgggctgcggccaaccgccgcccgtgggtcgccctgaaacttgccatgaccctcgacgggcgcatcgccgactgcggaggcgggtctaagtggataacttccgccgcgtcgcgtcagatagtacaggatatcaggcgtaggcacggcgcgataggcgtagggtcggggacgcttgccgccgacgatccgaagctcacggcaaggtgcggcaggaagacgtactatccggcgcggattgtcttttcatcgaccgggaatatccccaaaggttcctacttcatgacgcatacggacgaggctaggagcatcgtcgtcgtcaaaaataataataaaagtaagcgtaaaaaggggattgataaaagcggcggcgttgagtattggtacaccggggctagcgacggcgccgagtcgatcgatacctttttagatatggcctacgcggaggggataaacagcatattgatagagggcggtcagcgtttggcgagcgcttttttggaaaacgggttcgtcaacaaactgtatctattctacgggggcaggattttcggggatggattggacgggctctccttttcgtgcgggctgaccgttagtagtccgttggtactcggcgatgtatcatatcaacagatcggggacgatcttttggcgacggggtatgtcaagaatttgactttttaa

SEQ ID NO: 72594 - protein, 299 aa, Unknown
  Obtained from environmental sample
  DOMAIN (80)...(290): RibD C-terminal domain
  misc_feature (1)..(299): Xaa is any amino acid
MYVTLEPCSHFGRTPPCVDAVIEAGFGAVVVLLKDPNPLVNGKGLRRLRARGVAVRTGLLGKEAALVNEDFFWAAANRRPWVALKLAMTLDGRIADCGGGSKWITSAASRQIVQDIRRRHGAIGVGSGTLAADDPKLTARCGRKTYYPARIVFSSTGNIPKGSYFMTHTDEARSIVVVKNNNKSKRKKGIDKSGGVEYWYTGASDGAESIDTFLDMAYAEGINSILIEGGQRLASAFLENGFVNKLYLFYGGRIFGDGLDGLSFSCGLTVSSPLVLGDVSYQQIGDDLLATGYVKNLTF

SEQ ID NO: 72595 - DNA, 849 bp, Unknown
  Obtained from environmental sample
  misc_feature (1)..(849): n is a, c, g, or t
gtgtccggaattgtaggatacgttaacaacgcgggaatgaaggcgataattaacatacaccatgacggcgcggacagcgccaactggctttcggtaaaaacagccgacttgaccggagaaacaaaaacaaacatggacgccaaatttacggcggtatggacgcagattgcggaaaaatttagagataccggagattttctcctttttgaggcgtttaacgaattgcatgacggcagctggggcaacggcactcaggaccagcgcaaacgggtaaacgagcttaaccaaatttttgttgacgcggtaagggccgtgggcggacagaacacaaaccgttaccttgttatcccgggatgggttacgcgggcaagcgttacagtatcgtctttggttttgccaacggacacaacaccggatcggcttgttgttactttccattattatgacccctatgacttttccggaagcgctaaggataaagtgtggggaagcaaggcgaatccttccggttgggccaacgaaagtttcgtgcagagcacttttaactcagtaaagaacaaatttgtcgctaacggagtgccggttattattggggaatacggcgcggtaaaccaaagcggcgccgcgtaccggaaatattacatggaatatgtcaccaaatacgcccatgactgcgggtttgttcccttctactgggacaatgccggttttggaacaggcggtgaaaaattcggccttctaaaacgcaataacggcgccgcgtatgataaggccgcggaggaaatccttgcggtaatgatgaaggcggtaaatgaagattattcaattaacagcatcgtcgcgccgtaa

SEQ ID NO: 72596 - protein, 282 aa, Unknown
  Obtained from environmental sample
  DOMAIN (1)...(240): Cellulase (glycosyl hydrolase family 5)
  misc_feature (1)..(282): Xaa is any amino acid
MSGIVGYVNNAGMKAIINIHHDGADSANWLSVKTADLTGETKTNMDAKFTAVWTQIAEKFRDTGDFLLFEAFNELHDGSWGNGTQDQRKRVNELNQIFVDAVRAVGGQNTNRYLVIPGWVTRASVTVSSLVLPTDTTPDRLVVTFHYYDPYDFSGSAKDKVWGSKANPSGWANESFVQSTFNSVKNKFVANGVPVIIGEYGAVNQSGAAYRKYYMEYVTKYAHDCGFVPFYWDNAGFGTGGEKFGLLKRNNGAAYDKAAEEILAVMMKAVNEDYSINSIVAP

SEQ ID NO: 72597 - DNA, 636 bp, Unknown
  Obtained from environmental sample
  misc_feature (1)..(636): n is a, c, g, or t
atgatttgggcccgcgccctgactgcgctggcggagcgcgagccgggcgctgcgtatctgacgcaggccatcagcgttctccagcaagccctccaggaggtgacccgcgagggtgagcccggcaagtgggcggaggcccagaccgctctgggtcaggcgctcgcggatcttggagccctgcagtcccgtggacccagtggctccgggggccccagcggaaaggccttgcagcaggccctcaccgcgctccaggaggccctcatggagcgcacccgcgagcggggcccgctccagtgggcacagaccgaggacgctctgggcagcgcgctgctgaacctcggatctcgagagcgcaccccagtcaggctgcaggaggcagtcaacgtcttccaggaggccctgaaagagcgcacccgcgagaacagcccgtttgactgggcgcagacccagcgccacctcggggccgccttgcaagccctcggacagcggaccgcgagcgtcccggaccttgagcaggccgtggagtcgttcacgcgggctgcagaggccgatcccggagccgcggatgcggtgaggagcgcagcggcggcgcgggatcgcctgcgcgccacgaccgcggtcacccgagcccgctga

SEQ ID NO: 72598 - protein, 211 aa, Unknown
  Obtained from environmental sample
  misc_feature (1)..(211): Xaa is any amino acid
MIWARALTALAEREPGAAYLTQAISVLQQALQEVTREGEPGKWAEAQTALGQALADLGALQSRGPSGSGGPSGKALQQALTALQEALMERTRERGPLQWAQTEDALGSALLNLGSRERTPVRLQEAVNVFQEALKERTRENSPFDWAQTQRHLGAALQALGQRTASVPDLEQAVESFTRAAEADPGAADAVRSAAAARDRLRATTAVTRAR

SEQ ID NO: 72599 - DNA, 765 bp, Unknown
  Obtained from environmental sample
  misc_feature (1)..(765): n is a, c, g, or t
gtgcgttcggtctccgacgcgtttatggcggatatttcagacatcgtaataaaggcggacggcagtgtggagcttaaaaacgcttcggctgccggcagcgttgatatttcaacatcgggcggcattgaaagtaagggtgaaatttttgccatgaaagatgtctcgcttaaaggcgcggagataagcaataccggttctgtgctgtcaggccggaatatgtcgctttacgccggaaagattcgtaacgagaaaggactcttattctccgccggttccatggatgccggctttcaaaaacttgataatacttacggcgatatttactctatgggagacatgagactgtttggctccgatgccaaattaatcaattattccggaaacattgaatcacagggcgctatggatgttaatctgggacgactgggccggcttgagaatacaggaaaagacggcggcggttataaaacggagcttgtctatattgcgggttatatgagagacagctacggccttatggaagaatggaggattagttcgtcgatgactacagattcatcgtaccttgagtcgggtggcagcatggaaatttttgccggggaggttataaaccacggcagcgtaatatcctcgtccggcgacctgaaaataagcgcagattatatgctgaacgatacgtcgtctgtagatgtctatatgaatcaattgcagcattttggaatggtcaggcgtgaagccaagaaaataccccggaaccggaattaa

SEQ ID NO: 72600 - protein, 254 aa, Unknown
  Obtained from environmental sample
  misc_feature (1)..(254): Xaa is any amino acid
MRSVSDAFMADISDIVIKADGSVELKNASAAGSVDISTSGGIESKGEIFAMKDVSLKGAEISNTGSVLSGRNMSLYAGKIRNEKGLLFSAGSMDAGFQKLDNTYGDIYSMGDMRLFGSDAKLINYSGNIESQGAMDVNLGRLGRLENTGKDGGGYKTELVYIAGYMRDSYGLMEEWRISSSMTTDSSYLESGGSMEIFAGEVINHGSVISSSGDLKISADYMLNDTSSVDVYMNQLQHFGMVRREAKKIPRNRN

SEQ ID NO: 72601 - DNA, 690 bp, Unknown
  Obtained from environmental sample
  misc_feature (1)..(690): n is a, c, g, or t
atgttcggcttcgtgcggcaatccatggaaaagggccagcccttggacgcggcccaaagcgccagctaccggcccgacccggcctccaaccggaataccgtttaccccttcccccgcttctggtattggaacacatacgataccgaacgttattatcttaacggcaacgtaaacctgaccgatcaggcccacctcaaggcgttgctctattatgacgggcacaaggacggcaacatatcctttacggatgaaaccatgagcacccgtctatatgggtcaacgaattacaaaaacatccccgcccccaacaacaccaccatgtatagcggcacacgttatgagcagtacaccgccggcgggcagttgacctttgactacaccttcaacgaggccaacaaactggccgtctcggcgggctaccgcgagctttcccacaagtctttcgcggagagatccgttgccaacaataggcctacggagttcctagaccagccgcttgatggccacatggtggacgaaatctatgatgccggggcggaatacactttaaagcccatcgaccctctgaccctggtcttcggcgccagctatagttacctcaccccaaagaccttggagcggcttacaacgataaaatggtgtcttatgggggagggtacatggacagctatggctctgatgaaactctaa

SEQ ID NO: 72602 - protein, 229 aa, Unknown
  Obtained from environmental sample
  misc_feature (1)..(229): Xaa is any amino acid
MFGFVRQSMEKGQPLDAAQSASYRPDPASNRNTVYPFPRFWYWNTYDTERYYLNGNVNLTDQAHLKALLYYDGHKDGNISFTDETMSTRLYGSTNYKNIPAPNNTTMYSGTRYEQYTAGGQLTFDYTFNEANKLAVSAGYRELSHKSFAERSVANNRPTEFLDQPLDGHMVDEIYDAGAEYTLKPIDPLTLVFGASYSYLTPKTLERLTTIKWCLMGEGTWTAMALMKL

SEQ ID NO: 72603 - DNA, 720 bp, Unknown
  Obtained from environmental sample
  misc_feature (1)..(720): n is a, c, g, or t
atgctatgctttggcgcggcgttggcgggcacatacatgttccgtatcgcagccggtcgccggggcgtgttcaaggccgccatcgcctcgtccaataccgtgaacatgggattgcccgtcaacatcgccctgttcggagaaggcgccgttcaatacgtgttgttgtatatctttgccaacagcatctttttctggtcgctgggcaattattgcatagcccacgatggcgacggcaaggacgtcaaacttttcagcctcaaaaccgtcaaacagatatttttcccgccattcaccggctttcttctcggtgtgctgctggttgtgctggacatccccctgcctacttttcttgacaacaccttcaaatatgtcggggatatgaccgttggcctggggatcatgtacctcggcatgcttttagccggcgccaaactcacggatttcacgccggaaaaagatacggtgcttgtcattatcggcagatttatcctgagtcctctgagcatcgtcgccctggcccattttctccctatcccggacatgatgctgaaggtgttcattatccaggcatccctgccggtcatgctcaatgtggcggttcttacggcctactacaggggcgatgccaagtacgcggccgtattggtcagtacctccacggtaatgaccattgtcaccgtgccttgtatcgccctgttgatcgcgtttttcctgccgtga

SEQ ID NO: 72604 - protein, 239 aa, Unknown
  Obtained from environmental sample
  DOMAIN (1)...(231): Auxin Efflux Carrier
  misc_feature (1)..(239): Xaa is any amino acid
MLCFGAALAGTYMFRIAAGRRGVFKAAIASSNTVNMGLPVNIALFGEGAVQYVLLYIFANSIFFWSLGNYCIAHDGDGKDVKLFSLKTVKQIFFPPFTGFLLGVLLVVLDIPLPTFLDNTFKYVGDMTVGLGIMYLGMLLAGAKLTDFTPEKDTVLVIIGRFILSPLSIVALAHFLPIPDMMLKVFIIQASLPVMLNVAVLTAYYRGDAKYAAVLVSTSTVMTIVTVPCIALLIAFFLP

SEQ ID NO: 72605 - DNA, 702 bp, Unknown
  Obtained from environmental sample
  misc_feature (1)..(702): n is a, c, g, or t
gtggcggataacggattcaattatataaattgctatgacacgcggaatatgttcgcggtcttaacaaaatatatgcaggggcgcggttacaaaaccatatcactcgttacgataaataatgcgtcggctacgtatttcctggattttttcaaagaactgttgaacggcgcacgcataaaaatcctgtcgaccgcttcctttatgccaggcgaaagggatttcagcatagacgcaggcaaagtcgcgacacagaatcccgatgtggttttcctttattccaccgatccggaattgtcattgttcgcggaacgactgcgccaagccggatacaacggtccaatggcatcaatggtccagttcggatacagccaaaacaaacgactatttgaagaccaaatttttgtcgatgtgaatgctggtggcgacaagaaatttatcgcggattataaatcagaattcgggacggaaccgcaatctgcatcaccggcgtattatgacaatgtgagaataatttacgaactgattgaaaaacatggactgccaaaggactgggaatccggtgaagtgcgcggaaaaatcagcgatacgatcgcaacgcttcacagcgcanacggcaaattgttcatgaattccgaaggggtgatttattcaacccctgtaatgaaaacaatcaaaaacggaaagccacaggttataaaatga

SEQ ID NO: 72606 - protein, 233 aa, Unknown
  Obtained from environmental sample
  misc_feature (1)..(233): Xaa is any amino acid
MADNGFNYINCYDTRNMFAVLTKYMQGRGYKTISLVTINNASATYFLDFFKELLNGARIKILSTASFMPGERDFSIDAGKVATQNPDVVFLYSTDPELSLFAERLRQAGYNGPMASMVQFGYSQNKRLFEDQIFVDVNAGGDKKFIADYKSEFGTEPQSASPAYYDNVRIIYELIEKHGLPKDWESGEVRGKISDTIATLHSAXGKLFMNSEGVIYSTPVMKTIKNGKPQVIK

SEQ ID NO: 72607 - DNA, 426 bp, Unknown
  Obtained from environmental sample
  misc_feature (1)..(426): n is a, c, g, or t
gtgtggtcgtttctgccgcgcatcagcatgcccatcttcacggggggacgcaacctggccaatctggatctggcgaatatccgcaaggaaagttccatcatccaatacgaaaaaacccttcaaaccgcgttccgtgaagtggcggacggactcatgacgcgggcatccttcctcaggcagatggaggcgcaaaaaaaatacctggcttcacagcgccttgtgcttgaactggcgatgcaacgctatgccggcggcgtcatcagctatctcgaagtgctggacgcgcaacgcaatgtctttcaggcggagcaagacctgctggatatccggcgggaacagttggtcaatgagatcaatctatacggcgcgttgggcggcggtcttctcgaacgaagcgtcaatacttccgaggaccgtcaacaataa

SEQ ID NO: 72608 - protein, 141 aa, Unknown
  Obtained from environmental sample
  DOMAIN (1)...(125): Outer membrane efflux protein
  misc_feature (1)..(141): Xaa is any amino acid
MWSFLPRISMPIFTGGRNLANLDLANIRKESSIIQYEKTLQTAFREVADGLMTRASFLRQMEAQKKYLASQRLVLELAMQRYAGGVISYLEVLDAQRNVFQAEQDLLDIRREQLVNEINLYGALGGGLLERSVNTSEDRQQ

SEQ ID NO: 72609 - DNA, 564 bp, Unknown
  Obtained from environmental sample
  misc_feature (1)..(564): n is a, c, g, or t
ttgctcacccggcttcggcggctgatcggcaactgcaaaccctgccgctttgaaaccagggacaaccaggccatgctgaacgccgccgccgccgtgttgcaggatttgggcttcacgctggatgaatcggacccgtctttgggcgtattggtcggctcaaagcagcgcgaggcgaccacgctcgccggcgacattcaggagaagatgcattcgatcggcacaacgctgaacacggtgagcaatgttctcggcgtcatttcgatcctcggcggacgcggcggcagcgtaaactttaagaaagaggaaccccctgtcgtggataaagaacagcagatccgcgtctccgtaatgatcgccgcaatcacgccctcttctccggaatacgcgcagacagccggagaagaatacgcgggacagtccgccgtgcgcgtggcttttcagcggacgatcttcaattcaaagaacgaaatttcgcgtgaagaagagattaaagatgctgaaatatacagggagtttttcgacaaactgtcacacgccgtatttctggaggctcacgggctatga

SEQ ID NO: 72610 - protein, 187 aa, Unknown
  Obtained from environmental sample
  misc_feature (1)..(187): Xaa is any amino acid
MLTRLRRLIGNCKPCRFETRDNQAMLNAAAAVLQDLGFTLDESDPSLGVLVGSKQREATTLAGDIQEKMHSIGTTLNTVSNVLGVISILGGRGGSVNFKKEEPPVVDKEQQIRVSVMIAAITPSSPEYAQTAGEEYAGQSAVRVAFQRTIFNSKNEISREEEIKDAEIYREFFDKLSHAVFLEAHGL

SEQ ID NO: 72611 - DNA, 666 bp, Unknown
  Obtained from environmental sample
  misc_feature (1)..(666): n is a, c, g, or t
ttggcattattgcgtatcctttcttttcccgctttgtcttcccctgtatatttttggcgaagcgctggtagcaacaacaatagctatgattttggagtgtgtcaaatggatgttcgcaaagcccgaccggcggatgcgccgtatattgcaggtttgcttgccggttatgccgaaaaagggcagcttttgctgcggtcaaacgaagagattcttgacggtatccgcgatttttttgtgaccgtgtcccccgatgaagaaattcttgcctgcgccgccctcgcgatttatgacgcggagcttgcggaggtgcgttccatagccgttcagcccgccatgatccgtcatgggttggggcgaaagctgctggaggcgtgcgaggccgatgcgcgcgcgtatgctcttgataaaatatttgcgctgacatacgttcctgaattttttgaacacaatggatatgcgcgcatcgcgaaagaggagcttccgcaaaaatctggcgcgattgttttcgctgcaagcttttccccactgccgcgagattgcggtttatcagaaactgtgagcgtgattcccattcgccgagcgtgtcgcgcaccgcgcacaggagatgcgcgcgtcgttgtgtccatcccgccgatatgcccgataccgaaaacgccgcgttgctga

SEQ ID NO: 72612 - protein, 221 aa, Unknown
  Obtained from environmental sample
  DOMAIN (79)...(153): Acetyltransferase (GNAT) family
  misc_feature (1)..(221): Xaa is any amino acid
MALLRILSFPALSSPVYFWRSAGSNNNSYDFGVCQMDVRKARPADAPYIAGLLAGYAEKGQLLLRSNEEILDGIRDFFVTVSPDEEILACAALAIYDAELAEVRSIAVQPAMIRHGLGRKLLEACEADARAYALDKIFALTYVPEFFEHNGYARIAKEELPQKSGAIVFAASFSPLPRDCGLSETVSVIPIRRACRAPRTGDARVVVSIPPICPIPKTPRC

SEQ ID NO: 72613 - DNA, 402 bp, Unknown
  Obtained from environmental sample
  misc_feature (1)..(402): n is a, c, g, or t
ttgtcggaatcgttagatataatcggcaaaaacctttgtgaaatagaaagttacgctccgcgtcgcattgaaaaatataaaaataaattggatactgcggtcgacttgcttagaaaagacggtgtggacgaacaaagaatttctttggaaattattttgatgattgaaaaaatagatattacggaggaaattacgcggcttaaagcgcatatttcggcgacaaagaatttgttggagaacgacagttctatcggaaaacggcttggtttttggctgcaagaaataaaccgcgaaataaatactatagggtcgaaagcaaacgatgccgaaatcgtaggcgttgtagtgtctatgaaagatacggcggaacaaatgcgggaacaatcattgaatttattataa

SEQ ID NO: 72614 - protein, 133 aa, Unknown
  Obtained from environmental sample
  DOMAIN (46)...(133): Domain of unknown function (DUF1732)
  misc_feature (1)..(133): Xaa is any amino acid
MSESLDIIGKNLCEIESYAPRRIEKYKNKLDTAVDLLRKDGVDEQRISLEIILMIEKIDITEEITRLKAHISATKNLLENDSSIGKRLGFWLQEINREINTIGSKANDAEIVGVVVSMKDTAEQMREQSLNLL

SEQ ID NO: 72615 - DNA, 630 bp, Unknown
  Obtained from environmental sample
  misc_feature (1)..(630): n is a, c, g, or t
atggtaccgctttcaatggcgcaaacggcgtctaaaaacgccggtttaaagctgccggaaccggtcgatttttcagccgcaagctcgccggctatgcctattgcggtcatggcggcgacacatccttcaaaatgctccgacaccgcggcgaaagctccgcatacggacgatgccatgcagccgcttcccgatattttacccataagcggatctccgttagatataaccgcaacgcgcctgccgtcgcttacaatatcatcagcgccgcttataactaccacgcacgacgcggacaaagcgagattcttagccgtttcggcagggtctcccgaaagtctgccggaatcaaccccgcgtacaaacgcgtcgacgcctgcgagagttcctatctcgccggcattgccttttattacagatatactgagttccttaataagcatagctgccgtctgtgtccggtacggcgtggcgccggctcctaccggatcaagaattatgggtatgcctttctttgaagcggctttaccggcctcaagcatccctttgatctggatttcgtcaagggtgccgatattaagcacaagagcgtcggcaatggcaatcatatcttttacgtcttctacagcatga

SEQ ID NO: 72616 - protein, 209 aa, Unknown
  Obtained from environmental sample
  misc_feature (1)..(209): Xaa is any amino acid
MVPLSMAQTASKNAGLKLPEPVDFSAASSPAMPIAVMAATHPSKCSDTAAKAPHTDDAMQPLPDILPISGSPLDITATRLPSLTISSAPLITTTHDADKARFLAVSAGSPESLPESTPRTNASTPARVPISPALPFITDILSSLISIAAVCVRYGVAPAPTGSRIMGMPFFEAALPASSIPLIWISSRVPILSTRASAMAIISFTSSTA

SEQ ID NO: 72617 - DNA, 792 bp, Unknown
  Obtained from environmental sample
  misc_feature (1)..(792): n is a, c, g, or t
atggcggtgtttaccggagaccgtggtgtgaacgaactaaaactgaaaaattttcttggcgcatcggaacttgaattggccccggacgatgttgtcgaaaaggttacgggagctccggtcgggtttgccggccctgtaaacggccccgatatacggacggtttatgatgtttcggtcaaagacacaattaacgcggtaaccggcgctaataaaaaagatatacattattcgggagtcaatccggcgcgtgattttatagttaaaagcgaggcggacattacatccgctatggcaggcgatgcgtgcccgctttgcgcaaacccgatggacgaaaaaaaagggattgaggtggggcatatattcaaactcggctataaatatacaaaagccatgaatgtcggcgttttggacgaagccggcagaagcattactccgattatgggctgctatggaattggggtaaacaggacgcttgccgcggcagttgaacagcataatgacgggcgcggcataatatggcctgcggcaatttcgccgtttgatgttcacctcgtcggtcttgcaaaaacaaatgaagaaacctcgcttgtcgaggaggtatataatttcctgaatggaaaaggctatgatgtgctgtacgatgacagaaaggtaagccccggaatcaagttcgccgatgccgatcttttgggtatgccggcacggataaccgccgggaagacgtattttcaggacagagaaattgaattaaaaagnccgttcgaccggcgaaactgtaaaggtaaaacttaa

SEQ ID NO: 72618 - protein, 263 aa, Unknown
  Obtained from environmental sample
  DOMAIN (1)...(93): YbaK / prolyl-tRNA synthetases associated domain
  misc_feature (1)..(263): Xaa is any amino acid
MAVFTGDRGVNELKLKNFLGASELELAPDDVVEKVTGAPVGFAGPVNGPDIRTVYDVSVKDTINAVTGANKKDIHYSGVNPARDFIVKSEADITSAMAGDACPLCANPMDEKKGIEVGHIFKLGYKYTKAMNVGVLDEAGRSITPIMGCYGIGVNRTLAAAVEQHNDGRGIIWPAAISPFDVHLVGLAKTNEETSLVEEVYNFLNGKGYDVLYDDRKVSPGIKFADADLLGMPARITAGKTYFQDREIELKXPFDRRNCKGKT

SEQ ID NO: 72619 - DNA, 879 bp, Unknown
  Obtained from environmental sample
  misc_feature (1)..(879): n is a, c, g, or t
atgatcagatcggccgaggccgataattgggaagaacgggaaaaattaataatgtccagaaaaacattaccggaaaatattattggtatattcgacataccttatattgaagacggacatagaggacatttgttagacatttattatccggataatatggaagggccgtttcctgttataattgacatacatggcggcgggtttatttatgggcataaagaaatggataaattgtttaattaccatttagccaagaatggatttatagtatttaacctaaattacaggcttgtttatgacaacgcaaaagttcccgagcaaattaaagacgtaattagcgcattaaattggatagaaaatattctagattcatatcccgctgataaaaacaaaatatacctgataggcggatcagcaggagcttatttggcaactatggcggttcttatttcaaaaagtcagaggttacaaaatattttcaatataggaaaatcagatttaaaaattaatgcaatggcaataatcaacggttttatgcaatggacacgcaatgatataaaatattggggcatgagatcaatgattcttgaaaaaggttataaaaaacaggaatattatcaaaatttaattttaaagaacattcctgaaataagcagtttaccgccattatttataacaactaacgaagatgacgcgctggattttatgacattttatttcataaatatattgaaaaaaaataatgttgagcatgaattttattatttggaaaagaacanaacaagaaaattgagacatatgtttaacacatttcgtcctgaatgggaggaaagtataaatttaaataatgcaatgttgaaattcttattaaactactaa

SEQ ID NO: 72620 - protein, 292 aa, Unknown
  Obtained from environmental sample
  DOMAIN (60)...(255): alpha/beta hydrolase fold
  misc_feature (1)..(292): Xaa is any amino acid
MIRSAEADNWEEREKLIMSRKTLPENIIGIFDIPYIEDGHRGHLLDIYYPDNMEGPFPVIIDIHGGGFIYGHKEMDKLFNYHLAKNGFIVFNLNYRLVYDNAKVPEQIKDVISALNWIENILDSYPADKNKIYLIGGSAGAYLATMAVLISKSQRLQNIFNIGKSDLKINAMAIINGFMQWTRNDIKYWGMRSMILEKGYKKQEYYQNLILKNIPEISSLPPLFITTNEDDALDFMTFYFINILKKNNVEHEFYYLEKNXTRKLRHMFNTFRPEWEESINLNNAMLKFLLNY

SEQ ID NO: 72621 - DNA, 531 bp, Unknown
  Obtained from environmental sample
  misc_feature (1)..(531): n is a, c, g, or t
gtggacggggtgcaggccatcggagctgtgccggtacgtgcggcctatgccgacgcctactgtgcctccgtcttcaagtggctgctggccggattcgggcttggattccttgcgctgagcgagcccctggcgcgcgagctgcaaccggttctacgcgggtatggcaacgagccgcccagccgtgccctgcgctacgggcacatcaactaccccggcgtctatgcgcttcgtggctgcctcgagtacatgcgttccgtcggctgggaggacattcacgcccgggtcaatcgtcttgcacggtatgccatgcagtccttgcaggcgaggggctttgatgtgatcacaccgggagaggcccacgcaggcatcatctcggtccggcaccccctggcttcgatgctggtaagcgcgctggctgcacagtcaatcttcgtggaggatcgcggccctgtcgtacgcgtgtctcctcacttctacaacacggaagaggacatagaccggtgcgtgagcgcgctggcagacagggcttag

SEQ ID NO: 72622 - protein, 176 aa, Unknown
  Obtained from environmental sample
  misc_feature (1)..(176): Xaa is any amino acid
MDGVQAIGAVPVRAAYADAYCASVFKWLLAGFGLGFLALSEPLARELQPVLRGYGNEPPSRALRYGHINYPGVYALRGCLEYMRSVGWEDIHARVNRLARYAMQSLQARGFDVITPGEAHAGIISVRHPLASMLVSALAAQSIFVEDRGPVVRVSPHFYNTEEDIDRCVSALADRA

SEQ ID NO: 72623 - DNA, 381 bp, Unknown
  Obtained from environmental sample
  misc_feature (1)..(381): n is a, c, g, or t
gtggagggacgctggcggagggcttcggcatccagacgcacccngcgctttggaaccaagacggtcaacactggtctgctggtggaggcggagggcggcaccccggtcagggccgtggccgacggcgtggtggtgatggcggatgcctaccagagctacggtctgatggcgatactcgaccacggtagctcctactacagcatctacacatacatgcgctcgctggcagtgcggcgcggacaggcggtgagggcgggcgacacactgggccacgtcggcgacacccccgatggccccaggctcggcttcgagatcaggcaccagaccacccccgaagacccgcagaagtggctcgcgtccaagtacgtgacaaaaaaatag

SEQ ID NO: 72624 - protein, 126 aa, Unknown
  Obtained from environmental sample
  DOMAIN (21)...(114): Peptidase family M23
  misc_feature (1)..(126): Xaa is any amino acid
MEGRWRRASASRRTXRFGTKTVNTGLLVEAEGGTPVRAVADGVVVMADAYQSYGLMAILDHGSSYYSIYTYMRSLAVRRGQAVRAGDTLGHVGDTPDGPRLGFEIRHQTTPEDPQKWLASKYVTKK

SEQ ID NO: 72625 - DNA, 309 bp, Unknown
  Obtained from environmental sample
  misc_feature (1)..(309): n is a, c, g, or t
gtggttgtggtccctatgctgctcgtgccntacattcgccgcgtccacagcgaatttgccgtcaccgacattcgcgtgatactgaagacgggatttntgcgccaaacggcgctggacnttcagtggaagagcattggaggcatatccgttgaccaaacgctttttggcaggatgttcaactatgggacgataggcgtccttgggaattcggcgggccagaaattcccgatggttgctgatccgtttgccttcaaacgcgccgtcgaggagatgattcaaaagaatgtcaatagcaatgcaggcaagtag

SEQ ID NO: 72626 - protein, 102 aa, Unknown
  Obtained from environmental sample
  misc_feature (1)..(102): Xaa is any amino acid
MVVVPMLLVPYIRRVHSEFAVTDIRVILKTGFXRQTALDXQWKSIGGISVDQTLFGRMFNYGTIGVLGNSAGQKFPMVADPFAFKRAVEEMIQKNVNSNAGK

SEQ ID NO: 72627 - DNA, 882 bp, Unknown
  Obtained from environmental sample
  misc_feature (1)..(882): n is a, c, g, or t
gtgatagaacacgagaccgaggaagcattattcgccgaccggatactcntgatgaaaaacggagagatttacaaaatcggcccggctcaggacctgcttcgtgatattccggcctttaacgagtgcggccttatgccgctgcaagttccggccttttttttccaatacaagggtgaaaaacccgatattttgcccctgacacctcacgacgccaaggaagcattcgggcagcataacatcgttattcgtgaagaaaggcacgaggaactgcgccgccgggatacggagcgggaacattcctacggtgacgtgcttatcgatgtaaaggatttgagttacacataccccaatggcacggcggcgctgtttaataccagctttcagatacgtgaaggcgaatttctggccattgtggggcataacggttcgggcaagaccacgctggtaaaacacttcaacggccttttggaacccacaaacggttccgccatcgtttgcggtaaggatacccgttcccattccatatttgagcttggaagggatgtgggctttgtatttcaaaatccggaccatcagatattcagtgaaaatatttacgacgaggtagtattcagccccagactccggggagtgcccgaatcggaactcaaggaacgggtgacggaggcgcttcatgcggtggatctggacgggtatgagcaggaagatccctttaccctgtccaagggtatacgccagcgtatcgcggtggcgtcggtactgtcggcccgcccaagggtcatcatactggacgaaccaaccaccggtctggattacatggaacagcgtaaaatgatgggcctggtaaagcggctgaacgagaacggccatacggttatataa

SEQ ID NO: 72628 - protein, 293 aa, Unknown
  Obtained from environmental sample
  DOMAIN (132)...(289): ABC transporter
  misc_feature (1)..(293): Xaa is any amino acid
MIEHETEEALFADRILXMKNGEIYKIGPAQDLLRDIPAFNECGLMPLQVPAFFFQYKGEKPDILPLTPHDAKEAFGQHNIVIREERHEELRRRDTEREHSYGDVLIDVKDLSYTYPNGTAALFNTSFQIREGEFLAIVGHNGSGKTTLVKHFNGLLEPTNGSAIVCGKDTRSHSIFELGRDVGFVFQNPDHQIFSENIYDEVVFSPRLRGVPESELKERVTEALHAVDLDGYEQEDPFTLSKGIRQRIAVASVLSARPRVIILDEPTTGLDYMEQRKMMGLVKRLNENGHTVI

SEQ ID NO: 72629 - DNA, 597 bp, Unknown
  Obtained from environmental sample
  misc_feature (1)..(597): n is a, c, g, or t
ttgatggcgagcacaggggaatcaagccccgaataccgagacgcccacgccctgacgctcaaaaagagcaagcagcttctggacggcgtttctaggcaggatcgcgagaacatcgccgccatgtgcaagtacgctatctttttgacgcgggacgctaggagcacgccaaagatcaagcctggggccatttcgcttacggtgacgtcaccgccgttcctggacgtggtcagctacagagacgacaactggctgcggtgctggttctgcggtctagacgcagatgccattgggggaaaaataaccatctgccacaaaatagaggactggaacgaggccatgggcgatgtgctgaaagagctgtaccgcataacaaagccgtggggccacgttgcatttgaggtgggcgaggtaaaaaaagggacgataaacctagaagagaccattctcccgctggggctggccgcgggatttgacccaatggggataatgatcaacgagcagacctttacaaagacggcaaacatctggggcgttgacaacaacgccaaaggcaccaacagcaacaggatagtgctgttcaagaaaaggcccacgtaa

SEQ ID NO: 72630 - protein, 198 aa, Unknown
  Obtained from environmental sample
  misc_feature (1)..(198): Xaa is any amino acid
MMASTGESSPEYRDAHALTLKKSKQLLDGVSRQDRENIAAMCKYAIFLTRDARSTPKIKPGAISLTVTSPPFLDVVSYRDDNWLRCWFCGLDADAIGGKITICHKIEDWNEAMGDVLKELYRITKPWGHVAFEVGEVKKGTINLEETILPLGLAAGFDPMGIMINEQTFTKTANIWGVDNNAKGTNSNRIVLFKKRPT

SEQ ID NO: 72631 - DNA, 624 bp, Unknown
  Obtained from environmental sample
  misc_feature (1)..(624): n is a, c, g, or t
ttggnnnnncccagcgtacagaatcacgaagttntcctccataagcacggcaaactgacgaacgccaaaaagaacatcgacaagcacaagggggtctggtccttctgcctcggcagccaagaactgtacgactgggtggcggacaatcccggcctggcctcgtaccccatcaactacaccaactcgcccgagatcatggggcgcaacgacaacctggtgaccatcaactgctgcatcgaggccgacctgttcgcgcaggtgtcttcggaatcatccgcaacccggcagataagcggcacaggcggccaactcgactttgtgcacggcagctacatttccgaggggggaaagagtttcatctgcatggcttccaccttcacggacaaaaaaaccggagaactgcgctcgcgcatcgttcccgtcctgccccaaggggaaatcgtcacctcgccgcgcagccagctccaccagctcaccacggaatggggcagcgtcaatttggccggacgctccatgaaagcacgctgcgaacagatcatctccatcgcgcatcctgatttccgggatgatctgagccgggaagcggaaaaactcggccttctcgcgcgctcccggggaaaatga

SEQ ID NO: 72632 - protein, 207 aa, Unknown
  Obtained from environmental sample
  misc_feature (1)..(207): Xaa is any amino acid
MXXPSVQNHEVXLHKHGKLTNAKKNIDKHKGVWSFCLGSQELYDWVADNPGLASYPINYTNSPEIMGRNDNLVTINCCIEADLFAQVSSESSATRQISGTGGQLDFVHGSYISEGGKSFICMASTFTDKKTGELRSRIVPVLPQGEIVTSPRSQLHQLTTEWGSVNLAGRSMKARCEQIISIAHPDFRDDLSREAEKLGLLARSRGK

SEQ ID NO: 72633 - DNA, 882 bp, Unknown
  Obtained from environmental sample
  misc_feature (1)..(882): n is a, c, g, or t
atgaaaagggccatggtggaagatctattccgccgcatgctgcaaatggaatcatgggagtggctgcctgccccgccagacgccctccgcagccgcatccagttgcactgggatggcgaacacgtgggcttccaccaacgcaaaaaaaacgtcgtggtccctataaatgcctgccccgccgcagcgtcgaacatttctgagtcaataccgcgctttgaggaagccataacggccaagattctcccgacaaggccgcagagatgggaactggccaccggaacgccctcggcggacgtattcgccattgacgagcttcaaagaatttggctgctggagccggacgggtggaaaaaaagagagggcaaaatagtccaccgtttttcggggcgtacgatagcccataggccggggggattttttcaggtgtcagcaaaatgggcaatggaagcattccatcttctcctgaccaactggggcgtacatggcggcacactgtacgacatatacggaggcgttgggctattttcgatactgcttgaagaaaaattcgacaactgcgtcttggtggaatcggatggcgattctgtagccagcgcagtacaaaaccttgccgacgcaaacatatcgcaccaatgcatcgaaatggacgcggccaagtggatagtagggctgcaagagggattcggcacccccaacgatgtaatcctgctagaccccccaagagaagggctgccacccgaaatgatcggccctttccaaaaatcgaatgtgggggccattgtccttgttggatgcgacggtgccactttttgtanggacgtaaaacgattgagtccaccttggcaggcaaaaaaaattgccgccatagatcttttcccatga

SEQ ID NO: 72634 - protein, 293 aa, Unknown
  Obtained from environmental sample
  misc_feature (1)..(293): Xaa is any amino acid
MKRAMVEDLFRRMLQMESWEWLPAPPDALRSRIQLHWDGEHVGFHQRKKNVVVPINACPAAASNISESIPRFEEAITAKILPTRPQRWELATGTPSADVFAIDELQRIWLLEPDGWKKREGKIVHRFSGRTIAHRPGGFFQVSAKWAMEAFHLLLTNWGVHGGTLYDIYGGVGLFSILLEEKFDNCVLVESDGDSVASAVQNLADANISHQCIEMDAAKWIVGLQEGFGTPNDVILLDPPREGLPPEMIGPFQKSNVGAIVLVGCDGATFCXDVKRLSPPWQAKKIAAIDLFP

SEQ ID NO: 72635 - DNA, 681 bp, Unknown
  Obtained from environmental sample
  misc_feature (1)..(681): n is a, c, g, or t
gtggggcttggattgccgcagattgcctcgcggcttgccaagagcacgcacgcgcccgatatgaacatcatcatggaggtgggagttttcaaccccgagcctttgcccggagtcggtctcgccgatccgaggctgtggtaccgcagcgagtatttcacgggtcttgtcggaacgcttggagaaatgctccaaaaggggctcgtggacattgggttcctgggaagtcttcagatagaccgcttcggaaacctcaactcgacgcaggtgacggattctggtctcaagcacttcacgggaagcggcggagcggcggacatagcgtctcttgccaagcgcgttttcattataatgaagcatgaaaaacgcaaaatcatcgagaaggtggagtacctcacctccgtcggctgctataaaggcggcaaaagccgcgtggagaaggggctccgcccgattgacggcgtgacggttttcaccaacctgtgcgtgctcgaaacgggggcggagagcgggcagctcgaggtcaaatcgatccacccaggagtaacggtggaggtgctcaatgaaaacacgggctatgaactgagcattcccaaaaacgttccaatcacggacgagccaagcgcggaggagctcatgcttttgcgtgagcgcatagatccacgcgggatgtacataaagtga

SEQ ID NO: 72636 - protein, 226 aa, Unknown
  Obtained from environmental sample
  DOMAIN (2)...(189): Coenzyme A transferase
  misc_feature (1)..(226): Xaa is any amino acid
MGLGLPQIASRLAKSTHAPDMNIIMEVGVFNPEPLPGVGLADPRLWYRSEYFTGLVGTLGEMLQKGLVDIGFLGSLQIDRFGNLNSTQVTDSGLKHFTGSGGAADIASLAKRVFIIMKHEKRKIIEKVEYLTSVGCYKGGKSRVEKGLRPIDGVTVFTNLCVLETGAESGQLEVKSIHPGVTVEVLNENTGYELSIPKNVPITDEPSAEELMLLRERIDPRGMYIK

SEQ ID NO: 72637 - DNA, 669 bp, Unknown
  Obtained from environmental sample
  misc_feature (1)..(669): n is a, c, g, or t
atgctgccgttgtcgcattacaaaggcgcgcaagtttgctcggggcaggaaggagaagacatgatcctctcccgttttttcgagaagcggcaggacgccggtttctatgtggatgtcggcgctcatcatccaacgcgtttttcaaacacgtttctgttttatcaacggggctggcgcggcataaacattgagccgacgcccggcagcaagaaaatcttcgacgcaatccgaccggaagatataacgattgaatgcgcggccgggagagcggaaactcttttatttcacattcttaacgaaggcgctcttaacagattcactgccggacgggcagaggagatatgcaaaaccgccccgcagtatcacattgtcaaccgtatcctcattgaaaaaatcccccttgccgccatcctgactacgcaccttcccttggggcaacacatcgattttttgaatatagatgcggaagatgtcgatttagaggttgctgagtcgaatgactgggaaaagtatcgcccgaccatagttttgattgaaaatcacgaacacaaaggcgaagctggacgtactcccattcgagactttatggcggcacaggaataccgctttgccttccgcacggtaaacacggatttttatgtgaaccatcgtgagcatacaacaaactga

SEQ ID NO: 72638 - protein, 222 aa, Unknown
  Obtained from environmental sample
  misc_feature (1)..(222): Xaa is any amino acid
MLPLSHYKGAQVCSGQEGEDMILSRFFEKRQDAGFYVDVGAHHPTRFSNTFLFYQRGWRGINIEPTPGSKKIFDAIRPEDITIECAAGRAETLLFHILNEGALNRFTAGRAEEICKTAPQYHIVNRILIEKIPLAAILTTHLPLGQHIDFLNIDAEDVDLEVAESNDWEKYRPTIVLIENHEHKGEAGRTPIRDFMAAQEYRFAFRTVNTDFYVNHREHTTN

SEQ ID NO: 72639 - DNA, 615 bp, Unknown
  Obtained from environmental sample
  misc_feature (1)..(615): n is a, c, g, or t
atggccgagtgcggcggtttgcttgacgacgcggtgggcgacgtctaccaccttaaaagtgttatagacgcctgcggtctcgataggtactacgactttgtgttgatagacaacgcccccggccttgacaagctgcagatgtcggcggtcaacgcttgcggcgagatattcgtgccgacagagctgcgtcagttcgcggtagacggtttggtggagatggagcggacgcttttggagcgttgccctcgcggggggcggatcacgaggatcatcccgaacaattaccgaaacgtccgccgccacaacacgtttatagccgccttgaacaagatgttcgaggggcgggttacggatacccgcatattgaccgacaacgtgttcgacgaggtggcgacggaggggaagatactgtttttgcataggctgtactccaagggggcggcctgctacgtgaaactcgtgcacgagttgtttacgcgcgacgaggaggagatatgggaggcgcttatgagtaaacgcggcgagtatgtaagcgagcaggcgaaggagaggttccgcaaggggaagaagaacgcgggggcgggaaaggcgggtggtgatgatggtgatgaataa

SEQ ID NO: 72640 - protein, 204 aa, Unknown
  Obtained from environmental sample
  misc_feature (1)..(204): Xaa is any amino acid
MAECGGLLDDAVGDVYHLKSVIDACGLDRYYDFVLIDNAPGLDKLQMSAVNACGEIFVPTELRQFAVDGLVEMERTLLERCPRGGRITRIIPNNYRNVRRHNTFIAALNKMFEGRVTDTRILTDNVFDEVATEGKILFLHRLYSKGAACYVKLVHELFTRDEEEIWEALMSKRGEYVSEQAKERFRKGKKNAGAGKAGGDDGDE

SEQ ID NO: 72641 - DNA, 381 bp, Unknown
  Obtained from environmental sample
  misc_feature (1)..(381): n is a, c, g, or t
ttgatggccgaggcctatatcaatgtcatgaaaaacccctacattgatatcatcggacatccagacgacggtcggcttcccattgattacccccgcctggttgaggccgcaaaaaaatacaaggtagcacttgagctgaacaacagctccttaaaccccggtagttttcgctataattccaaggaaaatcagatgacctaccttaagctatgcaaagaataccaagttcccatcgctcttgccagcgatgcccattctctttttgacattgccaatttcacctatttagaatctgttttagatgaggcgcaatttccagaagaattgatactaaacacttccgtagataagctgaaaaagcatttggaccggaacaagtga

SEQ ID NO: 72642 - protein, 126 aa, Unknown
  Obtained from environmental sample
  misc_feature (1)..(126): Xaa is any amino acid
MMAEAYINVMKNPYIDIIGHPDDGRLPIDYPRLVEAAKKYKVALELNNSSLNPGSFRYNSKENQMTYLKLCKEYQVPIALASDAHSLFDIANFTYLESVLDEAQFPEELILNTSVDKLKKHLDRNK

SEQ ID NO: 72643 - DNA, 543 bp, Unknown
  Obtained from environmental sample
  misc_feature (1)..(543): n is a, c, g, or t
gtggttgaacgcggcagtcgccgcgtgctcgacgcgcagggcgcttcgccgttgccggatgcggtcaaggcccgtatcgacgccatcggtgccgtgctgcaatacgcaaggcccaccgtggacgagatcggcaatctggaagtcgcctatgcgccgcccttcgcctcggccatggacgttgtcaatgtcgcgggcaatgtggcggacaacgcgcttgccggacgcagtcatggcctgacggcgccggccttcatggacgcctggcaacggcgcaaggaaaacgggggctttttcgcggacatccgtccggcgggcggatcggcgcagcttgcggcggcctatcccggtgaatggcacgccattccgctggaagaaatggcgcaacgcgcgggcgaatttcccgcagatcgcccggtgttcctgatatgcaacaccggcctgcgcgcgtacgacgcccagcttatcctggcgcatcgcggcgtcgcgagcgtcaacgccttcggcgggatgcaggcggcgttgaagtccggcttgcagccgtga

SEQ ID NO: 72644 - protein, 180 aa, Unknown
  Obtained from environmental sample
  misc_feature (1)..(180): Xaa is any amino acid
MVERGSRRVLDAQGASPLPDAVKARIDAIGAVLQYARPTVDEIGNLEVAYAPPFASAMDVVNVAGNVADNALAGRSHGLTAPAFMDAWQRRKENGGFFADIRPAGGSAQLAAAYPGEWHAIPLEEMAQRAGEFPADRPVFLICNTGLRAYDAQLILAHRGVASVNAFGGMQAALKSGLQP

SEQ ID NO: 72645 - DNA, 819 bp, Unknown
  Obtained from environmental sample
  misc_feature (1)..(819): n is a, c, g, or t
gtgtggttttccagcgggtcaatcgaactttaccaggacattacccttcccgaaggactctatgccttcaagattgatctaaggccggacacgccgagcgcaacgtttgcgtacgcaacaatcaacgacgacaccgcgcagacacaagctgccggcagttggtctgcatgggggggaacatccgtcttattcaacgtgccggccggcggcgcgacggtacgtataggcgtaacatcaacaagggccttgatgcttgacaacgccaggctattcacgacggcggacggttacgccggagatacgcgggcaatccttaccgccgggccggcagtgactgttggcgcgtcggacatgtcagcccaggttcggtttaccggcgcggcgggggttaccgccctttccccggcggactttaccgccagcgcgggcgcttcgattatcaatacggcggtaagcggcggcacggttacggttactgtgacattccaggcaaactcctccgcaacagacgccaaggtctttaccgtcggcattaattccgccagcgccgtgatcaggggcggcgggacggtgacgatcacccaaaacccggtgccggtaaccaaaaacgtaaccggcacggttaaggaatcttacgacggagcggcgataagcggcgctacggtaacaataagcgggaacggcataacccccgtcactgcaaccactaacgcagagggcgaatatacccttgagaacgtgccaagcggcaccggttataccgttaccgcgaccatgacgggcttcgcgcccagaaccctcggccgatctgatcattga

SEQ ID NO: 72646 - protein, 272 aa, Unknown
  Obtained from environmental sample
  misc_feature (1)..(272): Xaa is any amino acid
MWFSSGSIELYQDITLPEGLYAFKIDLRPDTPSATFAYATINDDTAQTQAAGSWSAWGGTSVLFNVPAGGATVRIGVTSTRALMLDNARLFTTADGYAGDTRAILTAGPAVTVGASDMSAQVRFTGAAGVTALSPADFTASAGASIINTAVSGGTVTVTVTFQANSSATDAKVFTVGINSASAVIRGGGTVTITQNPVPVTKNVTGTVKESYDGAAISGATVTISGNGITPVTATTNAEGEYTLENVPSGTGYTVTATMTGFAPRTLGRSDH

SEQ ID NO: 72647 - DNA, 933 bp, Unknown
  Obtained from environmental sample
  misc_feature (1)..(933): n is a, c, g, or t
ttgcttttttatgggtcggaggcgtattgttccgtagccagtgtcagcaattctccgcaatgcactcccggccatgcccaatactgtatgctatccgacaacgtcggtaaaagccattgcactccgggtcatgccgactattgcgcctatggctctaatgggagcaccaacatctgcacggcaggcaacacagagtactgcacctatcatggagataatagtacctgcacagtcggccatgcggagtactgcgccttgcccggaaaagggagtgagagcatctgcacccccggccatgccgactactgtgcctatggctcgaatggaagcacaaacgtttgcacccccggaacgaccgagtattgtgcatatggctcaaacggaagtaccaatatctgcacggctggcaataccgagtactgcaactaccatggaaataacaatacctgcacggctggccatgcggagtattgcgccttgcccggcaagggaagtgaaaacatctgtacagccggaactctggatcgttgcaattacctaactgggaattcgggtacttgcgccactccgggtcataacgactactgtagtataaccggcaatggcggagctaatgtctgcacggttggcaagctagaatattgcgaataccatgcaggagcgaacgccgccaaatgttctcagacaggtacgacagagtggtgctccataaccggacgcacctgctctacagtcggaacgctggattattgcgaatatcagacgtcaaactccggtacttgtactattccgggacatagcgattactgcaatataaccggaaatggaagtgccaatgtctgcacggttggcaagctagaatattgcgaataccatgcaggagcgacgccgctcaatgttctcagacaggtacgacagagtggtgctccataa

SEQ ID NO: 72648 - protein, 310 aa, Unknown
  Obtained from environmental sample
  misc_feature (1)..(310): Xaa is any amino acid
MLFYGSEAYCSVASVSNSPQCTPGHAQYCMLSDNVGKSHCTPGHADYCAYGSNGSTNICTAGNTEYCTYHGDNSTCTVGHAEYCALPGKGSESICTPGHADYCAYGSNGSTNVCTPGTTEYCAYGSNGSTNICTAGNTEYCNYHGNNNTCTAGHAEYCALPGKGSENICTAGTLDRCNYLTGNSGTCATPGHNDYCSITGNGGANVCTVGKLEYCEYHAGANAAKCSQTGTTEWCSITGRTCSTVGTLDYCEYQTSNSGTCTIPGHSDYCNITGNGSANVCTVGKLEYCEYHAGATPLNVLRQVRQSGAP

SEQ ID NO: 72649 - DNA, 450 bp, Unknown
  Obtained from environmental sample
  misc_feature (1)..(450): n is a, c, g, or t
gtggtcgttgtagagagaaaggcctttgcttctgatgaatcttatagcgatgaatgttttttgcactgcgagaggcgcggcgtggatattgtttgcctctgcgggtttctaaaaaaactctccattcccgatagatggatagggaggatactgaacatccaccctgggccgctgcctcaattnggcggcgcgggcatgtacgggcattttgtgcatgaggcagtcttggcggcgggcgggcctactagcggcgcgacggtgcatctggctgacaacgaatacgaccacggcgaaatactggcgtttcagccagtccaggtgattaagggcgacacgccagaaacgctgcaaaagagagtgtacgaggctgagatgaggctgtacccaatggcactgcgggattatattgtcaatcattatcatgggggaaacgcgtcatgcaaaagttaa

SEQ ID NO: 72650 - protein, 149 aa, Unknown
  Obtained from environmental sample
  DOMAIN (2)...(132): Formyl transferase
  misc_feature (1)..(149): Xaa is any amino acid
MVVVERKAFASDESYSDECFLHCERRGVDIVCLCGFLKKLSIPDRWIGRILNIHPGPLPQXGGAGMYGHFVHEAVLAAGGPTSGATVHLADNEYDHGEILAFQPVQVIKGDTPETLQKRVYEAEMRLYPMALRDYIVNHYHGGNASCKS

SEQ ID NO: 72651 - DNA, 402 bp, Unknown
  Obtained from environmental sample
  misc_feature (1)..(402): n is a, c, g, or t
gtgatcgtatggatgacagattcctttgcctattttatcggcaggctgatcgggcggcatccgcttgggcttgcggcgagtccaaagaaaaccgttgagggaactctcgcgggtcttctctttgccattggcgccgcagcagggctgaagctgatctttccggaggcctacagcggctgggcatggatgtcgtcatggcctgtatttctcgttctggttttcatactgagcgttgttgatcagattggggatctcgccgagagtgtattcaaacgttcgctcgggacaaaggattcaggggcgcttgttcccgggcatggcggattgctggatgtctttgacgcccagcttctggtttcgcccctgatgctcgggcttgtgattctattgtccgggctgtaa

SEQ ID NO: 72652 - protein, 133 aa, Unknown
  Obtained from environmental sample
  DOMAIN (1)...(129): Cytidylyltransferase family
  misc_feature (1)..(133): Xaa is any amino acid
MIVWMTDSFAYFIGRLIGRHPLGLAASPKKTVEGTLAGLLFAIGAAAGLKLIFPEAYSGWAWMSSWPVFLVLVFILSVVDQIGDLAESVFKRSLGTKDSGALVPGHGGLLDVFDAQLLVSPLMLGLVILLSGL

SEQ ID NO: 72653 - DNA, 480 bp, Unknown
  Obtained from environmental sample
  misc_feature (1)..(480): n is a, c, g, or t
gtgatcgcccgattacaatttataaagccaggagaaaacgcatttactgcggctataccggaaaaatatcaacttaacgtcgttggagcaaaaataagccaaatataccggcggcttgatcctgaaaaacctgcctataccattactggttcaggcggggggggaactcatgtatatcattgggaagaagatcgtgccttgacaaaccgagaacgggcacggcttcaaaccttccctgatgattttgaatttgacggctcaaaagaaagcgtccgcaagcagataggaatggccgttcccgttgacggtattcgagttatttttgaagcgattttaaattcttttgcgggtattgattatcctgctgacaattattcttttgatcccctgctgcatgaaaaccatattgatcagttcaatgaagaaagccctgaaacgctttacatttttgatcaggaaccggagtacatgactgtatga

SEQ ID NO: 72654 - protein, 159 aa, Unknown
  Obtained from environmental sample
  misc_feature (1)..(159): Xaa is any amino acid
MIARLQFIKPGENAFTAAIPEKYQLNVVGAKISQIYRRLDPEKPAYTITGSGGGGTHVYHWEEDRALTNRERARLQTFPDDFEFDGSKESVRKQIGMAVPVDGIRVIFEAILNSFAGIDYPADNYSFDPLLHENHIDQFNEESPETLYIFDQEPEYMTV

SEQ ID NO: 72655 - DNA, 405 bp, Unknown
  Obtained from environmental sample
  misc_feature (1)..(405): n is a, c, g, or t
atgatctatactgatttatatatgcagactttaattcagccttgtacagaaggagctgaccacttaaaaattatttctggttatgcaacttccgcaatgacttttcatcatttggaagatttgcgtgaaaaaggattaaatgctcatatttcgcttcttttaggcatgtgtccatctgacggtttatctgtaagcaaccacagagggtttcaaaatatactcaattcaagtatgcacaaagatctcttttcgtgcagttatatttataaagctccttctgttcatgccaagttgtatgcttggttcaaaaataataaattatataaaacttttattggttcggcaaattatactcaaaatgctttttatcatncacgtgagattttggcagaaattatgatttaa

SEQ ID NO: 72656 - protein, 134 aa, Unknown
  Obtained from environmental sample
  misc_feature (1)..(134): Xaa is any amino acid
MIYTDLYMQTLIQPCTEGADHLKIISGYATSAMTFHHLEDLREKGLNAHISLLLGMCPSDGLSVSNHRGFQNILNSSMHKDLFSCSYIYKAPSVHAKLYAWFKNNKLYKTFIGSANYTQNAFYHXREILAEIMI

SEQ ID NO: 72657 - DNA, 924 bp, Unknown
  Obtained from environmental sample
  misc_feature (1)..(924): n is a, c, g, or t
gtgcagattacagaaaacatccccggaaagtacttgacgccgacagaggaaggggcgatctacaacnagatgtcggaaaagatggggcgcacgcaggaggagatcgcggaacgggtggggaagagcgtaaagcatgtgtcgagatatctaaagctattgaatttgccggacgagatacgcggccagattgacaccggcgagttatcattggccaaggcgaatgtgctgctgtcgctgacaaaaatcaacattgatgtgcttttggacaaatacgattacatgctgcgcagcaactggaccgccaagcagttcgaagacggtatcaagcgagaatttatgcgcgagcttggcgatagtatagggtttgataccaagaaggcatacacggtagagcgcgaatatgacgatactttccccaaaggatcaaaattacagccatgcacggcctgtccgcaccgcgggcagttggaactatttgaggagtatgtaacggatcgtagctgcccgagcgccgagtgtttcgacgcgaaggaagcggcggcggagtacgataaaggagaaaaggagagaagagaggaagaggagaggaagaggttggccggagagaaagtggaagagacgcctaaggagcgcaaggaacgggagaagcgcgaagagcatcaaaagaagtgggccgccgaggtggcagcggcgaaggcgaagagagcggcggaaaataaagctgatgccgaaaaggccttagcggcggccgaaccgtggattgtccgcaagcttgaggcagggtttgtcggcaaggacgtgatggttatcgaagacgccgaaacgctagatggcggcgacgaatacgcgtcggccgcgctggacgaattatacatgaagtatatcggtaaacatacggacgacctctcggccgatctgtcttga

SEQ ID NO: 72658 - protein, 307 aa, Unknown
  Obtained from environmental sample
  misc_feature (1)..(307): Xaa is any amino acid
MQITENIPGKYLTPTEEGAIYNXMSEKMGRTQEEIAERVGKSVKHVSRYLKLLNLPDEIRGQIDTGELSLAKANVLLSLTKINIDVLLDKYDYMLRSNWTAKQFEDGIKREFMRELGDSIGFDTKKAYTVEREYDDTFPKGSKLQPCTACPHRGQLELFEEYVTDRSCPSAECFDAKEAAAEYDKGEKERREEEERKRLAGEKVEETPKERKEREKREEHQKKWAAEVAAAKAKRAAENKADAEKALAAAEPWIVRKLEAGFVGKDVMVIEDAETLDGGDEYASAALDELYMKYIGKHTDDLSADLS

SEQ ID NO: 72659 - DNA, 798 bp, Unknown
  Obtained from environmental sample
  misc_feature (1)..(798): n is a, c, g, or t
ttgaatgatgttaaatactctgaatttatatctacgtttaaactaatttacacgaattttaactttgataatattaaagaaaacaatatgtttatacttattgataaaaatgttataaaaatgaacattgaaaatctgaaatttattcgtaataaatattcttttaaaataatttgtcattatataattagtaatatagatgaatatataaaaataattgaaactcaaaaagatttattaaaaactgatgaattagaatatattatttcttcaaatgaaaatgtttcagaagacaatcagataaaactattaaatttgacaaatagcgcattaacaattataagcaaatcatattctgaaaaaattaaactctatattttatcacataatttttctgaaaatgattatgaggtattaataaaaaattatgataataattctgaagaaattaaaaaagccattgttaatttatttattggcagagttgaaaaaacaatagaatcaaagtatccaatttcaaaaaacctctttgatgatttagcaaatgtcaaaatgttggaggaagaaaaaataaaatttattctcgcccttacactacctaatatggatgaatctgattgtgttaaatatttaactaaatatggacttaaacaattcgttgatatttatgataaaaacaaaaaaccacaatttgataatactgtgctaaataaatttattcttgatttatttattttattgaataacatcagtgaatataatgttggggaaaatggtaaaatatttattacacattaa

SEQ ID NO: 72660 - protein, 265 aa, Unknown
  Obtained from environmental sample
  misc_feature (1)..(265): Xaa is any amino acid
MNDVKYSEFISTFKLIYTNFNFDNIKENNMFILIDKNVIKMNIENLKFIRNKYSFKIICHYIISNIDEYIKIIETQKDLLKTDELEYIISSNENVSEDNQIKLLNLTNSALTIISKSYSEKIKLYILSHNFSENDYEVLIKNYDNNSEEIKKAIVNLFIGRVEKTIESKYPISKNLFDDLANVKMLEEEKIKFILALTLPNMDESDCVKYLTKYGLKQFVDIYDKNKKPQFDNTVLNKFILDLFILLNNISEYNVGENGKIFITH

SEQ ID NO: 72661 - DNA, 633 bp, Unknown
  Obtained from environmental sample
  misc_feature (1)..(633): n is a, c, g, or t
ttggccgacacggtgaacaaccttttttgggaaacctttctcgcgaatatgcggcttttccccggcgcgcgggagcttttgtccgccctccgcgttccgggctgcggcatctgccttgttacagatatgccggtggagattcagtaccgcaagatcgcgcgcctgggtatagccgaccttattgacgcgattgttacgagcgaggaggccggaagggagaagccgcacccctgggttttcgcgcttgcgctgcgcaagctcggcgtttcggctgatcgcgtttgcatggtcggcgatgatcataaggacatcgagggcgcgctcctcgcggggatggatgcgtactggctgataggacgggagcgccacacgcagcaaaatacggcgttgacggctgaaaacgccgacatcgctcacatcgttggcgcagacagcgttaacggcgcagtcagtacaggagcttcgcaaaacgcggggcgccacggaatgcccctggaaggtttgcataccaagggcgcggacagccagacagagcaggggctgtggcggcgcttgagcgcgaacgggctccggcttacggtagtgcgcgatctctttgagctgcgcgatcagcttttaactgttacggagtag

SEQ ID NO: 72662 - protein, 210 aa, Unknown
  Obtained from environmental sample
  misc_feature (1)..(210): Xaa is any amino acid
MADTVNNLFWETFLANMRLFPGARELLSALRVPGCGICLVTDMPVEIQYRKIARLGIADLIDAIVTSEEAGREKPHPWVFALALRKLGVSADRVCMVGDDHKDIEGALLAGMDAYWLIGRERHTQQNTALTAENADIAHIVGADSVNGAVSTGASQNAGRHGMPLEGLHTKGADSQTEQGLWRRLSANGLRLTVVRDLFELRDQLLTVTE

SEQ ID NO: 72663 - DNA, 819 bp, Unknown
  Obtained from environmental sample
  misc_feature (1)..(819): n is a, c, g, or t
gtggatgatcttccgattatcccggatcccttcaggcataaaccggcggaaagaacggcgcagcagcttgacgtcataaaaaaactgctttctaaagcgtatgaaaaatatattatcgccaccgacgccgggcgcgagggagaactcatcgcccggcttacgctgcagtactgcgggattaccaatttttcttcagtattccggttctggacttccagcgcccttaccaaagaagttatcctggacagcctttccaaactgaagccatcgtatgagtacgacggcctgtaccgggcggggctgtacagacagcttgccgactggctggtcggcatcaatttttcccggtttttttccgtaaaactcggtaaaaaatttatcttcggccgcgttcaaacgcccgtcctgaacatgatcgtttcacgggaacgggacatcgcggctttcgtaaaatcgtttttttaccggcttgaagtaccgtcgtccgcgggcggctccgtgtttacgtcgtacctggtcaattccgatggggaacgggactacgatgacaagacgaccctggaaaacgccgtaagttccgtgtccggaacgtccacggttaccgacgtttccagggaaacgaaaacggtctatccgccaaggctccttgaccttaccgaactccagaaaaaagccaatacgaaacacggttatacggccgcaaagacgctggaactggcccaggcgctctacgaaaaacaccattgtctttcgtatccccgtacccgcttccgggtacatgaggccgcgccaatacgatctgtttgtgcaatgccctga

SEQ ID NO: 72664 - protein, 272 aa, Unknown
  Obtained from environmental sample
  misc_feature (1)..(272): Xaa is any amino acid
MDDLPIIPDPFRHKPAERTAQQLDVIKKLLSKAYEKYIIATDAGREGELIARLTLQYCGITNFSSVFRFWTSSALTKEVILDSLSKLKPSYEYDGLYRAGLYRQLADWLVGINFSRFFSVKLGKKFIFGRVQTPVLNMIVSRERDIAAFVKSFFYRLEVPSSAGGSVFTSYLVNSDGERDYDDKTTLENAVSSVSGTSTVTDVSRETKTVYPPRLLDLTELQKKANTKHGYTAAKTLELAQALYEKHHCLSYPRTRFRVHEAAPIRSVCAMP

SEQ ID NO: 72665 - DNA, 870 bp, Unknown
  Obtained from environmental sample
  misc_feature (1)..(870): n is a, c, g, or t
atgggaattgcctttgtgatccttacgttcatcgcgtccagactcagggcgacggaagtaaaaacagtgcccgagtattttcgccggaagtacggcaaagccgccggcattttcacttcggttacaatgttcctcccattgatagggcttacggcagggcaattcatggcttccgccgttatcacctcggtaatgctgggtatcggttacaaaaccgcgctgattattgtagccattgtggtaactacatacgcggtgatgggaggaatgtggagcgtcgccattaccgactttgtgcaggtgggcctcattgttcttgggatgttaatcgccgtgccctttgcccttaatttcgccggaggctggacaaatgtaaaggccaatgttccccctgaaatttttgatttattcagcggcataggagggccaaaggctattttagcccttattgttatgtacacggcgaccttcaccgtcggacaggaagccgtagcccgctactactcggcgcgtgacggcaaggcggcaaaacagggttctatactggcggccattgtcaacggtatatacgcattcatccccaccattcttggcattatcaccctggccctggtcaatatgggaagcatctccaaggaagtattgctggaacggggagcgcgttattccctgccggtattggcgactcatgttatgccggctgtaatcgtaggctttctcttctcgggaatcatttccgctaccatgtccagcgcggactccgaccttttgggagccggatctatttttggtaatgatatttttcaacagaacatcaagaaagaccccagccgacaaacagtcatgccagtgacccaaattgcctgttaa

SEQ ID NO: 72666 - protein, 289 aa, Unknown
  Obtained from environmental sample
  DOMAIN (1)...(288): Sodium:solute symporter family
  misc_feature (1)..(289): Xaa is any amino acid
MGIAFVILTFIASRLRATEVKTVPEYFRRKYGKAAGIFTSVTMFLPLIGLTAGQFMASAVITSVMLGIGYKTALIIVAIVVTTYAVMGGMWSVAITDFVQVGLIVLGMLIAVPFALNFAGGWTNVKANVPPEIFDLFSGIGGPKAILALIVMYTATFTVGQEAVARYYSARDGKAAKQGSILAAIVNGIYAFIPTILGIITLALVNMGSISKEVLLERGARYSLPVLATHVMPAVIVGFLFSGIISATMSSADSDLLGAGSIFGNDIFQQNIKKDPSRQTVMPVTQIAC

SEQ ID NO: 72667 - DNA, 885 bp, Unknown
  Obtained from environmental sample
  misc_feature (1)..(885): n is a, c, g, or t
gtggaagttgttggtcccgaaatggacgttccggcaggcgatattggcgttgccggacgcgaaataggttttctgtatggaatgtacaaaaaactgaccggacagcataatggcgtaataacaggcaaaggtatcaactggggtggcagcctcatacgtcccgaagcaacaggctttggagttgtgtattttgtaaacgagatgctctcaactattggcgaaagcgttaaaggaaaagacatagccatttcagggtttggaaatgtggcgtggggcgtagcgctgaaagcaactgaattaggcgctaaagtaattacaatatcaggtcccgacgggtatatatatgacaaaaacggtgtgcagggcgaaaaaattgaatatatggtacaactacgctccagcaacaacgatattgtaagtccttacgcgcaggaatttcccgaagcggttttctttgcaggacaacgtccatggggagtgaaatgtgatatagctattccatgcgctacacaaaacgaacttaacgcagaagacgctcaaacgcttatcaaaaatggctgcttctgtgtatgcgaggcggcaaatatgccctgcacggcgcaggcagttgaactatttcagtcgaacaaaataatgtttgcacccggaaaagctgcaaatgcaggcggagtagccacatcggggctcgaaatgagccaaaatgcaatgaaacttaactgggcgagcgaggaagttgatatgcgtctgcaccagataatgaaaaatatacatgctgcgtgcctgagatatggaaaaacaaacgattatattgattacgtaaaaggcgcaaatatagcaggcttccttaaagtagcaaatgcaatgctcgaacttggtgttgtataa

SEQ ID NO: 72668 - protein, 294 aa, Unknown
  Obtained from environmental sample
  DOMAIN (48)...(292): Glutamate/Leucine/Phenylalanine/Valine dehydrogenase
  misc_feature (1)..(294): Xaa is any amino acid
MEVVGPEMDVPAGDIGVAGREIGFLYGMYKKLTGQHNGVITGKGINWGGSLIRPEATGFGVVYFVNEMLSTIGESVKGKDIAISGFGNVAWGVALKATELGAKVITISGPDGYIYDKNGVQGEKIEYMVQLRSSNNDIVSPYAQEFPEAVFFAGQRPWGVKCDIAIPCATQNELNAEDAQTLIKNGCFCVCEAANMPCTAQAVELFQSNKIMFAPGKAANAGGVATSGLEMSQNAMKLNWASEEVDMRLHQIMKNIHAACLRYGKTNDYIDYVKGANIAGFLKVANAMLELGVV

SEQ ID NO: 72669 - DNA, 348 bp, Unknown
  Obtained from environmental sample
  misc_feature (1)..(348): n is a, c, g, or t
ttgaacaacggagcccagcctaccgaaacatgtaaaaatatcctttcacacgaaggagttctgttgaaaaagcatttactcggaggagtaaagaagaatgctttttcggaagccgaagccgaaaatcgtttcgacaaatggaaaaaagaaaaacaatccaaaatcgaaacgcttaaaaacgaggtaaccaaacggaaaaacgaaacatcccgcaagcgcagagacgaagaagtgaaggtcaaagaagcgattgcaaagaaagtgtcggaaaaactggctgccgccaaaattgctgccgccaaggcagaggctgtcagtgaagagcctgccgaacaaccggctgaatag

SEQ ID NO: 72670 - protein, 115 aa, Unknown
  Obtained from environmental sample
  misc_feature (1)..(115): Xaa is any amino acid
MNNGAQPTETCKNILSHEGVLLKKHLLGGVKKNAFSEAEAENRFDKWKKEKQSKIETLKNEVTKRKNETSRKRRDEEVKVKEAIAKKVSEKLAAAKIAAAKAEAVSEEPAEQPAE

SEQ ID NO: 72671 - DNA, 399 bp, Unknown
  Obtained from environmental sample
  misc_feature (1)..(399): n is a, c, g, or t
ttgaaggccgtgaaactgcttcttgatacgcatatgctgctctgggccgccgccgggaccttgccgaaaaaggctgaaaaaattgtggtcagcctcgataacacgctgtatttcagcccggccagcatctgggaaataggaatcaaaaaaagtctcggccgaagtgatttcatagtggagccggaagttttaaggcgcggccttttggacaatcattatcacgacctgcccatcaccagcctgcatgccctggccattaatgagctgcccctgatccacaaagacccttttgacagaatactattggcccaggccaaggccgaaggcatatcgctattgacctcggaccgggctctccaagaatatccggggccggttatattcattccggcggcctga

SEQ ID NO: 72672 - protein, 132 aa, Unknown
  Obtained from environmental sample
  DOMAIN (6)...(131): PIN domain
  misc_feature (1)..(132): Xaa is any amino acid
MKAVKLLLDTHMLLWAAAGTLPKKAEKIVVSLDNTLYFSPASIWEIGIKKSLGRSDFIVEPEVLRRGLLDNHYHDLPITSLHALAINELPLIHKDPFDRILLAQAKAEGISLLTSDRALQEYPGPVIFIPAA

SEQ ID NO: 72673 - DNA, 504 bp, Unknown
  Obtained from environmental sample
  misc_feature (1)..(504): n is a, c, g, or t
ttgggcctcaccgccgtggcctatacctacaacgagcccaccctggccgccgaatacatcctggaagcggcccccctcctctcgaatgagggcgtggccacggtgctggtgaccaacggcctgatgagtccggaggttctggccgacctgggcccccacctggccgcggccaacgtggacctcaaaactttcaaccccgagacctaccgccgcctgggcggctccctcccggcggtccaggccgcgataaccggccttctggagcgcggcgtccatgtggaactgaccaccctggtggtgccgggcctgagcgacgacccggatgaattcgccgccctggtggactgggtggccggcctggataggaacctgcccctccacctgtcccgctactttcccgcccacctctaccgggccccggccacggaaccggctctcctgcgccgcttccgtaaccaagccctcgggcggttgacccgggtgatcctgggcaacctcccttag

SEQ ID NO: 72674 - protein, 167 aa, Unknown
  Obtained from environmental sample
  misc_feature (1)..(167): Xaa is any amino acid
MGLTAVAYTYNEPTLAAEYILEAAPLLSNEGVATVLVTNGLMSPEVLADLGPHLAAANVDLKTFNPETYRRLGGSLPAVQAAITGLLERGVHVELTTLVVPGLSDDPDEFAALVDWVAGLDRNLPLHLSRYFPAHLYRAPATEPALLRRFRNQALGRLTRVILGNLP

SEQ ID NO: 72675 - DNA, 810 bp, Unknown
  Obtained from environmental sample
  misc_feature (1)..(810): n is a, c, g, or t
gtggccgagatagccggctgccgggaggccagcggcttcgacgtgcgggccttctgcgccgggccggtctcggctcttataagcgcggcggccttggtcgcctccggcgtccaccggaacatagccgtggtggccggcggggccgtgcccaagctctacatgaacgcccgcgaccacgtcaaaaagggcctgccggccctggaaaactgcctgggggccatggccgtgctcctgggcccggaggacggggaaaaccccgtgatccgcctggattccataggcaagcacagcgtcggggccggggcctcgccccaggccgtcaccacggccctggcctgggagcccttggaacggctgggacttaagctgaccgacgtggacaaatacgccccggaactgcacaacccggaagtgaccctgccggccggggccggcaacgtgcccgaagccaactacaagatgatcgccgccctgggggtgatgaagaaacagttggagcggggcgatattgaggcttttgtccgcgaacgcggcctggtcggcttcgcccccacccagggccacattccctcgggtgtgccctacatgggccacgccgccctggccatgaaacggggcggcttgaaacgggtgatgatcatcggcaagggcagccttttcctgggccgcctgaccaacttggccgatggggcctcctttctcctggagatgaggccgaactcggccgaaagcccggccgtcacggtcagggacgtggaggaagtggtgctggacgccctgggccgattggccgaggccctctccaagtga

SEQ ID NO: 72676 - protein, 269 aa, Unknown
  Obtained from environmental sample
  DOMAIN (13)...(96): 3-Oxoacyl-[acyl-carrier-protein (ACP)] synthase III
  misc_feature (1)..(269): Xaa is any amino acid
MAEIAGCREASGFDVRAFCAGPVSALISAAALVASGVHRNIAVVAGGAVPKLYMNARDHVKKGLPALENCLGAMAVLLGPEDGENPVIRLDSIGKHSVGAGASPQAVTTALAWEPLERLGLKLTDVDKYAPELHNPEVTLPAGAGNVPEANYKMIAALGVMKKQLERGDIEAFVRERGLVGFAPTQGHIPSGVPYMGHAALAMKRGGLKRVMIIGKGSLFLGRLTNLADGASFLLEMRPNSAESPAVTVRDVEEVVLDALGRLAEALSK

SEQ ID NO: 72677 - DNA, 372 bp, Unknown
  Obtained from environmental sample
  misc_feature (1)..(372): n is a, c, g, or t
atgataataaccatatcgcatttgggttacatcaaacgcacgccgctgtccgatttcaagacacaaaccagaggcggcgtaggctctaaaggtagcgcaacacgccgcgatgaagacttcctcgaacaccttttccatgcttcgatgcacaacaccctactgctgtttaccgaanaaggacgctgtttctgggtaaaagtatatgatttgcccgaangtatcagaacatcgcaggnacgtgctattcagagcatcatncatattgacggcgaccaccaggtgaaagcatatatcaacgtggaaacacttaccgacccccgatacttaaaaaaatcattatattgttatgtgttccccccaacggaatattga

SEQ ID NO: 72678 - protein, 123 aa, Unknown
  Obtained from environmental sample
  DOMAIN (1)...(49): DNA gyrase C-terminal domain, beta-propeller
  misc_feature (1)..(123): Xaa is any amino acid
MIITISHLGYIKRTPLSDFKTQTRGGVGSKGSATRRDEDFLEHLFHASMHNTLLLFTEXGRCFWVKVYDLPEXIRTSQXRAIQSIXHIDGDHQVKAYINVETLTDPRYLKKSLYCYVFPPTEY

SEQ ID NO: 72679 - DNA, 312 bp, Unknown
  Obtained from environmental sample
  misc_feature (1)..(312): n is a, c, g, or t
atgagtatgcaaacacttcaaatctcgtgggattcataccctgcacaaaatacttctatcaaagatattgacttaagaaaggtccgtaattttataaaagaggttaatgaaaaaggtagattccatttatcgggaaaaccggaagaagatttaaagaaacttaaattgataaacaacaggaaaatttctaatgcagctctattgctttttgcaaaaaaagacgttatttacaatgttcatttaggcagatttaaaacatcatctacaattattgatgaccgtatgttacgtttacctttattgaagttatga

SEQ ID NO: 72680 - protein, 103 aa, Unknown
  Obtained from environmental sample
  misc_feature (1)..(103): Xaa is any amino acid
MSMQTLQISWDSYPAQNTSIKDIDLRKVRNFIKEVNEKGRFHLSGKPEEDLKKLKLINNRKISNAALLLFAKKDVIYNVHLGRFKTSSTIIDDRMLRLPLLKL

SEQ ID NO: 72681 - DNA, 489 bp, Unknown
  Obtained from environmental sample
  misc_feature (1)..(489): n is a, c, g, or t
ttgaaagcggaaaagacccacggaacagaatttgcggttatctggtatgcggttatcgctctgttacgctgtgtgtcttcatctcctgatgccgcaaaacgggcattagagacacgcctaagaggattaaaccctgaaaatgggaaagaagaagtttccttcattgatgatgaacgctccgatgaacgtattttggacggaattggcgatgaccttttaataaatgatcaagagcctgccgcgcttttagaaaaaaattctcttttggaaaatctcattaaagaaacagaaaacttaaaaggcataaaaaacgatcctaaactcgccttgttggtaaaggaaattgacgtcctcttaaatgatcagctccattttaaaccggttattttctgccgctatgtcgctaccgcccattatgtcgcaaatgaattgagaaagtattacaaagatcacgaccacgtaaaaattgcctgtatatccgcgagatag

SEQ ID NO: 72682 - protein, 162 aa, Unknown
  Obtained from environmental sample
  misc_feature (1)..(162): Xaa is any amino acid
MKAEKTHGTEFAVIWYAVIALLRCVSSSPDAAKRALETRLRGLNPENGKEEVSFIDDERSDERILDGIGDDLLINDQEPAALLEKNSLLENLIKETENLKGIKNDPKLALLVKEIDVLLNDQLHFKPVIFCRYVATAHYVANELRKYYKDHDHVKIACISAR

SEQ ID NO: 72683 - DNA, 420 bp, Unknown
  Obtained from environmental sample
  misc_feature (1)..(420): n is a, c, g, or t
atgatgatgcccgttatgtattttgaaaaaggattttgcaattttgactgcaccgtatgcgccaatgtgtgcccgaatgatgcattgacttcgctgacgatggggcaaaaacaccgtttgcaggttggaagggttgtttttgagccggagctttgcgttgtgcatacagaagggacaaattgcggcgcgtgttccgagcactgccccactcaagccgtaaaaatgattccttacaaagacggtttaactgtaccttacgtagatgcggatttatgcgtaggttgcggaggctgcgagtttatatgccctgttcgcccacaaagagctatatacgtggagggcaacgaaattcatcaacaagcaaaagcttttgagattgagaagaaagaggaaaaagaaatcacagattttggtttttaa

SEQ ID NO: 72684 - protein, 139 aa, Unknown
  Obtained from environmental sample
  DOMAIN (45)...(74): 4Fe-4S binding domain
  misc_feature (1)..(139): Xaa is any amino acid
MMMPVMYFEKGFCNFDCTVCANVCPNDALTSLTMGQKHRLQVGRVVFEPELCVVHTEGTNCGACSEHCPTQAVKMIPYKDGLTVPYVDADLCVGCGGCEFICPVRPQRAIYVEGNEIHQQAKAFEIEKKEEKEITDFGF

SEQ ID NO: 72685 - DNA, 435 bp, Unknown
  Obtained from environmental sample
  misc_feature (1)..(435): n is a, c, g, or t
atgatttcctttcttcatgtttcaaaaacttactcaggcggtatcaccgcgctttcaaatgtgaatttgaagataagcaaaggcgaattcgtatttttaaccggagcgagcggggctggcaaaacaacgcttttaaagatggtctatatggatgaatttccagacaaagagagcaaagggcaggttttggtggattttggggatgagcactttgacagcaaaaaaatatcacttagaaaagtgcaatctctgaggcgaaaaataggaatagttttccaagattttaaactgctctcagacagaaccgtttttgaaaatgtagccatatcacttttagtctccaccagatattcgcaagcggaaataaaaaaacgggtttttgaaactcttggctatgttggaattgcgcataaaaaaaactccttgccccgctga

SEQ ID NO: 72686 - protein, 144 aa, Unknown
  Obtained from environmental sample
  DOMAIN (28)...(144): ABC transporter
  misc_feature (1)..(144): Xaa is any amino acid
MISFLHVSKTYSGGITALSNVNLKISKGEFVFLTGASGAGKTTLLKMVYMDEFPDKESKGQVLVDFGDEHFDSKKISLRKVQSLRRKIGIVFQDFKLLSDRTVFENVAISLLVSTRYSQAEIKKRVFETLGYVGIAHKKNSLPR

SEQ ID NO: 72687 - DNA, 486 bp, Unknown
  Obtained from environmental sample
  misc_feature (1)..(486): n is a, c, g, or t
ttgtcggcggcaatcgcccgggcgtcttccagggcctcttcaagggcgtcgtataccgctgccggcacccagtcggcggttttcgggacgtcgcttccgtcggcggacttcgccacttttttcagttcctcttcagcctcggcgcgcagcgcgatcagggctcccttttcggctatgcttaatccgtccttcgggtcccaggcgtccagcgcgtcttccagggctttaatggccgcggctaccgccttcttggtggcgtccgggtcgtctttcagcgcttccgcagcttcctgggcggcttccagagcctcgtatacggacttgggaacccactttttagaggtgtgccagtcggagccgttgccgtcattgccgtcttcgtcttcgctgtatccgtcaacactcgcgaacgcggctaccgccagcccaagctgggttttccaggcctgtcttggtcgggggttgaccctaactgctttgccgtaa

SEQ ID NO: 72688 - protein, 161 aa, Unknown
  Obtained from environmental sample
  misc_feature (1)..(161): Xaa is any amino acid
MSAAIARASSRASSRASYTAAGTQSAVFGTSLPSADFATFFSSSSASARSAIRAPFSAMLNPSFGSQASSASSRALMAAATAFLVASGSSFSASAASWAASRASYTDLGTHFLEVCQSEPLPSLPSSSSLYPSTLANAATASPSWVFQACLGRGLTLTALP

SEQ ID NO: 72689 - DNA, 849 bp, Unknown
  Obtained from environmental sample
  misc_feature (1)..(849): n is a, c, g, or t
atgtgcgatgaaattaaagaatggttgtctaagtcaggcaacagacggctattactgttgatcgacgaatctgacaacatcctttccgtatntgctgaaaacagctacgcggcgttaaacgactttaagcagctcggcaaggaaaccaacaaacggtttaaaattgtttttgccggtttgcacaacgttgttccggcggcgaaagacgcgggtaagattttcgaatacttcgggaaaccgatttgcatacgtccgttgtctcactctgacgcgtataaactgcttgcccgcccgctgaggtatctcggatttaacaccgattcggacacgttgctgcctttgcttgtgagtactaatttttatccgggcgtggtgcattttgtcgggacggaatttgtgaagatgcttatccaccgctattcaaatcactataacgagtccgccaacccgccatatcagttagatgatcggcaaattggctcggtaatgcactccgtcaacctatctgaaatgattgaggaacgcataaagttgacgcttgaggtggacatacgatactttatgcttgccggatgtatcgcggcgctctattatgacgacgcgaggaatagaagtttggaatacgatgttgataaaattatggaatatgccacgttgcttgatattgacgcattgcgaaacgagacgaaagagcagtgtgaaaacttgctctctgagatgtgcgatatgaatattcttgtcaacaaggctggacgctaccgtttccgtcagttacgttttttgaacatagtcggtaaggacaccggcgacattatcgaccaaataacacgtattcaggagaaagtatga

SEQ ID NO: 72690 - protein, 282 aa, Unknown
  Obtained from environmental sample
  misc_feature (1)..(282): Xaa is any amino acid
MCDEIKEWLSKSGNRRLLLLIDESDNILSVXAENSYAALNDFKQLGKETNKRFKIVFAGLHNVVPAAKDAGKIFEYFGKPICIRPLSHSDAYKLLARPLRYLGFNTDSDTLLPLLVSTNFYPGVVHFVGTEFVKMLIHRYSNHYNESANPPYQLDDRQIGSVMHSVNLSEMIEERIKLTLEVDIRYFMLAGCIAALYYDDARNRSLEYDVDKIMEYATLLDIDALRNETKEQCENLLSEMCDMNILVNKAGRYRFRQLRFLNIVGKDTGDIIDQITRIQEKV

SEQ ID NO: 72691 - DNA, 849 bp, Unknown
  Obtained from environmental sample
  misc_feature (1)..(849): n is a, c, g, or t
atgcttttggtggatggtattaaacctgtttttgttgatgttgaagaaaaaacaggcaatatggatcctgataagattaaagctgcaattacgtctaaaactacagcgattatgccggttcatgtatatggaaatccctgcaatacggatgcaatacagcggattgcggatgaacatggtttaaaggtaatatatgacgctgctcatgcgtttggcgtagaaagagacgaaaaaagtattttaaacgtcggggatatttccacattaagttttcatgctacaaaaacatataatacggcagaaggcggggctatagtttgtcacgatgaatcaatgaaaataaagatagattatttaaaaaattttggtttttccggtgaaactaatgttgtgatgcccggtattaatgggaaaatggatgaaattcgggcagctttaggtttgctcaatttgaaatacgttgattatgctattgaaaaaagacgaaatcttgtattgttataccgtcatgaattaaaaagtgtcatgggaataaccatgttgcctgagattcccaatgtcaaattaaattattcttattttcctgtttttgtaaataaagatgaatacggaataagcagagataaattatacgaaagattaaaggcacataatatttatggaagacgatatttttacccgttaatcagttctttctccccgtacaaagatttggattctgccaaacatgaaaaattatctgtggccgcgaaattggcggatagcgtgatttgtttgccgatgtatgctgatttaggatttgaaaagataaaaatgatttgcgatgtgatanaaggaacacataaatga

SEQ ID NO: 72692 - protein, 282 aa, Unknown
  Obtained from environmental sample
  DOMAIN (1)...(278): DegT/DnrJ/EryC1/StrS aminotransferase family
  misc_feature (1)..(282): Xaa is any amino acid
MLLVDGIKPVFVDVEEKTGNMDPDKIKAAITSKTTAIMPVHVYGNPCNTDAIQRIADEHGLKVIYDAAHAFGVERDEKSILNVGDISTLSFHATKTYNTAEGGAIVCHDESMKIKIDYLKNFGFSGETNVVMPGINGKMDEIRAALGLLNLKYVDYAIEKRRNLVLLYRHELKSVMGITMLPEIPNVKLNYSYFPVFVNKDEYGISRDKLYERLKAHNIYGRRYFYPLISSFSPYKDLDSAKHEKLSVAAKLADSVICLPMYADLGFEKIKMICDVIXGTHK

SEQ ID NO: 72693 - DNA, 849 bp, Unknown
  Obtained from environmental sample
  misc_feature (1)..(849): n is a, c, g, or t
atgtattggatgcccgccatgacgcatacctacaagcattacacgaccgatgagttttggtattacgaaggccggctctccgcgctggaacggctaaaggccggtgttaccacaggggtttgcgtcttaggctcccagccgcgctgtgattcgcctgcgccggcgttaaataacgcgaaaggatatgccgaaataggcatccgcgacattgtttgtaccggcccttgccatcctccctggcctcacaatttcagccgctggaacggcgatacgcgaacgaaaaaatccgtcagttttaatgagatcataagcagccttgaggaagttatcagtaccttaaacaacacaaacggcgggaaaacctttgcttttgttacgccttttacgcttgttacatccattaacccttccggcgctacaccgaaggaacagctcgccaaacttaccgaacatgacaagcttcaaacaaaagagatacgccggattgcggataaatacggcgcgaggatacattgcgactgtttcggcggcatgcttgaattgctgaaagaggatatgcgttatgcgctaattggcccggatgtgcatttgcagcattgttcccatttaaatgacgacgagataaaaatccttgccgattcgggaacttctgcgggggtatgtcccggttcccaggctcctgtggctaanatgctggacgcgggtgttaatgtggctatcacgtcagatggtacaaaactcggatacgggtttgatatgtggggctgcatgaggcaatttcagcagaattaccggaatgccgcaggggataattccttatacccgaggcgaaagcactggaaatggtga

SEQ ID NO: 72694 - protein, 282 aa, Unknown
  Obtained from environmental sample
  misc_feature (1)..(282): Xaa is any amino acid
MYWMPAMTHTYKHYTTDEFWYYEGRLSALERLKAGVTTGVCVLGSQPRCDSPAPALNNAKGYAEIGIRDIVCTGPCHPPWPHNFSRWNGDTRTKKSVSFNEIISSLEEVISTLNNTNGGKTFAFVTPFTLVTSINPSGATPKEQLAKLTEHDKLQTKEIRRIADKYGARIHCDCFGGMLELLKEDMRYALIGPDVHLQHCSHLNDDEIKILADSGTSAGVCPGSQAPVAXMLDAGVNVAITSDGTKLGYGFDMWGCMRQFQQNYRNAAGDNSLYPRRKHWKW

SEQ ID NO: 72695 - DNA, 672 bp, Unknown
  Obtained from environmental sample
  misc_feature (1)..(672): n is a, c, g, or t
ttggctgatgatctgcgggctttgcggtccgttttcgagggttccccggagccggtaataagctgggggggcacagtctgggcggcctgggtggaccaagccgggccgggagtcattacggaactgcgtatgggcgaccctttcattctgggcgaggacatctatcgccaagcggccttgccgggaggccctttccggccggatgtctgccgcctggaagccgaggtgctggaaatcagaacccggcggctaggtccggatttaagcggccaggccggccatgtcgccggtctggcccaaccgccagccggacctgccggccaacgccggagggctctcctggatttgggacgcttccacagcgccgccgacctaatccagaggggcggccacggcgatttcatcctgtccggcttgaactgccgcctgcccggggctttcatcgccggcatcacggccggctacctggtcctggacattacagactgccaggaggatcttcgggtggggcagaccgtcaacttcaagccctcctactggaccatcgccgaggctttccgcaacccgggcgttggcataaaaccggccttcgaccaagaggatcaaagcccggaaagcctgaagccaagcccggtctttgaccgggccgggaacggaaccgcccatgcctga

SEQ ID NO: 72696 - protein, 223 aa, Unknown
  Obtained from environmental sample
  misc_feature (1)..(223): Xaa is any amino acid
MADDLRALRSVFEGSPEPVISWGGTVWAAWVDQAGPGVITELRMGDPFILGEDIYRQAALPGGPFRPDVCRLEAEVLEIRTRRLGPDLSGQAGHVAGLAQPPAGPAGQRRRALLDLGRFHSAADLIQRGGHGDFILSGLNCRLPGAFIAGITAGYLVLDITDCQEDLRVGQTVNFKPSYWTIAEAFRNPGVGIKPAFDQEDQSPESLKPSPVFDRAGNGTAHA

SEQ ID NO: 72697 - DNA, 654 bp, Unknown
  Obtained from environmental sample
  misc_feature (1)..(654): n is a, c, g, or t
ttgaaaggcaagcgtgtcagcgttgtcgcggccgggtccggtgtggaagttgatgtgggggccatttttgatgtggccaagttacaattcgccgatatgaatgtcgatcatctcgattttggcgccaccaccaaccgtttcaaggtcaaccagatagacgtgggttttgtggtggccggctttcccatcgtttccgtcatggatttgaccaccaccaaggacgtggggcttttgagcttcagcaaggactttctggcccagttgaacaaggcccatccatactttgtgcccagcgtcattccggccaacacctaccgggtcattgacaaggatacgcagaccccggctgttctggccatgctggtgacccacgacaagctgtcggaaaaccttgtctatgaatttgtgaaaagcctgtatgccaacgtggaggccgtgcatgcctctccatgccgcggcaaagcaaatcattcgtggaaaaggctcctggatggtgtgaccttgcccctgaatcccggtgcgggcaagttctttaaggaaaaaggcctcaagattccggacatcaggtannanctttcggctgcggcgcggcgggacggcgaaagccggccttgcntgnccgcgccgcagccggaggatcaacactgccgatga

SEQ ID NO: 72698 - protein, 217 aa, Unknown
  Obtained from environmental sample
  misc_feature (1)..(217): Xaa is any amino acid
MKGKRVSVVAAGSGVEVDVGAIFDVAKLQFADMNVDHLDFGATTNRFKVNQIDVGFVVAGFPIVSVMDLTTTKDVGLLSFSKDFLAQLNKAHPYFVPSVIPANTYRVIDKDTQTPAVLAMLVTHDKLSENLVYEFVKSLYANVEAVHASPCRGKANHSWKRLLDGVTLPLNPGAGKFFKEKGLKIPDIRXXLSAAARRDGESRPCXXAPQPEDQHCR

SEQ ID NO: 72699 - DNA, 735 bp, Unknown
  Obtained from environmental sample
  misc_feature (1)..(735): n is a, c, g, or t
ttgccagccgtgataccagcgaaagaaataatcgactggacaatgccaagcacttcaatttttgaccggaagaaacctcttgctgatgcaacgctgaggcgcattgccgtaggcattgaaaaatattggaaagattatgcaaaaccatttttggcagttttatacggtagtaacgatgtacgttcattggacagaccgtttcctactgtaactacatctggcaatcatcacgcattgattgaacctgtaccattgcttatagggcatgaatcaggccaaatgccaaaacctgtagatgatccgtgccaaacagtattagcgcagggcaggataaaccttattcagccttttatatccaggttccacgacggggaaggttctgaaaaaagaaatcattccattgacaatccgttgccagctctcgacacatcgaaccgttacggtatcgtccagccgcttgtcatggaatattacggcaacgggaaaactgaccccgtatccaagcctttgggaacggttacgacaaaagacaggttcgcgcttcttgaacccgccacgaaaggggtgaaactggacatcagatttcgtatgctgaaaaaccatgaattaaagaaagcgcaggggtttcctgaaaattatgacattaaaggaaacactacagaacagacgaaacaaatcgggaacgccgtgccggtgaataccgcgaaggcattggcaaaagtggctatggcatga

SEQ ID NO: 72700 - protein, 244 aa, Unknown
  Obtained from environmental sample
  misc_feature (1)..(244): Xaa is any amino acid
MPAVIPAKEIIDWTMPSTSIFDRKKPLADATLRRIAVGIEKYWKDYAKPFLAVLYGSNDVRSLDRPFPTVTTSGNHHALIEPVPLLIGHESGQMPKPVDDPCQTVLAQGRINLIQPFISRFHDGEGSEKRNHSIDNPLPALDTSNRYGIVQPLVMEYYGNGKTDPVSKPLGTVTTKDRFALLEPATKGVKLDIRFRMLKNHELKKAQGFPENYDIKGNTTEQTKQIGNAVPVNTAKALAKVAMA

SEQ ID NO: 72701 - DNA, 738 bp, Unknown
  Obtained from environmental sample
  misc_feature (1)..(738): n is a, c, g, or t
atggacgaaaacccgcgctataaacgctatgccgcggatacgcgggacgactggtctgccggaatcataatcatgctttcggcgatgcggtggcttcgccgcgcgccggaatcctatttcaaaaatttagggtattattacggcgggccggccgcatacggattcgcgcgattcatccaaaacaaggccgcggggctgggaatcgacaaactgcttttcatcgcgcgcgacgcgttcgtggtcaagaacgtctttgactttttgacgggcggaaaaccggcgacggattacgtctatgcccagcgtttcatcaaacaggccatatcgcttgaactccacagcagcgccggcataaattcgaaaacgctccttgattattacgcgtcgaaatacggcggcgtcggcgaactgcgcgccgcgttcggcggaagcgattcggattttgtaaagtcgaatcgcgcaaaactttcaaagttcgcaaaaatcgagcgcgacaattacgaaaaatatatccgcggcgtcgtcggggattccgagaaaatcggcgtggtcgacaacgccggcgaaaaattcacggcgcaaaaccttatcgcgtcggcaatcggcgaaggcggcgacggggggggggaaaaaaaacgaacgcgtcgtgggattttattggggcacattgaaccgggggttcagggaatcggtgacccattacgactgcgcgaccaacgatatggaatattccggtga

SEQ ID NO: 72702 - protein, 245 aa, Unknown
  Obtained from environmental sample
  misc_feature (1)..(245): Xaa is any amino acid
MDENPRYKRYAADTRDDWSAGIIIMLSAMRWLRRAPESYFKNLGYYYGGPAAYGFARFIQNKAAGLGIDKLLFIARDAFVVKNVFDFLTGGKPATDYVYAQRFIKQAISLELHSSAGINSKTLLDYYASKYGGVGELRAAFGGSDSDFVKSNRAKLSKFAKIERDNYEKYIRGVVGDSEKIGVVDNAGEKFTAQNLIASAIGEGGDGGGEKKRTRRGILLGHIEPGVQGIGDPLRLRDQRYGIFR

SEQ ID NO: 72703 - DNA, 729 bp, Unknown
  Obtained from environmental sample
  misc_feature (1)..(729): n is a, c, g, or t
atggtcgtgcatctttacgggcatccgtgcgacatggatgcgcttatggcaatcgcaaaaaagcacaacctgtttgtcatagaggactgcgcggaggcaattggcacggaatacaaggggcggcgcgtcggcacgttcggcgacatcgcgacgttcagctttttcggcaataaaaccataacttgcggcgaaggcggcgcggtcgccgcgaacgacgacgaacttttcgggcgcgtcgtgcatctgcgcggtcagggacttgcgaaagaccgcgaatattggcatgacgccgtcgggttcaactatcgccttaccaacgtcgcggcggcaatcgggcttgcccagcttgaacaggtcgataaattcatcgccgcgaaacaaaacgtcgcgaagtggtatatggaaaaattgaaagggcttccggttgcgttccataagccggtcggcgatgtgttccatactttctggatgtgctctataataatcgggaaaacgggggggggtgcggcggagcgcgacaaacttcgcgaatttcttaaagccgagggaatcgaaacgcggccgacgttttttccgatacatataatgccgccctatgcgacgggcgaaaaaatgccggtggcagaggatatatccgcgcgcggcatgaaccttccgtcatatcccgctttgacggaatcggacgtcgaatacatctgcggcaaaataggcgaattctgtggccggtaa

SEQ ID NO: 72704 - protein, 242 aa, Unknown
  Obtained from environmental sample
  DOMAIN (1)...(237): DegT/DnrJ/EryC1/StrS aminotransferase family
  misc_feature (1)..(242): Xaa is any amino acid
MVVHLYGHPCDMDALMAIAKKHNLFVIEDCAEAIGTEYKGRRVGTFGDIATFSFFGNKTITCGEGGAVAANDDELFGRVVHLRGQGLAKDREYWHDAVGFNYRLTNVAAAIGLAQLEQVDKFIAAKQNVAKWYMEKLKGLPVAFHKPVGDVFHTFWMCSIIIGKTGGGAAERDKLREFLKAEGIETRPTFFPIHIMPPYATGEKMPVAEDISARGMNLPSYPALTESDVEYICGKIGEFCGR

SEQ ID NO: 72705 - DNA, 561 bp, Unknown
  Obtained from environmental sample
  misc_feature (1)..(561): n is a, c, g, or t
atgctggttaataaatctggaaaatttgacaaaataatctattttattgtttttttgtttttaataatatcctgtacgaaagaaaaagaagtaaatatagtaatagttaacgaaaaccaaaagaaaattttagaagatattattttatacaaaaattatgatacaaaaataataagcaatgggagctactggataataaaaaattttaatgttgaattagcattggaagcagccagaatagcaagcatgaatttagatgcaataaagaataatatggaaaatgtagatgccacaagtgatattgatagtttgccttatataagaaaatatttaaaatttactgtagaaaacggctttgaaattgttgaagacatggaaaattatccaaaatttgattataatcctgctcataaaaattcaatcaaaacaggagaaatgaaaggctatgtaaaaaaaccaaatgttgatatagttaaagaaatgcgaattatggtagacgctacgagcttatatgaagcagctatagaatatttaaagaaaaaaaattacataattttctaa

SEQ ID NO: 72706 - protein, 186 aa, Unknown
  Obtained from environmental sample
  misc_feature (1)..(186): Xaa is any amino acid
MLVNKSGKFDKIIYFIVFLFLIISCTKEKEVNIVIVNENQKKILEDIILYKNYDTKIISNGSYWIIKNFNVELALEAARIASMNLDAIKNNMENVDATSDIDSLPYIRKYLKFTVENGFEIVEDMENYPKFDYNPAHKNSIKTGEMKGYVKKPNVDIVKEMRIMVDATSLYEAAIEYLKKKNYIIF

SEQ ID NO: 72707 - DNA, 378 bp, Unknown
  Obtained from environmental sample
  misc_feature (1)..(378): n is a, c, g, or t
atggccctctgcgccaaagccgatctggtgctgtacgacctaaaagccagcggtgacgacgctcaccgcgtgaacacgggcgtggacatgggcccaatacttgacaacctggacgcgctgacagaaacgcacagctccatttggctcaggctcccgatagtgccggggcacaccgatgatccgaccgcaatggagcggctggccgccagatacagcgggcgcagttccatagggcgcgtcgtcctcctgccctaccacgcgggcggggaaggaaaattaaagaggatgggcctgcccccgaagatgcagggcacgacggcgcctgcggcggaggacatggaaccgctggccggggtctggcgccgcttcggcttttga

SEQ ID NO: 72708 - protein, 125 aa, Unknown
  Obtained from environmental sample
  misc_feature (1)..(125): Xaa is any amino acid
MALCAKADLVLYDLKASGDDAHRVNTGVDMGPILDNLDALTETHSSIWLRLPIVPGHTDDPTAMERLAARYSGRSSIGRVVLLPYHAGGEGKLKRMGLPPKMQGTTAPAAEDMEPLAGVWRRFGF

SEQ ID NO: 72709 - DNA, 396 bp, Unknown
  Obtained from environmental sample
  misc_feature (1)..(396): n is a, c, g, or t
atgaaaattaccgatgaagccggcataatggctgggcaggcggcggcatttgcaggtaatacaaccgcgaacattttatcatttcgtgattctgtaaatgaaatattttatttattgataaaaaacggctattcacagccgcaggaatttgaggctgacgctcttgcggtaaaactgcttgccgatgccggttattcacctaacggactgcttgaaatattgaatattctgaaaacaattcaaggcagtcaaagcggaagtgttttaagtacgcacccttcgtctgtgcagcgtattgccaatattgaagagcaaacatcccaatacagagtaacaaacacacagcgcttcagagaagaacgttttaaaagaattatgatgaatactgttaattaa

SEQ ID NO: 72710 - protein, 131 aa, Unknown
  Obtained from environmental sample
  SIGNAL (1)...(23)
  misc_feature (1)..(131): Xaa is any amino acid
MKITDEAGIMAGQAAAFAGNTTANILSFRDSVNEIFYLLIKNGYSQPQEFEADALAVKLLADAGYSPNGLLEILNILKTIQGSQSGSVLSTHPSSVQRIANIEEQTSQYRVTNTQRFREERFKRIMMNTVN

SEQ ID NO: 72711 - DNA, 480 bp, Unknown
  Obtained from environmental sample
  misc_feature (1)..(480): n is a, c, g, or t
atgatggccgagatggatttggatcgcacgcaaaaatttttagacagtgtggccaatttaattcgtaacgccgtttatacctttcaaaaggcagccgaacttttttcggatgacccgagtggaaaagtcggtggcctgtacaccggcccctacagcggaaattcacacgtaacggcggaagaaatggacccgaagatttttttcatcgtggataaattcaatgaaggcgaaatttcaaatgcggccttttttcaaacggaaagcaacgaacaagccgctcgcatactcctgctaaataaacgcattgcgcctcaccgcgccaatttggaacacgactatgataaaatatacaacatgactttcgctcaggccagacaaaccaagatggaagaatggctgaacagaaaactgaaaacactttatgtacgattaaatgacaaaactaaagaatgcacatttgaatacaattggggacaataa

SEQ ID NO: 72712 - protein, 159 aa, Unknown
  Obtained from environmental sample
  misc_feature (1)..(159): Xaa is any amino acid
MMAEMDLDRTQKFLDSVANLIRNAVYTFQKAAELFSDDPSGKVGGLYTGPYSGNSHVTAEEMDPKIFFIVDKFNEGEISNAAFFQTESNEQAARILLLNKRIAPHRANLEHDYDKIYNMTFAQARQTKMEEWLNRKLKTLYVRLNDKTKECTFEYNWGQ

SEQ ID NO: 72713 - DNA, 720 bp, Unknown
  Obtained from environmental sample
  misc_feature (1)..(720): n is a, c, g, or t
atgactgtgggatgcagcggctttaccccttccggttatcccaaggtagtccctcaggctctggcgcgctggtgcggagcgcatggccctcgtccaataacgctctggactggggcgtccgtggggccggaactggatagagaactctctcgcgctggatgcattcggaaaaggtttccttaccaaacggacgaaactctccgaaaaaaaatcaacgaaggcgaaatttcatttgctgacattcacctgtctcacagcgcccagaaccttaggtatggctttcacggcaacgtggacgtcgccatagtggaggcaatcgcggtcagggacgatggaggcatcatacctacgacgtcggttggcaatactccgacgttcgtggaacttgcccaaaaggtcatagtggaaattaacgtaacccagcctgccgacctagagggcattcacgacatctacgtgccattaaacccgcccaaccgcctgcctatacccatttcaagccccagcgacaggattggggttaattacattccatgcgcgcctgaaaaaattgccgccatcgtgtactcggatgtggcggacagccagcgcccgcttgccgagatcgacgataccagcaaacttatggcgtcgcacctcctgaattttctcgatctggaggtcaggcgcggacggctgccgcgttcccttttgccatgcagtcaggcgtctcgcncctaa

SEQ ID NO: 72714 - protein, 239 aa, Unknown
  Obtained from environmental sample
  misc_feature (1)..(239): Xaa is any amino acid
MTVGCSGFTPSGYPKVVPQALARWCGAHGPRPITLWTGASVGPELDRELSRAGCIRKRFPYQTDETLRKKINEGEISFADIHLSHSAQNLRYGFHGNVDVAIVEAIAVRDDGGIIPTTSVGNTPTFVELAQKVIVEINVTQPADLEGIHDIYVPLNPPNRLPIPISSPSDRIGVNYIPCAPEKIAAIVYSDVADSQRPLAEIDDTSKLMASHLLNFLDLEVRRGRLPRSLLPCSQASRX

SEQ ID NO: 72715 - DNA, 369 bp, Unknown
  Obtained from environmental sample
  misc_feature (1)..(369): n is a, c, g, or t
atgacgctgttgaccaagttcttgcccatcggacttttggcgctcggcatcatcgccggtgtccagacatggcgtctggatgttgagcgggctgaccacaagctgacgcgacacgagttggcagccgcggaactcaaggcccaggaatggaaaaacgctgaggcttaccggcaaacacagacggctgctcaacaggcgctcgggaaagcctgcctggaccgcgaagcagccgcagaggcggatgttgctttgcggacggagatcatgcgcgcggccccgcccgtggccgtaacaaaggaacaggaaaaacgaggagtgagccgtgagacacgccgcactgccgctgattatctcaatcggcctctgtag

SEQ ID NO: 72716 - protein, 122 aa, Unknown
  Obtained from environmental sample
  SIGNAL (1)...(25)
  misc_feature (1)..(122): Xaa is any amino acid
MTLLTKFLPIGLLALGIIAGVQTWRLDVERADHKLTRHELAAAELKAQEWKNAEAYRQTQTAAQQALGKACLDREAAAEADVALRTEIMRAAPPVAVTKEQEKRGVSRETRRTAADYLNRPL

SEQ ID NO: 72717 - DNA, 849 bp, Unknown
  Obtained from environmental sample
  misc_feature (1)..(849): n is a, c, g, or t
ttgattgatgtctgcgaaagaatcatcgttgaaattaatccgaacattccttttgtcggcggtgatacggctatacatatcagccagattgattgccttatcgaaacgaacacccccgtgccacagttgccggcttccccaatcaatgatattgataaagccattggcgggtatgtggcggaattgattaatgacggtgatactatccagcttggtattggcggaattcctgatgcggcggcggcggcattggttaataaaaggaatctcggagtgcacacagaaatgataggaagcagtattgcaatgcttttggaaaaaggcgtcattgacggcagcaaaaaaacattgaaaaagagaaaaatagtagcaacctttattttaggcgatcagaagctctacgatatggtcaataataatcccatcgtggaagtactgcgcgggtcgtatgtaaacgatccgtatgtaattgctcaaaacgacaatatggtctcggtgaacgcttgtttatccattgatttaacagggcaaatctgttcagagagtataggcccgtcacagtacagcgggacaggaggagcgtcggattatgcttatggtgtatccagggcaaagaacggcaaatgtataatcgccgcccactcgacaacaaagaacgatgaaatttcaacaatagtatccgctttgctgcccggctcgattatttccatcagaagaaacaacgttgattatgtagtaacggagtatggtattgcacagttaacaggcagggatgtgagagaacgtgtgaataatcttatagctgtcgcgcatcccaaatcagagaccagctcaaggcagaaacggtaa

SEQ ID NO: 72718 - protein, 282 aa, Unknown
  Obtained from environmental sample
  DOMAIN (1)...(282): Acetyl-CoA hydrolase/transferase
  misc_feature (1)..(282): Xaa is any amino acid
MIDVCERIIVEINPNIPFVGGDTAIHISQIDCLIETNTPVPQLPASPINDIDKAIGGYVAELINDGDTIQLGIGGIPDAAAAALVNKRNLGVHTEMIGSSIAMLLEKGVIDGSKKTLKKRKIVATFILGDQKLYDMVNNNPIVEVLRGSYVNDPYVIAQNDNMVSVNACLSIDLTGQICSESIGPSQYSGTGGASDYAYGVSRAKNGKCIIAAHSTTKNDEISTIVSALLPGSIISIRRNNVDYVVTEYGIAQLTGRDVRERVNNLIAVAHPKSETSSRQKR

SEQ ID NO: 72719 - DNA, 714 bp, Unknown
  Obtained from environmental sample
  misc_feature (1)..(714): n is a, c, g, or t
ttgccccgttggaaaggtttcaatggacattggacgggtgaggtaaggaactttttttcggcggtaggggggggttcattacggaggaacttgatcaaagtttattgccttggacgcccattttcccgcgaagcaatactactgcgctgttttatggcaggacaacccggtattagtgacgtgaaaagagccaggcggttttatatcattgctcgtcagacacgtaccggacttgctcaaacagcgtccgttggtcgatgggcaaactgcaaggatacaagccgtgccggcatgtcaggcgttgtttcacgctggcttggtggtgttgatgcgctggacgaaatcgcccagcgtcttcttcgggtacagattgagaatcgccccgctgccgatgtaatccgtctgtacgacagttctaacacgctgttttactgtgacccgccctacctgcacgtcacacgcggcgacgataaggcttacggcttcgaaatggacgaaagtcaacaccgagaatttgccgaggccgccaatgagtgcaatgccatgatagccatttctgggtacgatcacccgttgatggatgaactgtttcaacctggaagatggtttaagacgatggggcctgacaaaacgatccactccaccaagggaacaagaacggaagtgctttggacgaactacttccctaaaagccagaagggactatttgaatga

SEQ ID NO: 72720 - protein, 237 aa, Unknown
  Obtained from environmental sample
  misc_feature (1)..(237): Xaa is any amino acid
MPRWKGFNGHWTGEVRNFFSAVGGGSLRRNLIKVYCLGRPFSREAILLRCFMAGQPGISDVKRARRFYIIARQTRTGLAQTASVGRWANCKDTSRAGMSGVVSRWLGGVDALDEIAQRLLRVQIENRPAADVIRLYDSSNTLFYCDPPYLHVTRGDDKAYGFEMDESQHREFAEAANECNAMIAISGYDHPLMDELFQPGRWFKTMGPDKTIHSTKGTRTEVLWTNYFPKSQKGLFE

SEQ ID NO: 72721 - DNA, 504 bp, Unknown
  Obtained from environmental sample
  misc_feature (1)..(504): n is a, c, g, or t
atgaggaatatgcttattcgtacccctgaaaatccggttattatggcttccatgcgcgctctgggggcaaatccccaacctctggctttctcggaattgtacatggctctgaagcaagggacttacgatgctcaggaaaatcccattccggttatttacaacaacaaactctatgaggtacagaagaatctcagcctgaccaatcacatctattccggaatgtgttttgctatcggtgaaagcacatggaaaaaaatgagtccttcgcagcagcagattgtagccgcagcggccaagacttcggaaaaatcaaaccgcgcaatgaacaaacagatgagcgaagatttcctctctaagctgcaaaatgaaggaggcatgaccattacccagccagatctatcacaatttattgaagctacaaagagtgtgaaagacggcctctccggaagttacggtacggatctcctgagacgcctggatacatggcttgcagccaataaataa

SEQ ID NO: 72722 - protein, 167 aa, Unknown
  Obtained from environmental sample
  DOMAIN (1)...(151): Bacterial extracellular solute-binding protein, family 7
  misc_feature (1)..(167): Xaa is any amino acid
MRNMLIRTPENPVIMASMRALGANPQPLAFSELYMALKQGTYDAQENPIPVIYNNKLYEVQKNLSLTNHIYSGMCFAIGESTWKKMSPSQQQIVAAAAKTSEKSNRAMNKQMSEDFLSKLQNEGGMTITQPDLSQFIEATKSVKDGLSGSYGTDLLRRLDTWLAANK

SEQ ID NO: 72723 - DNA, 528 bp, Unknown
  Obtained from environmental sample
  misc_feature (1)..(528): n is a, c, g, or t
atgggatgccattccttctcttatgccatttattattgctgtgcttttggttgtaggcctgcttatagccgttccgtggtttatacttgctcccgcttcgcttgtcggattgccatgactaatactgagctttccaccgaagaattactcaatctcgccaacagccttcgttatgacgttgtcaagatgatccatcaatgcggcgatggtcatcccggcccttgtatgtccattgcagaaataatggcttttctgttttttgaggaactcaggcttgatccccaaagcccggattggcccggacgggatcgtttcattctttctaaaggccacgcttgtcctattctttacgcatgtctcgcccggctgggtttttttcctgcgaatgaactgcctaaacttcgtacccttgaaggtatactacagggccatcctgacatgaacaaaacaccgggtgtagatacggtgtccggaagcctgggaaacggcgtcgctataggcctgggcactcggccgattctgacctag

SEQ ID NO: 72724 - protein, 175 aa, Unknown
  Obtained from environmental sample
  DOMAIN (48)...(172): Transketolase, thiamine diphosphate binding domain
  misc_feature (1)..(175): Xaa is any amino acid
MGCHSFSYAIYYCCAFGCRPAYSRSVVYTCSRFACRIAMTNTELSTEELLNLANSLRYDVVKMIHQCGDGHPGPCMSIAEIMAFLFFEELRLDPQSPDWPGRDRFILSKGHACPILYACLARLGFFPANELPKLRTLEGILQGHPDMNKTPGVDTVSGSLGNGVAIGLGTRPILT

SEQ ID NO: 72725 - DNA, 483 bp, Unknown
  Obtained from environmental sample
  misc_feature (1)..(483): n is a, c, g, or t
ttgatcgggacagtgaaaacttccgccaagattttctttataatcggtgccgcgtctgtttttggtaaattactgaccttaagcggttttgatcggatgatggcatcagcgctcctttctgtttccacttcgcctacggtaattctgcttataattctggggatattctttattggaggcatgttcatggagacgatttcattgatcgtgatgcttatgcctattttctatacagtagctttgcaagtggggatcgatccaatacatatgagcgtgctaacggtagtcattttaggcttaggacttgtaacgccgccttatggattgtgtcttttcatttgctgtaattcgcaaaagctgcggatatgggatgccattccttctcttatgccatttattattgctgtgcttttggttgtaggcctgcttatagccgttccgtggtttatacttgctcccgcttcgcttgtcggattgccatga

SEQ ID NO: 72726 - protein, 160 aa, Unknown
  Obtained from environmental sample
  misc_feature (1)..(160): Xaa is any amino acid
MIGTVKTSAKIFFIIGAASVFGKLLTLSGFDRMMASALLSVSTSPTVILLIILGIFFIGGMFMETISLIVMLMPIFYTVALQVGIDPIHMSVLTVVILGLGLVTPPYGLCLFICCNSQKLRIWDAIPSLMPFIIAVLLVVGLLIAVPWFILAPASLVGLP

SEQ ID NO: 72727 - DNA, 426 bp, Unknown
  Obtained from environmental sample
  misc_feature (1)..(426): n is a, c, g, or t
gtgaccatatatgtagtcggcacggttaagccggtaaccgccaccgatggcgatggcaataagttcacccgactttatgtcgccgtagatggcggcatgggcgacaacattcggcccgcgctttatcaagctgaatatcatgccgtcatcgcgaatagggatagcaaagcggaaccggttgcggcgcgcattgtcggtaaacattgcgaaagtggcgacatattggtacgcgaagtaatgttgccgtgtgatgtaatgcgcggcgatttaatcgcaatcgctgcgaccggcgcttatggccgagcgatggcatcgaattacaatatgatgcctaggccgccggtcgtcgcgataacaaatggcgaaccgaaagtaatcgtccgccgcgaaaccgtaaaagacttattagcgcttgacgtaggttag

SEQ ID NO: 72728 - protein, 141 aa, Unknown
  Obtained from environmental sample
  DOMAIN (1)...(118): Pyridoxal-dependent decarboxylase, C-terminal sheet domain
  misc_feature (1)..(141): Xaa is any amino acid
MTIYVVGTVKPVTATDGDGNKFTRLYVAVDGGMGDNIRPALYQAEYHAVIANRDSKAEPVAARIVGKHCESGDILVREVMLPCDVMRGDLIAIAATGAYGRAMASNYNMMPRPPVVAITNGEPKVIVRRETVKDLLALDVG

SEQ ID NO: 72729 - DNA, 342 bp, Unknown
  Obtained from environmental sample
  misc_feature (1)..(342): n is a, c, g, or t
atgaacattcttgaagaactggtcgcagtactgacgggcttgaaaatcgcattcgagactgggcattacagcggcgtccctcctgatgaatatgtcgttatcgtgccacttgcggatacgttcagattactcgccgacaatatgccgcaggccgatgtgcaggaggcaaggttgtctattttcagcaaaggtaattaccacgccttgcggaacaagctgacaaaagtcttgcttcaggaggatttcactgtcacggacagacgttacatcggtttcgaacaggacacaaaaatgcaccactacgccattgaggtggcgaaaaattatgaagtggaggaataa

SEQ ID NO: 72730 - protein, 113 aa, Unknown
  Obtained from environmental sample
  misc_feature (1)..(113): Xaa is any amino acid
MNILEELVAVLTGLKIAFETGHYSGVPPDEYVVIVPLADTFRLLADNMPQADVQEARLSIFSKGNYHALRNKLTKVLLQEDFTVTDRRYIGFEQDTKMHHYAIEVAKNYEVEE

SEQ ID NO: 72731 - DNA, 471 bp, Unknown
  Obtained from environmental sample
  misc_feature (1)..(471): n is a, c, g, or t
ttgcgcggtgcagatttttaccgacaaaaaggctatacagaagcgtggattaatcaaagattgcaaactatagagatgcgaaaagaacttacagacgagtggcaaaagcgtggtgtaaccgaaaaagattatgccattttaaccaacgatatgacaaaagcgtggagtgggctgtctgtccaagaatacaaacaattaaaaggtttaaagaaacagagcctacgcgataatatgaccaacattgaacttgttttgaatatgcttgccgaggtcacgaccactgcaatttcaaaaacagaacagccaaaaactttgggtcacaatacccaaattgcaattcgcggtggcaaagttgcaaatgtcgcaaaaaacgaatatgaaaaggcaacaaggcaaaaagcaatttcgccattaaatgcaaaaaacaaaaaaatgctggaaattaagaccgcattgcctaaaaagaaataa

SEQ ID NO: 72732 - protein, 156 aa, Unknown
  Obtained from environmental sample
  misc_feature (1)..(156): Xaa is any amino acid
MRGADFYRQKGYTEAWINQRLQTIEMRKELTDEWQKRGVTEKDYAILTNDMTKAWSGLSVQEYKQLKGLKKQSLRDNMTNIELVLNMLAEVTTTAISKTEQPKTLGHNTQIAIRGGKVANVAKNEYEKATRQKAISPLNAKNKKMLEIKTALPKKK

SEQ ID NO: 72733 - DNA, 720 bp, Unknown
  Obtained from environmental sample
  misc_feature (1)..(720): n is a, c, g, or t
atgtttgccacagtgacgagcgccaacgaggccgttgtcaaaaaaatcaaggatgccaagccgtttctggtggatgtgttgcccgcgcgcgaagtcatgcccgtctttgcacagggcaagacgctgctccacgccggagcgcctatagactggcaggacatgaccggccccatgcagggcgcggccatcggcgcctcgatctttgaaggttgggcgaaaagcgcggatgaagcaaaggagttgctcgcctcaggagatgtgcgtttcacgccggctcatgacgcatgcgcggtgggccccatggccgggatcatctccgccaacatgccggtgctcgttgccgagaaccgcgaacacggcaaccgcgccttttgcaacaccaacgaaggcatcggcaaggtgttgcgttatggcgggtacagcgaagacgtcatcaacaaggtgcgctggcggcgggacgtgctcggccccacgctttcaaaggccttgcgggccatgcccgaaggcgtggacgtattcgccatagtggccaaggccatcggcatgggcgatgaattccacaaccgcaacattgccgcctcggcgctctttttcaaggaaatcatcccctggattttgaaaaccgacgcctcggacaaggaaattcgggaaaccgtcgcctttttgtcctcagccgaaacattttttctggatatcggcatggcttccttcaatcggtga

SEQ ID NO: 72734 - protein, 239 aa, Unknown
  Obtained from environmental sample
  DOMAIN (5)...(239): Protein of unknown function (DUF1116)
  misc_feature (1)..(239): Xaa is any amino acid
MFATVTSANEAVVKKIKDAKPFLVDVLPAREVMPVFAQGKTLLHAGAPIDWQDMTGPMQGAAIGASIFEGWAKSADEAKELLASGDVRFTPAHDACAVGPMAGIISANMPVLVAENREHGNRAFCNTNEGIGKVLRYGGYSEDVINKVRWRRDVLGPTLSKALRAMPEGVDVFAIVAKAIGMGDEFHNRNIAASALFFKEIIPWILKTDASDKEIRETVAFLSSAETFFLDIGMASFNR

SEQ ID NO: 72735 - DNA, 306 bp, Unknown
  Obtained from environmental sample
  misc_feature (1)..(306): n is a, c, g, or t
ttgatgatcagatcggccgagtcggcggcgaccgcaaggctttctcaatctggaatacatctggaccttctatccttcgcttggcatctccnnctcgtgccgttactacgatatagggctaccagggttgattcaaagcaaaaggacatcttcaccgacatcaaacgatccgtcggcctggagctgcgctggcggtcgccgatgggcgatctgcgtttcgcctacggctatccgcttgacaaaaatgtggacggcaatcaccgcaagcgcggccggtttgaattcaccatggggcagttcttttga

SEQ ID NO: 72736 - protein, 101 aa, Unknown
  Obtained from environmental sample
  misc_feature (1)..(101): Xaa is any amino acid
MMIRSAESAATARLSQSGIHLDLLSFAWHLXLVPLLRYRATRVDSKQKDIFTDIKRSVGLELRWRSPMGDLRFAYGYPLDKNVDGNHRKRGRFEFTMGQFF

SEQ ID NO: 72737 - DNA, 600 bp, Unknown
  Obtained from environmental sample
  misc_feature (1)..(600): n is a, c, g, or t
ttgtgcgcgaacgcgggcaacgccccgagaacatgctggagccacggtcgactcgcgcatcagcatcagcgtgggcgcatcatcacgcgggctatcgtcgtgaccgccggtccgctcttnttcggcaaggacgtcaacacggccatgatgcaatttcaccagatgctggagcctgtgctcggcgctttcgccgcgcgcattgtcggtgggacgggcctcatggtggccggtttttcctccgccatcgccgttcctctgactgccggctatgtcatgtcccgcatgtttaaatgggaaaaccagttcaacaacaacatgttcaggctgtccaccctgatcatcgtcgccttcggcacggtgctcacctacctgaacaagcgccccatagaaatcatcatcatcgcccaggccatcaacggcatgttcctgccctttgtgaccgtcttcatcatgtacgccatgaacagcagaaagtttctgggcgatgccgtgaacagcctcgcctccaacctttgggggggagcggccacgttggtcgccatttttctgggcatacgcggaacgtatgccgctgtcgggcgcatcgcgagctggttctga

SEQ ID NO: 72738 - protein, 199 aa, Unknown
  Obtained from environmental sample
  misc_feature (1)..(199): Xaa is any amino acid
MCANAGNAPRTCWSHGRLAHQHQRGRIITRAIVVTAGPLXFGKDVNTAMMQFHQMLEPVLGAFAARIVGGTGLMVAGFSSAIAVPLTAGYVMSRMFKWENQFNNNMFRLSTLIIVAFGTVLTYLNKRPIEIIIIAQAINGMFLPFVTVFIMYAMNSRKFLGDAVNSLASNLWGGAATLVAIFLGIRGTYAAVGRIASWF

SEQ ID NO: 72739 - DNA, 477 bp, Unknown
  Obtained from environmental sample
  misc_feature (1)..(477): n is a, c, g, or t
atgacagaatggccgagaacacgttcttgccagctagaggccgagcaccaagcaataaaacaggcgctcctagttgaaatccccaaagagatagccgccgcagccgcccaaggcgacctgtcagaaaatgccgaatatgagcaggcactggcaaagagggacatgtttcaaggcaagctggtggctcttgagcaaaggataaccgaagttgcaagcctcaacgtgtcaaggcttccaaaggacaaagtggcgtacggctcaaaggtgaagctgctggacttggattcggaaaaagaggtcacgtataaattagtcctccccgaagaactgaatggagacccatcgcttctaagcatcagcagccccataggagccgccttagttgggcttggcgagggcgaagaagtgcggatcaagatccccgctggggcaaagaggtttgaagtgctagaactgtcaacaatccaccaacaatag

SEQ ID NO: 72740 - protein, 158 aa, Unknown
  Obtained from environmental sample
  DOMAIN (1)...(73): Prokaryotic transcription elongation factor, GreA/GreB, N-terminal domain
  misc_feature (1)..(158): Xaa is any amino acid
MTEWPRTRSCQLEAEHQAIKQALLVEIPKEIAAAAAQGDLSENAEYEQALAKRDMFQGKLVALEQRITEVASLNVSRLPKDKVAYGSKVKLLDLDSEKEVTYKLVLPEELNGDPSLLSISSPIGAALVGLGEGEEVRIKIPAGAKRFEVLELSTIHQQ

SEQ ID NO: 72741 - DNA, 858 bp, Unknown
  Obtained from environmental sample
  misc_feature (1)..(858): n is a, c, g, or t
gtggacgcggtactcttggcaactccccactatgagcatcctacccttggtatagaagccatgaaaaacggcctccatgtgatgtgcgagaagcccgcgggggtgtataccaaacaggcccgggaaatgaacgaatttgccgcaaccaaaaaagacctggtcttcggaatgatgttcaaccagcggactaactgcgtgttccgcaaaatgcacgagcttatccagggcggaagcatgggcgcgattaaacgggtcagttggattattaccgattggtaccgcactcaggcctattacgactccggcgactggcgggccacctgggacggagaagggggcggcgtactcctcaatcaatgtccccataatcttgacctgctccagtggatctgcgggatgccgagtaaggtgcgggctttctgccataacggaaagtggcacaacatcgaagtcgaagacgatgtaaccgcgtacctggaataccccaatggcgccacaggcacttttatcactacgaccggggacgcgcctgggtcaaaccgctttgaggttaccctagaaatggggagcatagtctgcgaaaacacaaaaaccttaaaactcaccaaacttgaaatgaacgaaagggaatggtctaaaacctgcaaagaaggcttcaagcggccttcccagacggtggaggatgtccagaccgacggccagaacgagcagcacaacggcgtccttaaagcctttgcgggcagaattctccggggtacaccactggtcgcggaaggcccggaaggcatcaacggcctcaccctttccaatgccatgcatctttccagttggtggataaaactattgccttacctttag

SEQ ID NO: 72742 - protein, 285 aa, Unknown
  Obtained from environmental sample
  DOMAIN (71)...(184): Oxidoreductase family, C-terminal alpha/beta domain
  misc_feature (1)..(285): Xaa is any amino acid
MDAVLLATPHYEHPTLGIEAMKNGLHVMCEKPAGVYTKQAREMNEFAATKKDLVFGMMFNQRTNCVFRKMHELIQGGSMGAIKRVSWIITDWYRTQAYYDSGDWRATWDGEGGGVLLNQCPHNLDLLQWICGMPSKVRAFCHNGKWHNIEVEDDVTAYLEYPNGATGTFITTTGDAPGSNRFEVTLEMGSIVCENTKTLKLTKLEMNEREWSKTCKEGFKRPSQTVEDVQTDGQNEQHNGVLKAFAGRILRGTPLVAEGPEGINGLTLSNAMHLSSWWIKLLPYL

SEQ ID NO: 72743 - DNA, 648 bp, Unknown
  Obtained from environmental sample
  misc_feature (1)..(648): n is a, c, g, or t
ttgcgggtaggttcggctaccaatcaattgtcgttcgacacgaatgactcgactacaaaaagtttcagattaaatgcgggttctaacgtcactttgacagtaggcggtgatagcaccaatagagaagttacaatcgcgtctacggcaggcggtggcggatcatccgtagcagacctgagcggtcagggaacgcccgcatttggacagtcagcggtaaatggatcagcggctacagccgcccgttccgaccacgtccacgccttacctgccgcaccgtctgtaccaactggagcgaatctgtcaagtcaggcttcggctttcggccaatcagcccaaaacgggtcagcggctacctttgcaaggtcagaccattaccacgccctcccagccgctcctacactttcatctcttggcggcgaggcggctataactgcggggacaacggatcagttttggcgcggagataagtcatggcaagtgtttaatagcattgtacccgtctacggaacgtcttctacctcagcaagtacagccgccaaaacgtctactatcactggctttgttagacggacggggagtattgtcggcatctcatttacttacgctaatacagcctcagcccctaccctaaacgaaatctcgcgataa

SEQ ID NO: 72744 - protein, 215 aa, Unknown
  Obtained from environmental sample
  misc_feature (1)..(215): Xaa is any amino acid
MRVGSATNQLSFDTNDSTTKSFRLNAGSNVTLTVGGDSTNREVTIASTAGGGGSSVADLSGQGTPAFGQSAVNGSAATAARSDHVHALPAAPSVPTGANLSSQASAFGQSAQNGSAATFARSDHYHALPAAPTLSSLGGEAAITAGTTDQFWRGDKSWQVFNSIVPVYGTSSTSASTAAKTSTITGFVRRTGSIVGISFTYANTASAPTLNEISR

SEQ ID NO: 72745 - DNA, 825 bp, Unknown
  Obtained from environmental sample
  misc_feature (1)..(825): n is a, c, g, or t
atgtcgtcacggtctgcaagacgcccctgcaaacaggtctttgcaggccccgtaagcggcggcaacgctccgcctacatttagaccgctgacgttggctgacctgccgcagggtttagggtcggcttccgcacgccctaacaccatgttctacctcggacaagtaaatatagacgaccccagccaacaaacccttaatacttttggagcggctaaagcacaagaactatacggcagttccgcccttcttacaggctataccgtcagggactccttagacagggattggaggtatgtcgctgagggcgagaccgttataggcggtggaggcggtgaaacgattcccgcccataatgaatgggtatctatccctattgtagcgggggttacatttaacaaggtaatatataacagcggcctctttgttgctattgggacaggcggccatatctccacgtctcccgacggcaaggtttggacaacacgcacatcaggaacgtcagcggatttatgggatatagtttatacccataattactttgtcgctgtgggcggatcggcgactattgttacatcttccaatggcacgacttggactcccacacaggtatcgggagcggcctcttcggggtatagcatagtatttacggggattgcctcccacggcacaaatatatacttcgttggcaaagagcggggcgttcttgtttacgccacatccccaacaggcccttggtcagnatcttcatctactttcctatnagggtctttcgatcaagaacgccatatagcgtatggaaattacaagtgggattgttgcggttag

SEQ ID NO: 72746 - protein, 274 aa, Unknown
  Obtained from environmental sample
  misc_feature (1)..(274): Xaa is any amino acid
MSSRSARRPCKQVFAGPVSGGNAPPTFRPLTLADLPQGLGSASARPNTMFYLGQVNIDDPSQQTLNTFGAAKAQELYGSSALLTGYTVRDSLDRDWRYVAEGETVIGGGGGETIPAHNEWVSIPIVAGVTFNKVIYNSGLFVAIGTGGHISTSPDGKVWTTRTSGTSADLWDIVYTHNYFVAVGGSATIVTSSNGTTWTPTQVSGAASSGYSIVFTGIASHGTNIYFVGKERGVLVYATSPTGPWSXSSSTFLXGSFDQERHIAYGNYKWDCCG

SEQ ID NO: 72747 - DNA, 312 bp, Unknown
  Obtained from environmental sample
  misc_feature (1)..(312): n is a, c, g, or t
atgacagcaacagcagcttgtaaatttgcagatttaatggaaaagggttgcgtactcttttgcctgctcctcatcaaaatctataagctgaccttatcgcctgttctgccgccttcttgcagatattatccaagctgttcatcatattctatgaaagcattacgaaaacacggcctgcttaaaggtttatggcttaccctgaaaagaatattgcgctgtaatccctttttcgaaggcggctatgaccctgttcctgaggagttttatttttttaaaaatacgcctcgtcttaacctcttcctttcgcgataa

SEQ ID NO: 72748 - protein, 103 aa, Unknown
  Obtained from environmental sample
  DOMAIN (17)...(84): Domain of unknown function DUF37
  misc_feature (1)..(103): Xaa is any amino acid
MTATAACKFADLMEKGCVLFCLLLIKIYKLTLSPVLPPSCRYYPSCSSYSMKALRKHGLLKGLWLTLKRILRCNPFFEGGYDPVPEEFYFFKNTPRLNLFLSR

SEQ ID NO: 72749 - DNA, 354 bp, Unknown
  Obtained from environmental sample
  misc_feature (1)..(354): n is a, c, g, or t
gtgaaaaagacattttcattaaagagcagtaaaatattcaaagaagtttatcaaaaaggaaagagataccaaaaaaacggaatacaggtcatagtattgcggcacggcgaagaagcgcaggctgatttctccataaaaatgggaatcagcatcggcaagcgttacgggaaagcttacaggcggaatattgcaaaaaggcaagtcagggcaatttggcgtgagaatctgaaaaatatgaaatccggtttttatataatagtgcgttccggggagacttccaatactctcggttatcatgaaaagaaggaaattcttctggagctcctgcgccgggcgggtgtgtttatcgtatga

SEQ ID NO: 72750 - protein, 117 aa, Unknown
  Obtained from environmental sample
  DOMAIN (1)...(113): Ribonuclease P
  misc_feature (1)..(117): Xaa is any amino acid
MKKTFSLKSSKIFKEVYQKGKRYQKNGIQVIVLRHGEEAQADFSIKMGISIGKRYGKAYRRNIAKRQVRAIWRENLKNMKSGFYIIVRSGETSNTLGYHEKKEILLELLRRAGVFIV

SEQ ID NO: 72751 - DNA, 675 bp, Unknown
  Obtained from environmental sample
  misc_feature (1)..(675): n is a, c, g, or t
atgtatcgcgcggttttggaaaacgggcttaggatattaaattttgaaagcgcgggcgatttttttgagcttctgcaagaatacggcaaagcgccgctgccgccttatataaaggaagaattgcaaaacaaagaacgctatcagaccgtttacgcaggggctttgggcgccgccgccgcgccgacggcgggcttgcattttacgcgggattatttggataaattgcgcaggcgcggcgtaaaaacggcttttttaacgctgcacaccgggcttggcacattcttgcccgtcaaaaccgaaacggttgaaagccacgcgttacattcggaagatttttttatcagtgagcaaacggcaaatctaataaacggcgcaaaacagtcgggcaaaaaaataatcgccgtcggcaccacaagcgtcagggcgactgaaagcggcgcgaacggcgacggtttagttttaagcggttccggcgcaacggatatttttatatacccgggctacgcgtttaaagtccccgatgtcctttttacgaattttcacctgcctcaatcgacgctcctgatgctcgtatgcgccttcgcgggatacgagttgacgcttgaggcatacagaaaagcagtcgaaaacaattaccgcttcttttcgttcggggactgtatgctaataatttag

SEQ ID NO: 72752 - protein, 224 aa, Unknown
  Obtained from environmental sample
  DOMAIN (1)...(99): Queuosine biosynthesis protein
  misc_feature (1)..(224): Xaa is any amino acid
MYRAVLENGLRILNFESAGDFFELLQEYGKAPLPPYIKEELQNKERYQTVYAGALGAAAAPTAGLHFTRDYLDKLRRRGVKTAFLTLHTGLGTFLPVKTETVESHALHSEDFFISEQTANLINGAKQSGKKIIAVGTTSVRATESGANGDGLVLSGSGATDIFIYPGYAFKVPDVLFTNFHLPQSTLLMLVCAFAGYELTLEAYRKAVENNYRFFSFGDCMLII

SEQ ID NO: 72753 - DNA, 663 bp, Unknown
  Obtained from environmental sample
  misc_feature (1)..(663): n is a, c, g, or t
atgaaaataaatattcattttggttctaaacctggagttcggcattattgtcttttgacgatacttgcagctaactgtttcctttttacatttgtaaggcatataataaccggaaaaaccaactattatttccttaattggaatctatttctggcagtaataccctggttaatttcattgattatttcttccggttttgtaaaaaacaagctgctaaatgttatattactaattatttggtttttgttttttccaaatgcgccatatattattacagatttatactatctgaacgagcaccctgagaaaatgttttggtatgatttaattatgatattattgttttcatggacagggttgcttctgggctttttcagtttggagcatattgaagaaatattaaagcaaagggtaacgaaagtgaaaagtgttattataatttgctgttttttgtttatttgcgcatttggcgtttatttaggcagggatttacattggaatagctgggacatttttatgaaacctaaagaactttttctggatgtagtcgatcggcttataaagccattggaacacgaaagaacgtggagctttacaatcttaatggggttattcctgaattttatatattggccgatgaaaataatcaaaaaaaattattaa

SEQ ID NO: 72754 - protein, 220 aa, Unknown
  Obtained from environmental sample
  DOMAIN (42)...(211): Protein of unknown function (DUF1361)
  misc_feature (1)..(220): Xaa is any amino acid
MKINIHFGSKPGVRHYCLLTILAANCFLFTFVRHIITGKTNYYFLNWNLFLAVIPWLISLIISSGFVKNKLLNVILLIIWFLFFPNAPYIITDLYYLNEHPEKMFWYDLIMILLFSWTGLLLGFFSLEHIEEILKQRVTKVKSVIIICCFLFICAFGVYLGRDLHWNSWDIFMKPKELFLDVVDRLIKPLEHERTWSFTILMGLFLNFIYWPMKIIKKNY

SEQ ID NO: 72755 - DNA, 504 bp, Unknown
  Obtained from environmental sample
  misc_feature (1)..(504): n is a, c, g, or t
atggaaccaaaaacagaacaattaaagccggtttacaacttatcaacgtttaacaattctataaccgcgccaaacacgcaagaatacctgaaaagaacgcttggtgaacgtaagcaatcgtttatgaacaacattgtttcgcttgtgtcaaatgacaagaaattacaggaatgtaagcctgaaacattattattcgcggcaatgaaggcaactgcacttgacttgacgcttgaccaaaatcttggatatgcctatgttatcccatataatgagaagggcggaaaagtcgctcaacttcaaatcggatacaggggatttattcaacttgcatatagaagcaaacaatttcttagactaaatgtaacggatgttagacatggcgaaattgtaaatcgtaatcgtttgaccggagatattgaatttgacttttatcaggacgataaaagcgaaatggaactccccatattgggacgtttcatatttcagacttacaaatggttttga

SEQ ID NO: 72756 - protein, 167 aa, Unknown
  Obtained from environmental sample
  misc_feature (1)..(167): Xaa is any amino acid
MEPKTEQLKPVYNLSTFNNSITAPNTQEYLKRTLGERKQSFMNNIVSLVSNDKKLQECKPETLLFAAMKATALDLTLDQNLGYAYVIPYNEKGGKVAQLQIGYRGFIQLAYRSKQFLRLNVTDVRHGEIVNRNRLTGDIEFDFYQDDKSEMELPILGRFIFQTYKWF

SEQ ID NO: 72757 - DNA, 372 bp, Unknown
  Obtained from environmental sample
  misc_feature (1)..(372): n is a, c, g, or t
atgatcagatggccgaggttgtcccaagcctcaacggtggagttgtcccaagcctcaacggtggagttgtcccgcgccttaacggtggagttgccccgcgccttaacggtggagttgtcccgcgcctcaacggtggagttgtcccaagcctcaacggtggagttgccccgcgcctcaacggtggagttgccccgcgcctcaacggtggagttgccccaagcctcaacggtggagttgtcccaagcctcaacggtggagttgtcccaagcctcaacggtggagttgtcccaagccttaacggtggagttgccccaagcctcaacggtggagttgtcccaagcctcaacggtggagttgtttactaataagtaa

SEQ ID NO: 72758 - protein, 123 aa, Unknown
  Obtained from environmental sample
  misc_feature (1)..(123): Xaa is any amino acid
MIRWPRLSQASTVELSQASTVELSRALTVELPRALTVELSRASTVELSQASTVELPRASTVELPRASTVELPQASTVELSQASTVELSQASTVELSQALTVELPQASTVELSQASTVELFTNK

SEQ ID NO: 72759 - DNA, 342 bp, Unknown
  Obtained from environmental sample
  misc_feature (1)..(342): n is a, c, g, or t
ttgaggcttgggacaactccaccgttgaggcttggggcaactccaccgttaaggcttgggacaactccaccgttgaggcttgggacaactccaccgttgaggcttgggacaactccaccgttgaggcttggggcaactccaccgttgaggcgcggggcaactccaccgttgaggcgcggggcaactccaccgttgaggcttgggacaactccaccgttgaggcgcgggacaactccaccgttaaggcgcggggcaactccaccgttaaggcgcgggacaactccaccgttgaggcttgggacaactccaccgttgaggcttgggacaacctcggccatctga

SEQ ID NO: 72760 - protein, 113 aa, Unknown
  Obtained from environmental sample
  misc_feature (1)..(113): Xaa is any amino acid
MRLGTTPPLRLGATPPLRLGTTPPLRLGTTPPLRLGTTPPLRLGATPPLRRGATPPLRRGATPPLRLGTTPPLRRGTTPPLRRGATPPLRRGTTPPLRLGTTPPLRLGTTSAI

SEQ ID NO: 72761 - DNA, 357 bp, Unknown
  Obtained from environmental sample
  misc_feature (1)..(357): n is a, c, g, or t
atggccgaggttgtcccaagcctcaacggtggagttgtcccaagcctcaacggtggagttgtcccgcgccttaacggtggagttgccccgcgccttaacggtggagttgtcccgcgcctcaacggtggagttgtcccaagcctcaacggtggagttgccccgcgcctcaacggtggagttgccccgcgcctcaacggtggagttgccccaagcctcaacggtggagttgtcccaagcctcaacggtggagttgtcccaagcctcaacggtggagttgtcccaagccttaacggtggagttgccccaagcctcaacggtggagttgtcccaagcctcaacggtggagttgtttactaa

SEQ ID NO: 72762 - protein, 118 aa, Unknown
  Obtained from environmental sample
  misc_feature (1)..(118): Xaa is any amino acid
MAEVVPSLNGGVVPSLNGGVVPRLNGGVAPRLNGGVVPRLNGGVVPSLNGGVAPRLNGGVAPRLNGGVAPSLNGGVVPSLNGGVVPSLNGGVVPSLNGGVAPSLNGGVVPSLNGGVVY

SEQ ID NO: 72763 - DNA, 849 bp, Unknown
  Obtained from environmental sample
  misc_feature (1)..(849): n is a, c, g, or t
gtgtttccttatggcgtagataatttgttcctgatagatgacaagcggttgtatccctacacatcgttgccccacacatcggcattggtcaatttatttaaggaagaaaagcctcaaattgccttgatgggtgcaacatctatcggtcgcgatttgggacctcgcgtttcttcggcgttgttcagcggcttgactgccgactgtactgcgctcgaaatcggcgaccacgaagacaaaaaggaaggaaaaacatacaaaaaccttctgtatcaaatccgccctgcttttggcgggaatatcgtagctaccatcataaatcctgaatgtcgccctcaaatggctaccgttcgcgaaggtgttatgaaaaaagaaatcttcaatgcaaatcacaaagggcaaattaagaagttagatgtatcaaaatatatttcaaacgaagactttgttgtttctgtgattgaacgccatatcgaaaagtcgaaagtaaacttaaaaaccgctccgattatcgttgcaggaggttatggagtaggctctgaggacggctttaagttactgtatgatttggcaagtgttatcggcgcagaagttggcgcatcgcgtgccgctgttgatgcaggttttgctgagcatgagcgtcaaatcggacaaacaggcgttaccgttcgtccgaaattgtacatcgcttgtggaatttcgggacagatacaacatattgcaggtatgcaggaaagttccatgattattgcaatcaacaacgacccgcacgcacctatcaatgccattgccgactatataattacaggtaatgtggaagaagttcttccgaaaatgattaagtatttatag

SEQ ID NO: 72764 - protein, 282 aa, Unknown
  Obtained from environmental sample
  DOMAIN (1)...(152): Electron transfer flavoprotein domain
  misc_feature (1)..(282): Xaa is any amino acid
MFPYGVDNLFLIDDKRLYPYTSLPHTSALVNLFKEEKPQIALMGATSIGRDLGPRVSSALFSGLTADCTALEIGDHEDKKEGKTYKNLLYQIRPAFGGNIVATIINPECRPQMATVREGVMKKEIFNANHKGQIKKLDVSKYISNEDFVVSVIERHIEKSKVNLKTAPIIVAGGYGVGSEDGFKLLYDLASVIGAEVGASRAAVDAGFAEHERQIGQTGVTVRPKLYIACGISGQIQHIAGMQESSMIIAINNDPHAPINAIADYIITGNVEEVLPKMIKYL

SEQ ID NO: 72765 - DNA, 441 bp, Unknown
  Obtained from environmental sample
  misc_feature (1)..(441): n is a, c, g, or t
atgaatttttacaaagaaaatactgcattgaaatttcaattatcgcacccattgatgcgtaaaattgttgatttgagagaaaaaaactatgcggataaggataaatatgattatgccgcacaagattttgaagacgcaatagataattatgagcgtgtcttggaaattgttggtgaaatttgcggcgacatcattgcgcctaatgccgaaagtgttgaccatgacggtccaacagtagtgaataaccgcgttgtgtatgccgcaggaacacaacaaaatcacgatgccttggtgcaagccggcatgtatgggatggcgttaccgcgtcagtatggcgggttgaatttttcaacgataccctacgtgatggctgccgaacttgtgagtcgtgctgatgccggtttggcaatattggggttgcaagattctcggccgatctga

SEQ ID NO: 72766 - protein, 146 aa, Unknown
  Obtained from environmental sample
  misc_feature (1)..(146): Xaa is any amino acid
MNFYKENTALKFQLSHPLMRKIVDLREKNYADKDKYDYAAQDFEDAIDNYERVLEIVGEICGDIIAPNAESVDHDGPTVVNNRVVYAAGTQQNHDALVQAGMYGMALPRQYGGLNFSTIPYVMAAELVSRADAGLAILGLQDSRPI

SEQ ID NO: 72767 - DNA, 399 bp, Unknown
  Obtained from environmental sample
  misc_feature (1)..(399): n is a, c, g, or t
ttgattgtcaatttgtttgngcatgcaaagtatgatttttttatttcatgtatagaaaatcactatcaaacaatcctgtttgttttggcactgattttctgtacaagtcctgccaatgcttttataaaaaacacaatggctgcatatcgtatttttcctattgaggaaggtgaaaatcaatcatttgtgaatgcaggtcgagtaattggcacgctcgaaaggctacttacttttgtactgatagtgttcaatcagtttgccgctgttgggtttgtgtttgccgccaagtctattttacgctatcgcgatactcaaactgctaaaaccgaatatttgcttgtcggttcgttgttgagttttggaatcgcgattgtgttgggaattttatttaattgttaa

SEQ ID NO: 72768 - protein, 132 aa, Unknown
  Obtained from environmental sample
  misc_feature (1)..(132): Xaa is any amino acid
MIVNLFXHAKYDFFISCIENHYQTILFVLALIFCTSPANAFIKNTMAAYRIFPIEEGENQSFVNAGRVIGTLERLLTFVLIVFNQFAAVGFVFAAKSILRYRDTQTAKTEYLLVGSLLSFGIAIVLGILFNC

SEQ ID NO: 72769 - DNA, 507 bp, Unknown
  Obtained from environmental sample
  misc_feature (1)..(507): n is a, c, g, or t
atgaaaaccatagcatatatacccgttcgcggcggcagtaaatccatacctatgaaaaacattaagttcatagctggaaagccacttgtttggtatgccgcgcaagccgcaaataattgtaaatatattgattgcatatatatagcaacagatagtgatgaaataaaaaacacggtgttatcattcggttttgataaagttcaggtaataggcagaagcaaggaatcagcttctgatacggcttcaaccgaatatggcatgcttgaatttgcggccaaatatgattttgaaaaaattgctcttgtacaggcaacatcaccactaattacttccatagatttagaaaaaggatttgaaatgttttcgggagaaacagatagcgttttgtctgttgtgcagcaaaaacgatttatctggaaaaataattccactggctttgccgagccaatcaattatgattttcttaatcgccctagaagacaagaatttgacggttttttttgttga

SEQ ID NO: 72770 - protein, 168 aa, Unknown
  Obtained from environmental sample
  DOMAIN (4)...(166): Cytidylyltransferase
  misc_feature (1)..(168): Xaa is any amino acid
MKTIAYIPVRGGSKSIPMKNIKFIAGKPLVWYAAQAANNCKYIDCIYIATDSDEIKNTVLSFGFDKVQVIGRSKESASDTASTEYGMLEFAAKYDFEKIALVQATSPLITSIDLEKGFEMFSGETDSVLSVVQQKRFIWKNNSTGFAEPINYDFLNRPRRQEFDGFFC

SEQ ID NO: 72771 - DNA, 369 bp, Unknown
  Obtained from environmental sample
  misc_feature (1)..(369): n is a, c, g, or t
atggctgagaagaaaaaagcttcggtggagaaaaagacgacggaaaagaaaataaccgccgaggcgcggcactatgacgttctgcgcgcgccgataatttcggaaaaagcggcgcggctgtcggaggcgaacggcctggcgttcgaggttgctccgtccgctacgaagaanagcatcgcctcggcgatcgcggcgatatacggcatcatgccgaagaaggttaatattgtgaacgcgaagggaagccttcggcgattccgcaacaaatcgtccggcataaccaaggcgataaagaaagcgtatgtgaaaaatgccggagggccagactatagacatattggccgaagcgggaaaaggaaaagtaaatga

SEQ ID NO: 72772 - protein, 122 aa, Unknown
  Obtained from environmental sample
  DOMAIN (25)...(114): Ribosomal protein L23
  misc_feature (1)..(122): Xaa is any amino acid
MAEKKKASVEKKTTEKKITAEARHYDVLRAPIISEKAARLSEANGLAFEVAPSATKXSIASAIAAIYGIMPKKVNIVNAKGSLRRFRNKSSGITKAIKKAYVKNAGGPDYRHIGRSGKRKSK

SEQ ID NO: 72773 - DNA, 462 bp, Unknown
  Obtained from environmental sample
  misc_feature (1)..(462): n is a, c, g, or t
atgcccgggaacgcgctgcctttgaagaacattccgataggaccggtcgtgcataatgtcgagacaaagccgggcgcgggcgcgcggtttgcgcgaagcgcgggctgcggcgtgcaactgatgggcaaggacggcgtctacgcgcagataaagatgggcagcggcgaacttcgcaagatccattcggattgccttgcgacgatcggttccgtgtcgaatccggatcagaggaacgtaaagttgggcaaggctgggcgcgcgcggtggcttggggtgagaccgacaaacaggggcgtggcgatgaatccggtagatcatccgcacggcggcgggaacggccgcggcaaagggcatcatccgcagtcgcggacgggcgttctggccaagggattcagaaccagaaagaacaagctgacgcagaagttcataatccgttcgcgtcatctaagcaaaaagaaataa

SEQ ID NO: 72774 - protein, 153 aa, Unknown
  Obtained from environmental sample
  DOMAIN (1)...(127): Ribosomal Proteins L2, C-terminal domain
  misc_feature (1)..(153): Xaa is any amino acid
MPGNALPLKNIPIGPVVHNVETKPGAGARFARSAGCGVQLMGKDGVYAQIKMGSGELRKIHSDCLATIGSVSNPDQRNVKLGKAGRARWLGVRPTNRGVAMNPVDHPHGGGNGRGKGHHPQSRTGVLAKGFRTRKNKLTQKFIIRSRHLSKKK

SEQ ID NO: 72775 - DNA, 858 bp, Unknown
  Obtained from environmental sample
  misc_feature (1)..(858): n is a, c, g, or t
ttggtcgttaatgagacgcaggaagcctttgtggtatcaggcggggtgtacgacggcccgtttgccggcggccgccataccttaactaccgaaaatcttccccttgtgcgcgatgcgatcggattagccttcggggggagaagcccctttacggctgaagtgtggtttgtcaacagaaccgtcaagatggatatgaaatgggggactcctgacccggtatatatcgaagatccaaaatataaaatcatggtgccggtgcgcgcgtatggtcagtatggaattcaggtggaggagtccaaaaaatttctgatgaaactcgtggggactgtccaccagtttaacgcggatgttctcaaccggtattttaatggcgtattgctgacaaagatcaaggcttttattgcgcaatatttcgtcaaacgaaatttttcaatactggatattcataccaatattgaagaattatctcttgaaattcaacagtccatcgctcctttgtttatggagtttggggtaataacatctcatttttacgtccattccgtgaatgttccggaagatgaccccgcagtggtcagccttcgttccgcattagcgaaaaaggcggaaatggggatattgggcttcgactatcaacaggaaagaagctttgacgttctacaggcagcggccgggtccaacgggacagcgggcacgatgatgggggccggcatgggcatgggcatggccgtgagcatgggaagccaagtgtcgcanatcataaatcaatccatgggtgccggccagatcccttcctcgcccgttccctccactccaacttccggagcatccacgcctgcggatccaaacaaattatag

SEQ ID NO: 72776 - protein, 285 aa, Unknown
  Obtained from environmental sample
  misc_feature (1)..(285): Xaa is any amino acid
MVVNETQEAFVVSGGVYDGPFAGGRHTLTTENLPLVRDAIGLAFGGRSPFTAEVWFVNRTVKMDMKWGTPDPVYIEDPKYKIMVPVRAYGQYGIQVEESKKFLMKLVGTVHQFNADVLNRYFNGVLLTKIKAFIAQYFVKRNFSILDIHTNIEELSLEIQQSIAPLFMEFGVITSHFYVHSVNVPEDDPAVVSLRSALAKKAEMGILGFDYQQERSFDVLQAAAGSNGTAGTMMGAGMGMGMAVSMGSQVSXIINQSMGAGQIPSSPVPSTPTSGASTPADPNKL

SEQ ID NO: 72777 - DNA, 834 bp, Unknown
  Obtained from environmental sample
  misc_feature (1)..(834): n is a, c, g, or t
atggtagatgatggatttagcggtacaacgccaaatcgccctgcgtggcaagaagttattgctaaagtcgagaacggcgaaataccggtaataattgccaaagacagcagccgtataatgcgcgattatgtccttatggggttttatcgtcagatgttccgggataaaggcgttcgtttaatatgcgttgcagaaaattacgacagcgcaaatggcacagacgacgaccttgtgccgtttaaggatattttcgctgaatggcacgcaagggacacaagccgtaaaatcaaggctatattcggggcaaggacagccaacggcaaccatgttacaggggcgttgccatacggatatatccacgaccccaatgaccgccagaaatggatattggatgaagcggccgcgccggttgttaaaaggttgtttcttggcactatcgcggggaaaagccccacacagcttgctaacgagttatcagccgaaggtattttaacgccgtccgcccattggaacaatatcggggcgggtatgcccggcaaatcaaacgccaaccctacaacatggtctgtcgctgctatagtgaatattctcggcagagaggaatacattggcaggaaagtcctcaataaaaccaccaaagaaaactataaaaccaaaaaacgcagccccaacccggacggcaaactggtattcgagggcgctattccggcaatcgtcaccgaggaagaatggacggttgttcagcgattganggaacgcgccgccgccgcaaaaagtgacaggcgaaccaaatccgcttacaggcatcctctattgttcagactgcggacataa

SEQ ID NO: 72778 - protein, 277 aa, Unknown
  Obtained from environmental sample
  DOMAIN (132)...(254): Recombinase
  misc_feature (1)..(277): Xaa is any amino acid
MVDDGFSGTTPNRPAWQEVIAKVENGEIPVIIAKDSSRIMRDYVLMGFYRQMFRDKGVRLICVAENYDSANGTDDDLVPFKDIFAEWHARDTSRKIKAIFGARTANGNHVTGALPYGYIHDPNDRQKWILDEAAAPVVKRLFLGTIAGKSPTQLANELSAEGILTPSAHWNNIGAGMPGKSNANPTTWSVAAIVNILGREEYIGRKVLNKTTKENYKTKKRSPNPDGKLVFEGAIPAIVTEEEWTVVQRLXERAAAAKSDRRTKSAYRHPLLFRLRT

SEQ ID NO: 72779 - DNA, 558 bp, Unknown
  Obtained from environmental sample
  misc_feature (1)..(558): n is a, c, g, or t
atgaatgaattaaatgtttccaatttctgccacggttattatgataagatgcgattgatgtttatggatgagtctgtctttggacggataacgaacatcaggaactgttggtgcccatcaggggtaagaccgagcgtatcatcgttgaaaaccagggaatatatctatgcgtatggtgcggttgatccaataaacggtgatagttccttcattgttgccggagggtgcaatacagcgtggacaaatctgtttcttgatacattagccaaaaagttccctaatgactatatattgctttgtgaggataacgcaagttggcacaagtcaaataacctcatcataccggacaatattgaacttttctttatcccgcccgccactcctgaaatgaatccgattgaacagatttgggatgagttgaaagaaaaggatttcgataatcgtttctttaatacactgaataaagtgattgaccagctatgtatcagcatcaacaatttagataaagaaactataaaatcaatcacagggagaaaatggattttatcaactgtttga

SEQ ID NO: 72780 - protein, 185 aa, Unknown
  Obtained from environmental sample
  misc_feature (1)..(185): Xaa is any amino acid
MNELNVSNFCHGYYDKMRLMFMDESVFGRITNIRNCWCPSGVRPSVSSLKTREYIYAYGAVDPINGDSSFIVAGGCNTAWTNLFLDTLAKKFPNDYILLCEDNASWHKSNNLIIPDNIELFFIPPATPEMNPIEQIWDELKEKDFDNRFFNTLNKVIDQLCISINNLDKETIKSITGRKWILSTV

SEQ ID NO: 72781 - DNA, 363 bp, Unknown
  Obtained from environmental sample
  misc_feature (1)..(363): n is a, c, g, or t
gtgacggccatcggcaaccttgcgtcgctttaccgctccgagggctatctggaagaagccatccaactgagggctcttgaaggccggttgcggagaatggacccgtaccaccaggcattcctcgccgccgaggcaatggcaaaaagcgactacaaaaaagccggcaagctgatccagagggcgataaaaatacatccaaacgattccgacttctacctgactttgagcaacatatacagggcccaggacaaaaacgcaaaagcgctccaggcccttctcnaagcaaggcaccacgctatccaagagagggccgagtatttggacgcgctgattgatgcgtttgagtccggcctcgcgggctag

SEQ ID NO: 72782 - protein, 120 aa, Unknown
  Obtained from environmental sample
  misc_feature (1)..(120): Xaa is any amino acid
MTAIGNLASLYRSEGYLEEAIQLRALEGRLRRMDPYHQAFLAAEAMAKSDYKKAGKLIQRAIKIHPNDSDFYLTLSNIYRAQDKNAKALQALLXARHHAIQERAEYLDALIDAFESGLAG

SEQ ID NO: 72783 - DNA, 579 bp, Unknown
  Obtained from environmental sample
  misc_feature (1)..(579): n is a, c, g, or t
ttgcatccgagtcatttagcaacatatgataccaacgatcatcccaatgttataaaatttcggagcattttcaagccgctgggcctaaatggcccaagaatttccttcattttgcacaataaaaaataccgagagacaatagcatctaatatggattcccttcagggtggaatagattattttagtgttgaccttgctacgaaagtacttaaaaacaaggattttttaaaagaactattggaaatttctcataaacaagtaataaatctaaaaaataaagcagaaataattacaaatttaactaacatagaattgactccactagaaaatggatatattggcagtttaattgttcattttgataaatcattagcacataatgaaagtagaagaaaattgctggaattttgcaaaaaaaacaatatgcccgtgatactaggctccagcatgtattttgcgaatgaagattttatagaacacatacgattaaattattttatacatgaatcattgtttatcaatggggttagattaatttcagaattctataattctgccaattatacactcgcaaaatag

SEQ ID NO: 72784 - protein, 192 aa, Unknown
  Obtained from environmental sample
  misc_feature (1)..(192): Xaa is any amino acid
MHPSHLATYDTNDHPNVIKFRSIFKPLGLNGPRISFILHNKKYRETIASNMDSLQGGIDYFSVDLATKVLKNKDFLKELLEISHKQVINLKNKAEIITNLTNIELTPLENGYIGSLIVHFDKSLAHNESRRKLLEFCKKNNMPVILGSSMYFANEDFIEHIRLNYFIHESLFINGVRLISEFYNSANYTLAK

SEQ ID NO: 72785 - DNA, 804 bp, Unknown
  Obtained from environmental sample
  misc_feature (1)..(804): n is a, c, g, or t
ttggtcgagaaacccctggtaattacgacggaggatatgcgcaaactgcgcgagatcgcggatgcgtccggcgcgattatcgtggcgggtcaaacccgccgatacaccgccgacgcggtgctggcgcgtgaggcgatgagtgatccgcgcgacttcgggaagcttaagaccttcgatatccagagcttgcaagacatccgctcgtttacttcgcccgaacgcccccactggctgttggacgggaagctcgcgggcggcggcgtggccatatcaaacgcgatccaccagattgacctggtgcggttcgtcaccggcgccgactactcgtccgtcatggctgtcgccgactttgaggaaccgtttataaacggcgcggagtccaggatctccgccgtgcttgagctgaccaacggcgcgcacggcacgctgcacgcagactacctcgctacgcgctgcccgttctcggaggcgatggttttaattggcgaacacggttcgctcacccagcacgcgcagcgcctcggtgactacaacgggccgctcagtgtctcgacttcccacggcgtgcggtcaaccgacttctcccaacagcattcaggttggcatccgttgctgcctaaagccgacggcgccggaaagccgcaggagtcattcacaaagcagctcttgcacttcgccgcggtggtacgcggcgaggagagtccgctaagcccactcgtggagaatttcaacaccatcgccgttattgaggcgatggttcagagcgccaggtccggtacacgcatggaggtagcaaaatggtag

SEQ ID NO: 72786 - protein, 267 aa, Unknown
  Obtained from environmental sample
  DOMAIN (43)...(163): Oxidoreductase family, C-terminal alpha/beta domain
  misc_feature (1)..(267): Xaa is any amino acid
MVEKPLVITTEDMRKLREIADASGAIIVAGQTRRYTADAVLAREAMSDPRDFGKLKTFDIQSLQDIRSFTSPERPHWLLDGKLAGGGVAISNAIHQIDLVRFVTGADYSSVMAVADFEEPFINGAESRISAVLELTNGAHGTLHADYLATRCPFSEAMVLIGEHGSLTQHAQRLGDYNGPLSVSTSHGVRSTDFSQQHSGWHPLLPKADGAGKPQESFTKQLLHFAAVVRGEESPLSPLVENFNTIAVIEAMVQSARSGTRMEVAKW

SEQ ID NO: 72787 - DNA, 435 bp, Unknown
  Obtained from environmental sample
  misc_feature (1)..(435): n is a, c, g, or t
gtggacgtgcgaggagcaatctcaatgcttatcaagtgggaatcggacttctgggaacacgtccagtctgatatacctccatgcctggacggatcggaggcgtcggcggagtttttaaagaaacggtacccagaagccgtccctcattccaaagtaacgctccccgatgaagccgtcgctctgataaatcagtttgaagaggcaaaagaaaaagtagatttctatacgatggagaagcaaaaaagcgagaacctgttaaagcagatgttaggcagcaacgatacagggactgccggagacagggttatcacttggataaatgtacgtcaagaacggttagacaacaaatcattggaagccgaccatcccgacctctgcaaaaaatacacgaaccaaacatcgtaccgccggtttactgttaagaaagcaagctga

SEQ ID NO: 72788 - protein, 144 aa, Unknown
  Obtained from environmental sample
  misc_feature (1)..(144): Xaa is any amino acid
MDVRGAISMLIKWESDFWEHVQSDIPPCLDGSEASAEFLKKRYPEAVPHSKVTLPDEAVALINQFEEAKEKVDFYTMEKQKSENLLKQMLGSNDTGTAGDRVITWINVRQERLDNKSLEADHPDLCKKYTNQTSYRRFTVKKAS

SEQ ID NO: 72789 - DNA, 450 bp, Unknown
  Obtained from environmental sample
  misc_feature (1)..(450): n is a, c, g, or t
ttggaggaccttcataaagcccgacgggctttttcaggaacaaagcccgcaaacctgattgggatgccctctgcgctggtgggcaaacaggggggcaaggtgccaaacgacagggcggcgttgagcgaactcccgggcgtgggccgaaagaccgccaacgtggtgcttgccaatgccttcggtgtccccgcgctggcggttgacacgcacgtattccgcgtggccaagcgaattggtttgtcggctgccgacacgccagacggtgttgaaagcgacctttgcgccctctttccggaagaatcttggattatgctgcaccacagactgatttggcacggccgccgagtctgctccgccagaaaccccaagtgccccgaatgcacactctcgaagctgtgcgccgttggcgctggcgcgatacccgatccgcatggaaagacaaaggggtag

SEQ ID NO: 72790 - protein, 149 aa, Unknown
  Obtained from environmental sample
  DOMAIN (29)...(58): Helix-hairpin-helix motif
  misc_feature (1)..(149): Xaa is any amino acid
MEDLHKARRAFSGTKPANLIGMPSALVGKQGGKVPNDRAALSELPGVGRKTANVVLANAFGVPALAVDTHVFRVAKRIGLSAADTPDGVESDLCALFPEESWIMLHHRLIWHGRRVCSARNPKCPECTLSKLCAVGAGAIPDPHGKTKG

SEQ ID NO: 72791 - DNA, 414 bp, Unknown
  Obtained from environmental sample
  misc_feature (1)..(414): n is a, c, g, or t
atgaaccggtatgttttggatgcttgtgctttgattgcattattgcaagacgaaaaaggagccgatgaagtagctgatgttttcgaagctgccgaaaatggaactgctgccatcacgatgcataaactgaatttgcttgaagtctattacaaagcttatcggactcatggtaaagagcgagctaaccgtatgcttgaaggtttcaaaaagcgccctgtattgattagtcaggaaataggtgatgagctttttatggaggccggacgttttaagggcacgtatacaatctcatttgcagattcgatcgtattggcgcaagcgtcgatcttaaatgccgaactcttaacagccgatcatcatgagtttgatgcgatagagaaaagcgagcctatccgttttcgatggatacgataa

SEQ ID NO: 72792 - protein, 137 aa, Unknown
  Obtained from environmental sample
  DOMAIN (4)...(136): PIN domain
  misc_feature (1)..(137): Xaa is any amino acid
MNRYVLDACALIALLQDEKGADEVADVFEAAENGTAAITMHKLNLLEVYYKAYRTHGKERANRMLEGFKKRPVLISQEIGDELFMEAGRFKGTYTISFADSIVLAQASILNAELLTADHHEFDAIEKSEPIRFRWIR

SEQ ID NO: 72793 - DNA, 786 bp, Unknown
  Obtained from environmental sample
  misc_feature (1)..(786): n is a, c, g, or t
ttgaccgggacgccggtcatgaattacgtgactcggcgcaaactggaattcgcgttgtatgatttgtcgcagggtaagcggattatagacgttgcgatggactacgggtttgaaacccatgccgggtttaccaaagcatttaagaagtgttttgggtatccgccttcgttatatcgtctgcacgtttctgtaattccaccggtaaaagcgacagtttataacgtaaaactaaaatatggaggaatcagtatgcagattcaaatcaaggaaatcaagcctttttccgtggtgggatacgcttcgcgtcataagatgccggaagttaatgtgaaatgcatctctgatattccggtattttgggacaaaataaatctggaatatgaaaaggcgctttccacattacatcacacttacgcaaaatcacatcactgcgaagttgccgtctgcttcgatatagacgaagaacatgactgcttcacttatatgcttggcgtaggtgttgatgaagcggataagggtgtcctgcaaaggccggggacgtattttcatcaaatgcaggggggcttatatgccatatttaccactccgcttgttgatgaggaacaatatgtccaatccatacacgatacttggaaacaaattctgaataattggctgcctgaatcaaagtacgaatacgatgacgtgcggattgattatgaatattacgatgaacgcgaccattcttggctgcatgacggaaaaagtagaatggatatttacgttcccattcgaggacggcagtaa

SEQ ID NO: 72794 - protein, 261 aa, Unknown
  Obtained from environmental sample
  DOMAIN (17)...(60): Bacterial regulatory helix-turn-helix proteins, AraC family
  misc_feature (1)..(261): Xaa is any amino acid
MTGTPVMNYVTRRKLEFALYDLSQGKRIIDVAMDYGFETHAGFTKAFKKCFGYPPSLYRLHVSVIPPVKATVYNVKLKYGGISMQIQIKEIKPFSVVGYASRHKMPEVNVKCISDIPVFWDKINLEYEKALSTLHHTYAKSHHCEVAVCFDIDEEHDCFTYMLGVGVDEADKGVLQRPGTYFHQMQGGLYAIFTTPLVDEEQYVQSIHDTWKQILNNWLPESKYEYDDVRIDYEYYDERDHSWLHDGKSRMDIYVPIRGRQ

SEQ ID NO: 72795 - DNA, 432 bp, Unknown
  Obtained from environmental sample
  misc_feature (1)..(432): n is a, c, g, or t
gtggacggcgtaccgacgctcctgccggagatccgcgatatggataaattcgacaaaaaccgtcaggaaatagaaatcggcgttcagtacacatactggatgctcatggacaatccctggacacagcagttccccattgaatattcgcctgctctggaacagccccaactatggacgcggccctatgcatactcctttgccgtttacgacaggctggacatggaaccgggcagcgacgaggctcttatatccgacgcgatcacccgccggtggagccaggatctgccaagactgctcctggcgaaaacggaagatgagtttgataaaatctgggccgatttccagaaattcaaaacggatcaaggttatgcgaaattgcaggcgaagcagacagagctgatgaaggccaataaagttaaaatggggaaataa

SEQ ID NO: 72796 - protein, 143 aa, Unknown
  Obtained from environmental sample
  misc_feature (1)..(143): Xaa is any amino acid
MDGVPTLLPEIRDMDKFDKNRQEIEIGVQYTYWMLMDNPWTQQFPIEYSPALEQPQLWTRPYAYSFAVYDRLDMEPGSDEALISDAITRRWSQDLPRLLLAKTEDEFDKIWADFQKFKTDQGYAKLQAKQTELMKANKVKMGK

SEQ ID NO: 72797 - DNA, 888 bp, Unknown
  Obtained from environmental sample
  misc_feature (1)..(888): n is a, c, g, or t
ttgatccatcagggagacaacggcggaattcgggtatccattattgacgattattccgatgttggttatggcccaggcgcggcgaacactcccacagccagtaattactactatgagtaccgtatctttaagaatgcgcccacctccgccacagacccgacatggacaccaatcctgttgggaaccaataccaatacgggcaagaatgtatccgacaagccgatttctctgatgggttccgctccggttgcttcttactggaccggaagcgatattcccgacggctcgtatattctccagctcagggttggagaccggttgggcaatggcacaaccgcaggcacaaccacgccctggtacaccaactatccgtttaccgtgaaccgcggcggcccggtgattaatgtaaccacagcgccggcagccaaatacggcggcgcttcgcccaatacgtccacgatttccatggccggaacggtcagagacggcgactttgacagcctggttattaccgtaaccggcccgtcaggtactgtaaaaacattccccacaacacccgcgacgcttacgcttgattcggcaaccggtctctataactggagttggacggtgaccggtactgatttctccggcctcgaagagggaaccaatgtcataacccttaccgccagagacaaagccggcaatgagccgtcagaggcgcagaaatccttaattaagtatacctttgtcaaggataccggtaagcccaaagcgcaattcctcaacattaacggggacgcgataatgaccaaggctgagtgggacgcggacaacgcgaagaaaaacgatgtcggctcgattcaggatttaacccggccggaagatacgcggtatatttaccgatga

SEQ ID NO: 72798 - protein, 295 aa, Unknown
  Obtained from environmental sample
  misc_feature (1)..(295): Xaa is any amino acid
MIHQGDNGGIRVSIIDDYSDVGYGPGAANTPTASNYYYEYRIFKNAPTSATDPTWTPILLGTNTNTGKNVSDKPISLMGSAPVASYWTGSDIPDGSYILQLRVGDRLGNGTTAGTTTPWYTNYPFTVNRGGPVINVTTAPAAKYGGASPNTSTISMAGTVRDGDFDSLVITVTGPSGTVKTFPTTPATLTLDSATGLYNWSWTVTGTDFSGLEEGTNVITLTARDKAGNEPSEAQKSLIKYTFVKDTGKPKAQFLNINGDAIMTKAEWDADNAKKNDVGSIQDLTRPEDTRYIYR

SEQ ID NO: 72799 - DNA, 930 bp, Unknown
  Obtained from environmental sample
  misc_feature (1)..(930): n is a, c, g, or t
ttggtacgccagaatctcgttccaacaattaaacgggcaacaatatgctattttgcggacttgatgtgggaaccaccggcgttaaagccatggtcttcgatgaaaaaggaacacctgctttacaacgcctatcgcgcctatgagattgagaccgcctctgacgggactcgtttgcttaaagctgcggaactctggcaaaagacaagagaaagctttgcggaagttgcaggtcatatacagggcgatcttgccgccgtctgcgcggactcttttggagaagcgtttgtcgcgctggatgccgaagacaacataatctgcgatccgatgctctttaccgaccgctggggagaaaaggaatactttgaggccgaaaagaaaacaagcgcagctgagattgctaaaatatgcgggctgcccttgtcgccttcatacagcctgtcaaagatactttatttgcgggaacagtgtccagaaatctataaaaagattgcgagaatacttctgatccaggattttatcaactttaagctctgcggagaatgcgcggcggattattccaccgccggcaggacaatgtttttcgatgtgcattcctgtctttggagcgatgaattgattaccctcttcgggcttgagaaaaaacatttttcgaaacctgaacctatgggcactgtaattgggacattgcgaaaggagcttgcccaggaactgggaatcaagggaaccatcaaggtcgtcgttggggggcatgatcagccggttaacgccattggcgctggattaaaaaacgggtatgtagtgaattccatgggaaccgctgaatgtataactcccccttatcccggtgtattgcccggagactttatatgtttcagagggataccattggagcttcttggaacaaaaataaatttgctgtctggcgtataa

SEQ ID NO: 72800 - protein, 309 aa, Unknown
  Obtained from environmental sample
  DOMAIN (39)...(258): FGGY family of carbohydrate kinases, N-terminal domain
  misc_feature (1)..(309): Xaa is any amino acid
MVRQNLVPTIKRATICYFADLMWEPPALKPWSSMKKEHLLYNAYRAYEIETASDGTRLLKAAELWQKTRESFAEVAGHIQGDLAAVCADSFGEAFVALDAEDNIICDPMLFTDRWGEKEYFEAEKKTSAAEIAKICGLPLSPSYSLSKILYLREQCPEIYKKIARILLIQDFINFKLCGECAADYSTAGRTMFFDVHSCLWSDELITLFGLEKKHFSKPEPMGTVIGTLRKELAQELGIKGTIKVVVGGHDQPVNAIGAGLKNGYVVNSMGTAECITPPYPGVLPGDFICFRGIPLELLGTKINLLSGV

SEQ ID NO: 72801 - DNA, 693 bp, Unknown
  Obtained from environmental sample
  misc_feature (1)..(693): n is a, c, g, or t
atgtcccggggggagccggtttcccacacggcccggactctttcgcgttacctggccgccctggtcatccgcacctatgcccagagcctcttaagcgaactggcccgcttcggctccatccccatcatcaacgccctgaccgatgagggccatccctgccaggtgctgaccgacatcttcaccgccttggagaagttccccggcctcccggtggaaaggctcaaggtggcctggatcggcgacgggcacaacatggccaattcctggattgaggcggcgggctttttcggcttcgccttgaagctggcctgcccggaaggctttgagcccgcccccgaggtcctggcccgggcccggtcccgtaaccccgccgttagcctgacccatgacccccgggaagctgtccgggaagccttggccgtcaacaccgacgtgtgggccagcatgggccaggaggccgagcgggaccggcgggaaaaagctttccggcctttcctggttgattcggccctcatggcccaggccgatccccgggccattttcatgcactgcctgccctcccaccccggcgaggaagttactgaggaagtgctggaaagcccggcctcggccattttcgacgaggctgaaaaccgtctccatgtccagaaggccctcatggaatttttgattccgcccctgaacaaccggtga

SEQ ID NO: 72802 - protein, 230 aa, Unknown
  Obtained from environmental sample
  DOMAIN (3)...(65): Aspartate/ornithine carbamoyltransferase, carbamoyl-P binding domain
  misc_feature (1)..(230): Xaa is any amino acid
MSRGEPVSHTARTLSRYLAALVIRTYAQSLLSELARFGSIPIINALTDEGHPCQVLTDIFTALEKFPGLPVERLKVAWIGDGHNMANSWIEAAGFFGFALKLACPEGFEPAPEVLARARSRNPAVSLTHDPREAVREALAVNTDVWASMGQEAERDRREKAFRPFLVDSALMAQADPRAIFMHCLPSHPGEEVTEEVLESPASAIFDEAENRLHVQKALMEFLIPPLNNR

SEQ ID NO: 72803 - DNA, 342 bp, Unknown
  Obtained from environmental sample
  misc_feature (1)..(342): n is a, c, g, or t
ttgaccgatacagaatgtgtccggttgaatgaaattatgccggacgttcccggcgttttataccaaagtatcggttcgcggttgcgttcgcggcggagcgctccgttcccgttaaatgtgggatatagtattatgagttccgcgggcgaaaaagacaatgacgggatggtttccacagaatcaatgatgtggggcgaattcctcggcgtattaagtcctaaaggcaaagacggaatatcccacggagacgtaattgacatcctgggtaaaaatatagaaggttttgatgtatgtgaattgtacgttgatctggttaacaagttaaaagcaagggggctatag

SEQ ID NO: 72804 - protein, 113 aa, Unknown
  Obtained from environmental sample
  misc_feature (1)..(113): Xaa is any amino acid
MTDTECVRLNEIMPDVPGVLYQSIGSRLRSRRSAPFPLNVGYSIMSSAGEKDNDGMVSTESMMWGEFLGVLSPKGKDGISHGDVIDILGKNIEGFDVCELYVDLVNKLKARGL

SEQ ID NO: 72805 - DNA, 441 bp, Unknown
  Obtained from environmental sample
  misc_feature (1)..(441): n is a, c, g, or t
gtggaacttcccgacggattatataaatctttttctttttttgtgaacacatggtataaaatatggggcgataaaaagcccgatttctttacaagcagcaggcagttgtcggagaattactgtaaaagttttaacgagcgcaaccaggacaaagaaggcgtttactatcaaagctatgccgcgatgatgcggtatttcttcagtgatccggcttttcttgttatgcatccttttatcacggctattgagggtgataatgacggcttatgcccggttgaatcggccaaatggggcgattttaaaggcatcataacaacgaaagggatttttggcatatcccattcaggcattattgatttgtacaggctaaattacaaaggaataaatattcttgatttttatcttggcatcttaaagggattatcggaaagagggttttag

SEQ ID NO: 72806 - protein, 146 aa, Unknown
  Obtained from environmental sample
  misc_feature (1)..(146): Xaa is any amino acid
MELPDGLYKSFSFFVNTWYKIWGDKKPDFFTSSRQLSENYCKSFNERNQDKEGVYYQSYAAMMRYFFSDPAFLVMHPFITAIEGDNDGLCPVESAKWGDFKGIITTKGIFGISHSGIIDLYRLNYKGINILDFYLGILKGLSERGF

SEQ ID NO: 72807 - DNA, 855 bp, Unknown
  Obtained from environmental sample
  misc_feature (1)..(855): n is a, c, g, or t
ttgtccgacaacgcccttctggacatcatccgcagttacacgcgtgaagccggcgtgcgcaatctggagcgcgaactggccgccctgtgccgcaaaaccgccatcaagctggtggaaagcgggcagaccgatgcggctgttcaggtcagccgccagaacttgagttcctttcttggggtcaaacgctacctgtacggcgagcgcgaaagcgcgccccaagtgggcgtgtgcaccggcctcgcctacaatgaacgcggcggcgccctgcttctggttgaaaccgccatcatgcccggcaccggcaaggtggtcactaccgggcagcttggcgaggtcatgaccgaatccgcccaagccgctttttcctatatccgctcccgctcggatctgttcgatctgcgcgccgacttccacaaggatgcggacatccacgtgcatgtgcctgaaggcgccacgcccaaggacggcccctcggccggcatcaccatgaccacatccatcgtctcggccctgctcggcattcccgtgcgcaacgatgtggccatgaccggcgaagtcaccctgcgcggccgggtgctgcccattggcggactgcgcgaaaaattgctggccgcccgccggggcggcatcagcacggtgatcattccccgtgaaaacgagaaagacctgaaagaagtgccgggcgaagtgctcaagtccttgaaaatcgtcttcgttgaccatgtggacgaggtgctgcctctggccctgacggccaaggaagacgaactcttcggcggccgcgcccactgcatgcttttctcgcccagcctgcgccgcaacgcccaggccgattccccggccccggcgcagtaa

SEQ ID NO: 72808 - protein, 284 aa, Unknown
  Obtained from environmental sample
  DOMAIN (48)...(252): Lon protease (S16) C-terminal proteolytic domain
  misc_feature (1)..(284): Xaa is any amino acid
MSDNALLDIIRSYTREAGVRNLERELAALCRKTAIKLVESGQTDAAVQVSRQNLSSFLGVKRYLYGERESAPQVGVCTGLAYNERGGALLLVETAIMPGTGKVVTTGQLGEVMTESAQAAFSYIRSRSDLFDLRADFHKDADIHVHVPEGATPKDGPSAGITMTTSIVSALLGIPVRNDVAMTGEVTLRGRVLPIGGLREKLLAARRGGISTVIIPRENEKDLKEVPGEVLKSLKIVFVDHVDEVLPLALTAKEDELFGGRAHCMLFSPSLRRNAQADSPAPAQ

SEQ ID NO: 72809 - DNA, 456 bp, Unknown
  Obtained from environmental sample
  misc_feature (1)..(456): n is a, c, g, or t
ttgcggcgcaggctgggcgagaaaagcatgcagtgggcgcggccgccgaagagttcgtcttccttggccgtcagggccagaggcagcacctcgtccacatggtcaacgaagacgattttcaaggacttgagcacttcgcccggcacttctttcaggtctttctcgttttcacggggaatgatcaccgtgctgatgccgccccggcgggcggccagcaatttttcgcgcagtccgccaatgggcagcacccggccgcgcagggtgacttcgccggtcatggccacatcgttgcgcacgggaatgccgagcagggccgagacgatggatgtggtcatggtgatgccggccgaggggccgtccttgggcgtggcgccttcaggcacatgcacgtggatgtccgcatccttgtggaagtcggcgcgcagatcgaacagatccgagcgggagcggatatag

SEQ ID NO: 72810 - protein, 151 aa, Unknown
  Obtained from environmental sample
  misc_feature (1)..(151): Xaa is any amino acid
MRRRLGEKSMQWARPPKSSSSLAVRARGSTSSTWSTKTIFKDLSTSPGTSFRSFSFSRGMITVLMPPRRAASNFSRSPPMGSTRPRRVTSPVMATSLRTGMPSRAETMDVVMVMPAEGPSLGVAPSGTCTWMSASLWKSARRSNRSERERI

SEQ ID NO: 72811 - DNA, 705 bp, Unknown
  Obtained from environmental sample
  misc_feature (1)..(705): n is a, c, g, or t
atgacccaaatggttcatgtcatgagtaagcgtaacccgctcccccaaaaaatgaatatctttcttgccggtaattcctgtaaggcggcaattgtaaaaaccatatttgatgaagaatgtaaacctatcgagaacgagtatagagaggaattgtcaaaacagggcaaggcacctgcggaaaatattttcgaaatctatcctcctttaggaactatagaagctgaagaaaagaaaaagacacttaaaatcgaagacgttcagaatgatgcttcccggccaaccggaaaaaccggtgtggcgattggattaattatatcccgtccgggttctcagatactggtaaaaaatgcgaatcttgactcccagggggaaaaagctttttcttttcttgtgggtaaaaacagccgtgacaaattcaagcctgtacttgaatttgaatcagagatggggaaatgggtggaattcagacacgcaaatgaaagcaccgtatttttttattttaccagtgacgcanacggaagaacaggaaaattagggatcaacaaaacagaatgccgtatatgcgatctgccggaagttaataaggatgcgtatatttatatacgtccggtcacaccgtcagaatttgaatacaaagtgtcattaacggcggatggcgcacccattgnggaaattaaaagaaatcagccggaagaaggtaaataa

SEQ ID NO: 72812 - protein, 234 aa, Unknown
  Obtained from environmental sample
  misc_feature (1)..(234): Xaa is any amino acid
MTQMVHVMSKRNPLPQKMNIFLAGNSCKAAIVKTIFDEECKPIENEYREELSKQGKAPAENIFEIYPPLGTIEAEEKKKTLKIEDVQNDASRPTGKTGVAIGLIISRPGSQILVKNANLDSQGEKAFSFLVGKNSRDKFKPVLEFESEMGKWVEFRHANESTVFFYFTSDAXGRTGKLGINKTECRICDLPEVNKDAYIYIRPVTPSEFEYKVSLTADGAPIXEIKRNQPEEGK

SEQ ID NO: 72813 - DNA, 402 bp, Unknown
  Obtained from environmental sample
  misc_feature (1)..(402): n is a, c, g, or t
atggtgccactaccccgatacaccaccgtttcgggtattcccgtaacgcaactcattgccaaagataagctcgatgccattattgagcgcaccaagaacggcggcggcgagctggtaaagctcatgggcacatcagcgtggtatgcccctgcagcatcggcagcgcaaatggtggaggctattctgcgcgaccaaaagcgcattttcccctgctgcgtaaagctcgacggacagtacggcatgaaggatattttcattggcgtacccgtaaagctgggcaaggaaggcgttgagcaaatcatcgaaattgagatgaacgaaaccgaacgccacgacttcgacgcttcagccaaagcggtgaaggaggtgatgaacgtgtttgacaacatgaagctcatttag

SEQ ID NO: 72814 - protein, 133 aa, Unknown
  Obtained from environmental sample
  DOMAIN (1)...(130): lactate/malate dehydrogenase, alpha/beta C-terminal domain
  misc_feature (1)..(133): Xaa is any amino acid
MVPLPRYTTVSGIPVTQLIAKDKLDAIIERTKNGGGELVKLMGTSAWYAPAASAAQMVEAILRDQKRIFPCCVKLDGQYGMKDIFIGVPVKLGKEGVEQIIEIEMNETERHDFDASAKAVKEVMNVFDNMKLI

SEQ ID NO: 72815 - DNA, 819 bp, Unknown
  Obtained from environmental sample
  misc_feature (1)..(819): n is a, c, g, or t
ttgggtttaaaagaccgccttccgcaagttttctctattctgcaaactgaaaaagcccgtgagttaacggaaaaccgtgcggtaaccgaaggcggaatacatgatcgtaactggtatgaaaacggaatgtatcaagcattttcccagatgaaacgcattattcgcgaagatggtatagcttcatttgtatttgctcataaagaaactgaccgatgggaagctcttgtttctgcgttaattcagggaggttggtatacaaccggttcatggccaatcgccactgaacgcagacagcgtatgcgtgctcaaggttacgccgctttggaaaccagtgttcaccttgtctgccgcccccgcccaaaagatgcatctattggtgattgggggaaagttcttcgggaactttcactccgtgttggggattggatggaacgtttacagagcgaaggcatacgaggtgcggatctcatctttgcctgtattggtccggcattagaagtatttagtatatatagtaaagtagaaactgctgacggtaatgagataactcttactacattcctggaaaaggtgtgggaagttgtaggtcgaactgcgttagaacagatattgggaaccgctgaagcccgtgcccgtaacggagctgccggtgctctggaagaagacgcccgcttaaccgccctattcctctggacattacaagtatccggtactaataaggcagatgatacttcttctgataaagatgctaatttatctgctgatagtaacgaanaaacagggacagaaaagaaaggcggttatacccttttacgttga

SEQ ID NO: 72816 - protein, 272 aa, Unknown
  Obtained from environmental sample
  misc_feature (1)..(272): Xaa is any amino acid
MGLKDRLPQVFSILQTEKARELTENRAVTEGGIHDRNWYENGMYQAFSQMKRIIREDGIASFVFAHKETDRWEALVSALIQGGWYTTGSWPIATERRQRMRAQGYAALETSVHLVCRPRPKDASIGDWGKVLRELSLRVGDWMERLQSEGIRGADLIFACIGPALEVFSIYSKVETADGNEITLTTFLEKVWEVVGRTALEQILGTAEARARNGAAGALEEDARLTALFLWTLQVSGTNKADDTSSDKDANLSADSNEXTGTEKKGGYTLLR

SEQ ID NO: 72817 - DNA, 360 bp, Unknown
  Obtained from environmental sample
  misc_feature (1)..(360): n is a, c, g, or t
atgacgcccgccatgcacagctcggacagcggcgtacccgtgggctatatcgtgcggatgccctcgggcttcaccttctaccacgcgggcgataccggcctgttcggcgacatggccctctggggcgagctttacccgcttgacctcgccatgctgcccgtgggcggctttttcaccatggacgcccgtcaggcggcgctggcctgcaaaatgctcaaggccaaggccctgctccccctgcactggggcaccttccccgtgctggcttccgacctggacgaactgaaaacggaactcgccaaacaggcgccaaactgccgcctcgtcacgctcacaccgggcgataccgtgtccttgtag

SEQ ID NO: 72818 - protein, 119 aa, Unknown
  Obtained from environmental sample
  misc_feature (1)..(119): Xaa is any amino acid
MTPAMHSSDSGVPVGYIVRMPSGFTFYHAGDTGLFGDMALWGELYPLDLAMLPVGGFFTMDARQAALACKMLKAKALLPLHWGTFPVLASDLDELKTELAKQAPNCRLVTLTPGDTVSL

SEQ ID NO: 72819 - DNA, 351 bp, Unknown
  Obtained from environmental sample
  misc_feature (1)..(351): n is a, c, g, or t
ttgctctgctntctggcggtgcccggccttgtgtatttcggcaacagaatgggtctgggctggctgcaggaattgctggccggacaactgtgggagatcgagaaggtgctggtgctggtggtgaccgtcgtcgcggtcagtatcgccgccttgtggagcacctttatttttgagagacggcgcgacaaattcatcgcaaaagcgaaagagcggcgggagcaggaacagcagatacgcctggaaaaaatccggcaacagcgcagagccgaagctgaagccaaggccaaggccgatgccgaggaagccaaacgccggcagcaggaagaactgcggcaacgcttgcgcgaatag

SEQ ID NO: 72820 - protein, 116 aa, Unknown
  Obtained from environmental sample
  misc_feature (1)..(116): Xaa is any amino acid
MLCXLAVPGLVYFGNRMGLGWLQELLAGQLWEIEKVLVLVVTVVAVSIAALWSTFIFERRRDKFIAKAKERREQEQQIRLEKIRQQRRAEAEAKAKADAEEAKRRQQEELRQRLRE

SEQ ID NO: 72821 - DNA, 453 bp, Unknown
  Obtained from environmental sample
  misc_feature (1)..(453): n is a, c, g, or t
atgcccggcacctcgcgcggcatccagctgaaggacacgatccgcgagcagctggggctgccgctcatcgggcgcgtggcggccggccggccgatcttctcggaggagaatttcgagacgaggctgccgctggacccgtacttgttccagccgcggccgcattacctgctcaaggtcagcggcttgagcatgaaggatgcggggatactcgatggggatctggtggcggtgcaccgggtctccgaggcgcgcaaccgccagatcgtcgtggcgcgcctggagagcgaggtcaccgtgaagcgctacaagcaggagggccacgtggtgtggctgctgcccgagaatgaggactttgagcccatccgggtggacgcacgctcccagccggcgctgagcatcgaaggggtggtggtgggggtgctgcgccgcatgaaggtgcagggcctgagctga

SEQ ID NO: 72822 - protein, 150 aa, Unknown
  Obtained from environmental sample
  DOMAIN (58)...(126): Peptidase S24-like
  misc_feature (1)..(150): Xaa is any amino acid
MPGTSRGIQLKDTIREQLGLPLIGRVAAGRPIFSEENFETRLPLDPYLFQPRPHYLLKVSGLSMKDAGILDGDLVAVHRVSEARNRQIVVARLESEVTVKRYKQEGHVVWLLPENEDFEPIRVDARSQPALSIEGVVVGVLRRMKVQGLS

SEQ ID NO: 72823 - DNA, 498 bp, Unknown
  Obtained from environmental sample
  misc_feature (1)..(498): n is a, c, g, or t
atgccaaaaatactgaagaatttcaatttgtttgtcgacggccgcggatacgcgggccgagtcgaagaagtatcgccgccgaaactggccattaaaacggaagagcttcgcgcgggcggaatggacgcgcccgccgaaatcgacatgggcatggaaaagctggaaaccggcttcacgcttgtggaatacgaccccgaagtgctgaagcagttcgggcttgtttccggcaaggcggtacaactgaccctgcgcggcgcgctggtggacgacaccacgaccacgccgatggtcattaaagttcaaggcatgttcaaggaaatcgacttcggcaaattgaaggcgggcgacaagggcgcgatgcaatgcaacgtggcgtgccgatactattcgcttgaaatcggcggaaagaaaatcgtcgaagtcgacatagataacatgacgcgcgtgatagacggcaacgaccaaatggccgaagtccgcaacgcgatcggattataa

SEQ ID NO: 72824 - protein, 165 aa, Unknown
  Obtained from environmental sample
  DOMAIN (1)...(165): Phage tail tube protein FII
  misc_feature (1)..(165): Xaa is any amino acid
MPKILKNFNLFVDGRGYAGRVEEVSPPKLAIKTEELRAGGMDAPAEIDMGMEKLETGFTLVEYDPEVLKQFGLVSGKAVQLTLRGALVDDTTTTPMVIKVQGMFKEIDFGKLKAGDKGAMQCNVACRYYSLEIGGKKIVEVDIDNMTRVIDGNDQMAEVRNAIGL

SEQ ID NO: 72825 - DNA, 828 bp, Unknown
  Obtained from environmental sample
  misc_feature (1)..(828): n is a, c, g, or t
gtggattgcaggcagcgcgcccgagtccctcacgtggacgaattgttgaaccggacggacataaccattgacgtgtgggatcaccatcctgacgctcctgacgacatcagggcgcacaatgtctgcacggcggcggtaggggccaccgtaacgctgctgctggaggaaatccgccgccgcggccttcccctttgctgtgaagacgccagcatcctcgggctcggtctttacggggatactggttctttcactttcaattccacgagcgccagggacttttttgccgccgccgtcctgcgggaacacggcatggacgtggatttcatcagggaactgaccggatatgagctgacaagccagcatgtgcaggtcttgaacgagctgttggaatccgcctctatctatcatcttaacggcgtttcggtcgctgtggctgaagcctcgcttgaggcgcatctgggagatttcgcccccctggtccataaactgatggagatggaacgctttgaggttcttttcgccttgggacgtatgggcgacagggtgcagatcgtggcgcgcagccggaatgaccttatcaatgtgggaaaagtgtgccagagccttggcggcggcggacatacctacgcggcttccgcctccgtgcgcgacaagaccttgctgcaagtcagggatgaaatttttcgccagctttacgcccaggtcaacagcgacaagtgtgcgtccgactatatgtccgctccggtgataggcattgaggaaggccgcggcatccgtgaggcgcaggagctgaggaacgttcggctcaaggcgtccccccggcaataa

SEQ ID NO: 72826 - protein, 275 aa, Unknown
  Obtained from environmental sample
  DOMAIN (169)...(229): DHHA1 domain
  misc_feature (1)..(275): Xaa is any amino acid
MDCRQRARVPHVDELLNRTDITIDVWDHHPDAPDDIRAHNVCTAAVGATVTLLLEEIRRRGLPLCCEDASILGLGLYGDTGSFTFNSTSARDFFAAAVLREHGMDVDFIRELTGYELTSQHVQVLNELLESASIYHLNGVSVAVAEASLEAHLGDFAPLVHKLMEMERFEVLFALGRMGDRVQIVARSRNDLINVGKVCQSLGGGGHTYAASASVRDKTLLQVRDEIFRQLYAQVNSDKCASDYMSAPVIGIEEGRGIREAQELRNVRLKASPRQ

SEQ ID NO: 72827 - DNA, 381 bp, Unknown
  Obtained from environmental sample
  misc_feature (1)..(381): n is a, c, g, or t
atggaaggcccggcattttcgacgaaggccgaatcaaatttctaccgacagtgcggcatggatgtgattggaatgacaaacctgcaggaggccaaactcgcgcgggaagcggaaatctgttacgttaccatcgccctcgtaacggattacgattgctggcatgaatcgcacgaaacggtcagtaccgatatgatcgttgaaaacctgcaaaagaactgtcaggcggcgcaggcgatcattacgcaaacagtacgcgatcttgacggtgaaaggctctgcggctgcggcgaaacgctgaaatacgccattatcacggacaaaacaaaaatcccggaagcggttcggcgcaggcttgaacccatcgtcggaaaatacttatga

SEQ ID NO: 72828 - protein, 126 aa, Unknown
  Obtained from environmental sample
  DOMAIN (1)...(103): Phosphorylase family 2
  misc_feature (1)..(126): Xaa is any amino acid
MEGPAFSTKAESNFYRQCGMDVIGMTNLQEAKLAREAEICYVTIALVTDYDCWHESHETVSTDMIVENLQKNCQAAQAIITQTVRDLDGERLCGCGETLKYAIITDKTKIPEAVRRRLEPIVGKYL

SEQ ID NO: 72829 - DNA, 474 bp, Unknown
  Obtained from environmental sample
  misc_feature (1)..(474): n is a, c, g, or t
atgaaaatacggcatttcattccgcatgtaatcgttttcttaatgtttgtttgcgtctgcgccgatctcgcggcgcagacgcagtccgcgaaaacgggaaaaaagccggcttcgtcgattatacgggaaaccgaaatctatattgaggcgatgtcgtggtttcgcaagggcgaaagcatgattggaaccgacagtgagaacagcgacgaacagacgaaaatgttccagaaggccgttgagatacgtccggaatttcttgaggcgcattacaacctcggactgatttacatgaaccggaataaaatggctgacgccgctgcggaatttgaaaccgtacttcgtattgaaccgaatttcgatccgggcatttactacctgattggcgtggcgcgccgcgaagccggcaattctgaagaagccgtcgccgcttttgaaacggcctgcggagaaaaccgaagacatagccatgcttaa

SEQ ID NO: 72830 - protein, 157 aa, Unknown
  Obtained from environmental sample
  SIGNAL (1)...(24)
  DOMAIN (86)...(119): Tetratricopeptide repeat
  misc_feature (1)..(157): Xaa is any amino acid
MKIRHFIPHVIVFLMFVCVCADLAAQTQSAKTGKKPASSIIRETEIYIEAMSWFRKGESMIGTDSENSDEQTKMFQKAVEIRPEFLEAHYNLGLIYMNRNKMADAAAEFETVLRIEPNFDPGIYYLIGVARREAGNSEEAVAAFETACGENRRHSHA

SEQ ID NO: 72831 - DNA, 600 bp, Unknown
  Obtained from environmental sample
  misc_feature (1)..(600): n is a, c, g, or t
gtgccggcgcggggcgccctaagcacccaagccgccccgccctgtgtggtctttatgccgagcgattccagcgcaagcgccgccgcgccttcctctgccctagccacctcggcctcactggtggcttcttccaagtcccgctggctggtggctttcttgacgttcagcctttcttccctagctagggcggcctccgctctgaccaacttggcccttgctgccagccaatccgcatggacacacgccagttctggacttttgacctcgaccagcgccatgtctgcggctacgtttcgcccacgcggcaccaacaacgcacccaaaatgccgttcacggcgctagagacgacaaactgggacgcttcgacggcaatgatttccgccgggaaccaaacgctcatggcgcttggcgcctcgactgactgcacgcgagcgcctgggatgtccttcagtgcaatcgcgtgcgggtcaacgccctcgtgcgctgcgtcttcagcggcgccatgttcgtgctcatggtcatgttcatggacgtgccctgcattttatggctggcaggccagacacagctgcaactcaattgcgattagcaatgcatga

SEQ ID NO: 72832 - protein, 199 aa, Unknown
  Obtained from environmental sample
  SIGNAL (1)...(28)
  misc_feature (1)..(199): Xaa is any amino acid
MPARGALSTQAAPPCVVFMPSDSSASAAAPSSALATSASLVASSKSRWLVAFLTFSLSSLARAASALTNLALAASQSAWTHASSGLLTSTSAMSAATFRPRGTNNAPKMPFTALETTNWDASTAMISAGNQTLMALGASTDCTRAPGMSFSAIACGSTPSCAASSAAPCSCSWSCSWTCPAFYGWQARHSCNSIAISNA

SEQ ID NO: 72833 - DNA, 861 bp, Unknown
  Obtained from environmental sample
  misc_feature (1)..(861): n is a, c, g, or t
gtgctgctcgtggcggacaagtatcagaccggctttgaccagccgctgctgcacaccatgtatatcgacaaaaagctgggcggggtgcaggccgtgcagaccctgtcccgtctgaaccggcgcgctcccggcaaagcggatacctttatccttgatttccgcgaccagcgggacgatatctacaaggccttcaagccctattacgaaacggcaaagatgggcgaaatgccggacccgcagcgcctctataccctgcatcatgaactcttggaaaagggcgtgatccgggaggaagaggtgcaggcgttttgcgccctctggttcagcacacgcggcgatgccgccggaaaccatcaaaagctcaacgcgattctcgatcaggccgttgagcgcttcgccgctcttgacgaaaaggaacgagaactgtttcgcggcaagctggaagccttccgcaagctgtatgcctttctctcccaaatcataccctacggcgattccgaattggaaaaattctacgcatacggccgttttctgctgaccaagctgccccgggatcaagggccggcctttgcgcttgaggatgaggtcgccttgcgcttctaccgcctggaaaaactggaggagggaaaaattcgcctggacgagggggaagcgccgccgctcaaaggcccgacggaaaccgggacaggcggcggcaaggaaccggaagtgcctctgtccaccttggtggacaagctgaacgagcgcttcggcgccaatttcaccccggcggatcagctcttttttgatcaggtggcggaggcggcaacggaagaagagacgctcaagcaggcatcacgagtgaacactcggcngttttga

SEQ ID NO: 72834 - protein, 286 aa, Unknown
  Obtained from environmental sample
  misc_feature (1)..(286): Xaa is any amino acid
MLLVADKYQTGFDQPLLHTMYIDKKLGGVQAVQTLSRLNRRAPGKADTFILDFRDQRDDIYKAFKPYYETAKMGEMPDPQRLYTLHHELLEKGVIREEEVQAFCALWFSTRGDAAGNHQKLNAILDQAVERFAALDEKERELFRGKLEAFRKLYAFLSQIIPYGDSELEKFYAYGRFLLTKLPRDQGPAFALEDEVALRFYRLEKLEEGKIRLDEGEAPPLKGPTETGTGGGKEPEVPLSTLVDKLNERFGANFTPADQLFFDQVAEAATEEETLKQASRVNTRXF

SEQ ID NO: 72835 - DNA, 723 bp, Unknown
  Obtained from environmental sample
  misc_feature (1)..(723): n is a, c, g, or t
gtgggcaatgcttccgcaaccagcatagaaacaatggattcttacttcaaaggcaaaattctaagccatttaaacgccctcatatcaaaaaaagtaacccaagacaaagtctctgttttgcaaataaattcgcatttgattgaactcagcgaatattgcgatgattgcttggataaggttttggaaaaatatggcttggaggttttggaattttcaatacagaacataaacattccccaagacgacccaaccgtcataaagctcaaagaagctaaagatatggcagcgagaatgaaaatcgcaggcaaagatgtgtatcaaatgcaacgcagttttgatgttatggaacatgccgccaagaacgaaggtgccggagggcagttcacatctatgggcgcaggacttggtgcggggctaggagttggcggcgcaatggggacaatgttcagccagaacttaaatacaaatccactatccatgcctatacctccgccaatactgcaggcagcccaatattttattcacatcaacggcacccagcacggaccctatacagcccaaacgattctgcctttgattcaaagcgggcaagcaaacgcacaaacgctttgctggaaacagggaatggcgaactggcaacctttgaaagatttaccggaatttgccgttatgttcagcactccgccagtgcccccaccccctccgccactcccccaaggataa

SEQ ID NO: 72836 - protein, 240 aa, Unknown
  Obtained from environmental sample
  misc_feature (1)..(240): Xaa is any amino acid
MGNASATSIETMDSYFKGKILSHLNALISKKVTQDKVSVLQINSHLIELSEYCDDCLDKVLEKYGLEVLEFSIQNINIPQDDPTVIKLKEAKDMAARMKIAGKDVYQMQRSFDVMEHAAKNEGAGGQFTSMGAGLGAGLGVGGAMGTMFSQNLNTNPLSMPIPPPILQAAQYFIHINGTQHGPYTAQTILPLIQSGQANAQTLCWKQGMANWQPLKDLPEFAVMFSTPPVPPPPPPLPQG

SEQ ID NO: 72837 - DNA, 519 bp, Unknown
  Obtained from environmental sample
  misc_feature (1)..(519): n is a, c, g, or t
atggaaaataaatactgccctaattgcggggcactcacgaacaacgcaaagtgtgaacattgcggaaccttaatctctggagcaaaggctcctataaccagcagtggcaacgctgggcaatcagagaatctttctctctgggggtattatgtaaaatgccttaaaaattatgcgaagttcaaaggtagggctagaagaaaagaatatttgggatttttcctatttagttgtattattgcatttgcattgatagtttgtggaggtgctataggaggaattaccggagatgaagaaggaactttgggaaccgtgttattttatttatattgtttggccgtatttgttcctatgcttgcgttgttagtaaggagactccatgatactggcgataatgttttgttaattataggttattttatccctccaatttctattgctgttggtttgtattgccttttcaaaaaaggagtaacaggatccaacaaacatggcgatgatcctctctccaaggagaattga

SEQ ID NO: 72838 - protein, 172 aa, Unknown
  Obtained from environmental sample
  DOMAIN (56)...(169): Protein of unknown function (DUF805)
  misc_feature (1)..(172): Xaa is any amino acid
MENKYCPNCGALTNNAKCEHCGTLISGAKAPITSSGNAGQSENLSLWGYYVKCLKNYAKFKGRARRKEYLGFFLFSCIIAFALIVCGGAIGGITGDEEGTLGTVLFYLYCLAVFVPMLALLVRRLHDTGDNVLLIIGYFIPPISIAVGLYCLFKKGVTGSNKHGDDPLSKEN

SEQ ID NO: 72839 - DNA, 798 bp, Unknown
  Obtained from environmental sample
  misc_feature (1)..(798): n is a, c, g, or t
atggcagagaacggtgaaaaaagggaatattccttgcaaatagataccgcaataccaaaaaaatacagttttgaatcttggactttgtctaacaatggcaaagatggctattacatactttcaaatatgcgatgggcaagcggaaatcaaggcattggaatggctttagcttttttaccttccagagacaatagaaatccagaaaattatcctaccaaaaaaacaagcgaaggttatatcggtagtgccgtgcttttggaaaccatagagggaggttcggtacttgggaaagatagacccatattttctggaaatttatttttgggaaagttcaatatagcaaaggctttagatgatgagcttgcagcaacggaatttggaaaattatatttaaccaagccaaaaatcgtaagcggatactataaatacaaagaaggaaatggctattttataactggagaccctagcaaaaatgattcttgcgacatatacgcgggtttttaccaagccaacgatgacgatggaaatgaaataattctaacggctaaagataaagatgatctggataaattgccttatgttttaacttatgcgcgtttgcaagattgttctacaacacaaggagaaaattttcacgaatttgttttaaattttgacacttacaaaagcgagcctgattttgaaaaatacaactacaaattgttcataacatttgccgcaagcaaaggcggtgacacctacgaaggcaaaataggcagcanactgataattgacgaggtagaaattgaagattattaa

SEQ ID NO: 72840 - protein, 265 aa, Unknown
  Obtained from environmental sample
  misc_feature (1)..(265): Xaa is any amino acid
MAENGEKREYSLQIDTAIPKKYSFESWTLSNNGKDGYYILSNMRWASGNQGIGMALAFLPSRDNRNPENYPTKKTSEGYIGSAVLLETIEGGSVLGKDRPIFSGNLFLGKFNIAKALDDELAATEFGKLYLTKPKIVSGYYKYKEGNGYFITGDPSKNDSCDIYAGFYQANDDDGNEIILTAKDKDDLDKLPYVLTYARLQDCSTTQGENFHEFVLNFDTYKSEPDFEKYNYKLFITFAASKGGDTYEGKIGSXLIIDEVEIEDY

SEQ ID NO: 72841 - DNA, 750 bp, Unknown
  Obtained from environmental sample
  misc_feature (1)..(750): n is a, c, g, or t
atggcagcagttcctcacaagggctactatgtcgtgccgccgcttcccgagaacaggcgcgacgccttggcgctcaattggttcgcgaggggcgcaaagagggatacgcctgaacagacgaccccgccgtcagaatactacggcaagttcaatgaaggactgcaaacgccgtctggcaaattcgagtttgaggcgcagacgctgaaacgttttgacccaaacgacgaagagcgcctgcctatctgcacctatatcccgtcatgggaggggacggagtcggagctgtatggcaaatacaagctgcaattgatatctccgcacccaaaatacagctaccacactatgggcgacaacaaagacacgactgtcaacgatatagaccagcaccgcatgttgatcgacggttaccgatactggatattccggatgaacccgaacgacgcgtccgaacgcggagtcaagcacggggatgttgtcgaagtatacaatgaccgcggcagcgtgctttgcggactggaagtaacggatcgcctccccgccggcgtcgtccactcatatgaatcctgctcggactaccagccgcttgagacgcctggcgagtcgccggaagtaaacggctgcatcaatgttttaacgccgaaacggtttatcacgaagcatgggcacggccttgctgtcaactcatgccttgtcgaagtcaggagatgggaaaacagcggcgccgtgcgccgcaagtgggcagcagtgtaa

SEQ ID NO: 72842 - protein, 249 aa, Unknown
  Obtained from environmental sample
  DOMAIN (101)...(230): Molydopterin dinucleotide binding domain
  misc_feature (1)..(249): Xaa is any amino acid
MAAVPHKGYYVVPPLPENRRDALALNWFARGAKRDTPEQTTPPSEYYGKFNEGLQTPSGKFEFEAQTLKRFDPNDEERLPICTYIPSWEGTESELYGKYKLQLISPHPKYSYHTMGDNKDTTVNDIDQHRMLIDGYRYWIFRMNPNDASERGVKHGDVVEVYNDRGSVLCGLEVTDRLPAGVVHSYESCSDYQPLETPGESPEVNGCINVLTPKRFITKHGHGLAVNSCLVEVRRWENSGAVRRKWAAV

SEQ ID NO: 72843 - DNA, 819 bp, Unknown
  Obtained from environmental sample
  misc_feature (1)..(819): n is a, c, g, or t
ttggggattgggagagaggagttagagatggagaaaacaacggaaattttgattgggacgtcggggtattcgtatcatgagtgggtggggcctgtttatccggaggggacgaaggctaaggattatttggcgtgttattcggagctttttcccactgtggaactcaatttttcttattattccatgccgaaggctgataatcttgctaaaatgcttgccgacggcggggataaactcaccttttcgattaaagcccataaaactcttacccacgaggttgatccttcactatgggaaggggaagcaaaaacctatctgaacgccatagagccggtgttgaaagccgggcgtcttgaggcggttttgtttcagtttccgtattccttccactatacgcccgataacagacggtatttggacaaacttctgaagtattttaaaggtgttccgctggcggtggaattcaggactgccgactggtttacggggaaggtaatagacgggatgaaaagccgcgaagtgccgctggtttcccttgacctgccggaactgccaaaactgccgccgactatggatgtggttacgtccccgttagtgtatatccgcctgcatggccgcaataaagaagcgtggtgggggagcgatgaccacgcgcgctacgattatctgtactccgacagggaaattgaagcgtgggcggatcgcattaaaagaattacggaacaggcaaagcgtattttagtttacttcaacaaccactcattcggaaaagccgtgcgaaacgcgcaaactttaatgaaaataataaatagcanatga

SEQ ID NO: 72844 - protein, 272 aa, Unknown
  Obtained from environmental sample
  DOMAIN (32)...(270): Protein of unknown function DUF72
  misc_feature (1)..(272): Xaa is any amino acid
MGIGREELEMEKTTEILIGTSGYSYHEWVGPVYPEGTKAKDYLACYSELFPTVELNFSYYSMPKADNLAKMLADGGDKLTFSIKAHKTLTHEVDPSLWEGEAKTYLNAIEPVLKAGRLEAVLFQFPYSFHYTPDNRRYLDKLLKYFKGVPLAVEFRTADWFTGKVIDGMKSREVPLVSLDLPELPKLPPTMDVVTSPLVYIRLHGRNKEAWWGSDDHARYDYLYSDREIEAWADRIKRITEQAKRILVYFNNHSFGKAVRNAQTLMKIINSX

SEQ ID NO: 72845 - DNA, 528 bp, Unknown
  Obtained from environmental sample
  misc_feature (1)..(528): n is a, c, g, or t
ttggcccccgctttttttggaatatttttctattgcttttggaaagccgcgcatttgtgcatgaaagccatatttgaaaagacaatggcaggcgagagaattgccgcaggggacgccctttgcctatttgaagccgcgtcgttgcccgaattgtccagattggcgacgatagccagggacaggcgcacagacccaaggcgcgtcagctatgtcattgacaggaatgtcaactacacaaacatttgcgccatccgctgcacattctgcgctttccatcgaagcgacggttctgcggattcatatgttttacagttagctgaacttggggaaaaagccgccgaaaccaagaagctgggcggaacagggtttttgctgcagggcggcgtgaaccctgctctgccttgggattattaccttggcgtgctttcatttctgagtgaaaagtgtggcatctgggtccacggctttagtcccgccgaaattcgacagatgtcgaaaatcagcggcttagagctagaaggcacatga

SEQ ID NO: 72846 - protein, 175 aa, Unknown
  Obtained from environmental sample
  misc_feature (1)..(175): Xaa is any amino acid
MAPAFFGIFFYCFWKAAHLCMKAIFEKTMAGERIAAGDALCLFEAASLPELSRLATIARDRRTDPRRVSYVIDRNVNYTNICAIRCTFCAFHRSDGSADSYVLQLAELGEKAAETKKLGGTGFLLQGGVNPALPWDYYLGVLSFLSEKCGIWVHGFSPAEIRQMSKISGLELEGT

SEQ ID NO: 72847 - DNA, 690 bp, Unknown
  Obtained from environmental sample
  misc_feature (1)..(690): n is a, c, g, or t
ttgttttttgggggatccccggtaaaccggggggggaggttttcggggggttgggcgcctttcccgaaagacccggggttaattacctgggtttttcccaggagaatcccatttaacttcccggtttttttaaaccccccagttgaagttttggcgaatattttcccttggccagacaaaccgttccaaggggaagtttctttgccgggttttaacgcccgagactattttgggacattcaagcgggaaccaggggcggctttgatatttccgccacgccgtttcgtttccgcgtgttgcccatttcgctgctgcccgttacccaaaaccgtcttccccgccaactcgaccatgattggtcccgaacagataatggcgtcaaggaaagttgctttttcctgggatacaacgcagggggctaacggctacattctcacaatctttcaaggctcaggcgctacgcgaaagactgtgttacaaacgtctgtgcttgataaaaccgcttacaccgttgatgatatacagcttttggggaaaggggattttttctggcaagtagaggctgtgtatgttatggatggtgattttattgaacagcatggacgggtgcaggaaagcaagtttaccgtcaatatccccgtcccgtcgcaagtaaataccatgaattcaggtgttctttatggcaaataa

SEQ ID NO: 72848 - protein, 229 aa, Unknown
  Obtained from environmental sample
  misc_feature (1)..(229): Xaa is any amino acid
MFFGGSPVNRGGRFSGGWAPFPKDPGLITWVFPRRIPFNFPVFLNPPVEVLANIFPWPDKPFQGEVSLPGFNARDYFGTFKREPGAALIFPPRRFVSACCPFRCCPLPKTVFPANSTMIGPEQIMASRKVAFSWDTTQGANGYILTIFQGSGATRKTVLQTSVLDKTAYTVDDIQLLGKGDFFWQVEAVYVMDGDFIEQHGRVQESKFTVNIPVPSQVNTMNSGVLYGK

SEQ ID NO: 72849 - DNA, 780 bp, Unknown
  Obtained from environmental sample
  misc_feature (1)..(780): n is a, c, g, or t
atgaaaagtaaattatttttatctgtcttacttttattgggagcagtattctcaattcatgcgcaggacgccaactctatcgtaagggcgtcaagaaacagaattaaggcggatacggtttctacccgatcaagaatggttttgcaggcaaaagacggaacgaccacggaaagacttcttgataattattcaaaagacggacctaatggggcgaggagcgtaattgtgtttcaacagcctgcaagcgtcgccggaagccgtttccttactatggaaaataaaaacgctcccgatgaccgctggattttcatgccgaatatcggcaaaataaggcgcattgccgcttccgaaggttcgggaagttttatgggtactgatttttcatttgacgatatttcctcaacaagccgaaacgctgatcttgatactcacactttattaagagaagaaaatctcggcattactccctgttatgtgattcaatcagtgcctaaagacagcgcttatcagtattctaaaatgattcaatggatagcgaaagatacgtccatcattatgaaaattgaactttacgacagaagaaacactctaataaaaaccgtcgaaatgtcaggcgttaagaatattcaagatcgtcttaccgttaccgtcacaaaaatgacaactcatgccgccggaacgtccactacaattacaaacgagatcgtaaaatacaacgatcctattcccgaaggagtttttacaacgtcgtatcttgaaacggggaaagtaagcagataa

SEQ ID NO: 72850 - protein, 259 aa, Unknown
  Obtained from environmental sample
  SIGNAL (1)...(21)
  misc_feature (1)..(259): Xaa is any amino acid
MKSKLFLSVLLLLGAVFSIHAQDANSIVRASRNRIKADTVSTRSRMVLQAKDGTTTERLLDNYSKDGPNGARSVIVFQQPASVAGSRFLTMENKNAPDDRWIFMPNIGKIRRIAASEGSGSFMGTDFSFDDISSTSRNADLDTHTLLREENLGITPCYVIQSVPKDSAYQYSKMIQWIAKDTSIIMKIELYDRRNTLIKTVEMSGVKNIQDRLTVTVTKMTTHAAGTSTTITNEIVKYNDPIPEGVFTTSYLETGKVSR

SEQ ID NO: 72851 - DNA, 642 bp, Unknown
  Obtained from environmental sample
  misc_feature (1)..(642): n is a, c, g, or t
ttgagaagcaagaaaaaaacaggaactttagcgaagaaggaaacgccgcaaaagaaagcggatgcggaaagcgcgccggttaaaagcgtttgggaanaaatagcggaagaaggtccggcaataaccacggaggaattgcgggaactgctggggggcaataatacgataagcgccgggaggatcagccagctcaaaaaggcagggataataaagccgctgccttccggcagcagaaaagaaggcgacacgtggatggggcttatgactttcgcaaaacttgcgggatattaccgggagctggcagacggccgggaatcaaacgatcccgaggacatgaaaaaagcacgggaacgcctgacaatggcaaaggcaaaaatggaagagctgaagctggcacagttagagggagaattgcataaggctgaggatatcgaaaggctgatcggcgcgatgctgacgcggctgaggataaacctattagcaatccctatggggcttgccccgatattgcgggaattgaacgatgtccgggaaatcgcggaaaagatggacgaacggatacgccgcgcaatggaagaggtagccgaaatagatttggtgaagctagttgaaaaagaaaagctcacagcagacgatagctga

SEQ ID NO: 72852 - protein, 213 aa, Unknown
  Obtained from environmental sample
  misc_feature (1)..(213): Xaa is any amino acid
MRSKKKTGTLAKKETPQKKADAESAPVKSVWEXIAEEGPAITTEELRELLGGNNTISAGRISQLKKAGIIKPLPSGSRKEGDTWMGLMTFAKLAGYYRELADGRESNDPEDMKKARERLTMAKAKMEELKLAQLEGELHKAEDIERLIGAMLTRLRINLLAIPMGLAPILRELNDVREIAEKMDERIRRAMEEVAEIDLVKLVEKEKLTADDS

SEQ ID NO: 72853 - DNA, 954 bp, Unknown
  Obtained from environmental sample
  misc_feature (1)..(954): n is a, c, g, or t
ttgacgacattaccgccatcacgctctttttcaggcgataaagtatacgatgtccgcccgggattaaccggcggcgcgggattttaccctgacggggaagtcgctcttgataaacacataatcgatcttgtggcgcatcttcttcgcagcgatcaagggcgggatatgatggcggcaaagctgcgttctttttcgggcgtgattatagaagacgccgattttgacggacacgcggacagctgcgccttttacagaaacggctcactgcttgagtacgcgcttgactcggatcaggatcgaattgttaatttgcgcgtggttttcagccaagggtacccgtcatcaggggaaattcccgttcccggaactcaggacatcgcggtattaacctgggagcgttatccgtatgtggaaaaagcggtgctgaaaaacgagacgttttttttccgcccgggaggctacgctgtttctccctttgtcctgattgaagtgggaaacagctcaaagtatgagggcattctctttcccgagatgccggctctggaatttggaataagccgccgcacgcttgtttcttacagctcgcggatacagaggccaagcgctgaatttcccggcggaatagatcaatttgaaatggacaggggcatccctttaagggcggtaacaactcttaacggaaaacaggtttcggttacagaatttgaagcgggctttcctgttattcaatacgttgatttggatcttgacggtaggatggaaacgatacggcgtttcagaagacctgcgggattttcaaacaatcttacagattaccgcgatttgttatacacgtcggaaagcgactggcgcggagacggcgtttatacaactagcgaattgtatcgtatcgacgggtctgttgtttatcatgggatttggaaggatcgggcagcagggattactctcagctaa

SEQ ID NO: 72854 - protein, 317 aa, Unknown
  Obtained from environmental sample
  misc_feature (1)..(317): Xaa is any amino acid
MTTLPPSRSFSGDKVYDVRPGLTGGAGFYPDGEVALDKHIIDLVAHLLRSDQGRDMMAAKLRSFSGVIIEDADFDGHADSCAFYRNGSLLEYALDSDQDRIVNLRVVFSQGYPSSGEIPVPGTQDIAVLTWERYPYVEKAVLKNETFFFRPGGYAVSPFVLIEVGNSSKYEGILFPEMPALEFGISRRTLVSYSSRIQRPSAEFPGGIDQFEMDRGIPLRAVTTLNGKQVSVTEFEAGFPVIQYVDLDLDGRMETIRRFRRPAGFSNNLTDYRDLLYTSESDWRGDGVYTTSELYRIDGSVVYHGIWKDRAAGITLS

SEQ ID NO: 72855 - DNA, 513 bp, Unknown
  Obtained from environmental sample
  misc_feature (1)..(513): n is a, c, g, or t
atgatgcccgaagttgacggtttcagatttgcctcgctgatcagggaacaggacaaaattataccgattttgtttatgtccgcgcgggacgacatatcatccaagcaaaaagggttccgaatcggcatagacgattacatgattaaaccagttgacatggaagaactggtactcaggattgaggcgctgctccgccgagccaatatagcaaacgataaaaaactgactgtcggcagccttaccatgaatgcggatgaaacgtccgcctgtctcaatggccaagagataccgcttaccgtcaaggaattccaggttttgtataaactgctttcgtaccccaaaaagacctttacccgcaatcagttaatggatgagttctggggggtggaaaccggaaccacgccccgttcggtggatgtgtatattaccaaactgcgggaaaagtttgcggggtgcgatgattttgaaattgttaccgttcacggcttagggtacaaggcggtattgaaatga

SEQ ID NO: 72856 - protein, 170 aa, Unknown
  Obtained from environmental sample
  DOMAIN (93)...(167): Transcriptional regulatory protein, C terminal
  misc_feature (1)..(170): Xaa is any amino acid
MMPEVDGFRFASLIREQDKIIPILFMSARDDISSKQKGFRIGIDDYMIKPVDMEELVLRIEALLRRANIANDKKLTVGSLTMNADETSACLNGQEIPLTVKEFQVLYKLLSYPKKTFTRNQLMDEFWGVETGTTPRSVDVYITKLREKFAGCDDFEIVTVHGLGYKAVLK

SEQ ID NO: 72857 - DNA, 741 bp, Unknown
  Obtained from environmental sample
  misc_feature (1)..(741): n is a, c, g, or t
ttggaggttattattatgaaaaagacaatctatttggttacaggagcgacagggttccttggaagcagcgtttgcaggcaattaattgaaaggggcgaatctgtcagaactttcgccttgccaaatgataaggccgtaaaatttataccgagggaggcggaagttgtcaccggcgatttgtgcaatgcagaatcactggaatatttttttactgttcctgaaggaacggaatcagtcgtaatacattgcgccagtatggtcagcgtagaccctgtttataaccaaaggctcatggatattaacgtgggggggacaaagaatatcatcgacaaatgtttacagcataaagaatgccgtaaactggtctatgtcggcagtaccggagcaatccctgaattgccgaagggccttaaaatcaaagaaattgacagatttgatcctgatcaggtggtgggctgctacagccaatcgaaggccctggcagctcaggccgttcttgacgcggtcagggagaaggggttaaatgcgtgtattgttcatcctagcggaattttaggccccggcgattacgccattggtgaaacaacaggtagtatcatccagcttttaaatggcagtatgccggctggtatccaaggttcctttaatttatgcgatgtcagggatctggcctatggctgcatcatggccgccgacaaagggaaaaagggagaaagctatatcctggcaacaaagaagtaa

SEQ ID NO: 72858 - protein, 246 aa, Unknown
  Obtained from environmental sample
  DOMAIN (13)...(227): Male sterility protein
  misc_feature (1)..(246): Xaa is any amino acid
MEVIIMKKTIYLVTGATGFLGSSVCRQLIERGESVRTFALPNDKAVKFIPREAEVVTGDLCNAESLEYFFTVPEGTESVVIHCASMVSVDPVYNQRLMDINVGGTKNIIDKCLQHKECRKLVYVGSTGAIPELPKGLKIKEIDRFDPDQVVGCYSQSKALAAQAVLDAVREKGLNACIVHPSGILGPGDYAIGETTGSIIQLLNGSMPAGIQGSFNLCDVRDLAYGCIMAADKGKKGESYILATKK

SEQ ID NO: 72859 - DNA, 795 bp, Unknown
  Obtained from environmental sample
  misc_feature (1)..(795): n is a, c, g, or t
gtgaacaagctctttgaaagcagggatcagtttgaagcgcttaaggaagagctggggatagttttctccggagcagccctgacggtactgacggctgaaatcgagacggctggaaataccgacgacggcgacaggttgcgtacgctgtatgccagcgcagcccaaatggtccgtgaaaaactggaaaagcttttttcctgccatacaatgattcttgacagccgccactttatcatcgttttttgtattgaagtttcggattctctggcccaaagaaaattgctcgaaagagatctgcgaaagactatagagatggttcacaattattttaacgtccgtatccgcatggccttaggctgcccggtagaggatcccctgaggctggatgaaagttacctcgccgcccggcaggctctggaagaaacaagcagggacgaagcgctgcgattttttgagcgccatggttttcaacagcagctcgtagccggtgtacgggattatataaaacagaatatcgatataaagcttacccttcccgatgtggcggagcacttcaacctcagcccgaattatctgagcaatctttttacaaaatttaccggcggtagttttgtggaatacgttaccgccgaaaaaatagcagccgcaaaaaaaatgctcatccgcggggagggagcgatttacgaaattgccgaaaaactaaagtttgaaagcgctttctacttcagtaaggtcttcaagaaagtggaaggcatttcaccacgggaattcctgcgccgcatagaaggaagctaa

SEQ ID NO: 72860 - protein, 264 aa, Unknown
  Obtained from environmental sample
  DOMAIN (163)...(209): Bacterial regulatory helix-turn-helix proteins, AraC family
  misc_feature (1)..(264): Xaa is any amino acid
MNKLFESRDQFEALKEELGIVFSGAALTVLTAEIETAGNTDDGDRLRTLYASAAQMVREKLEKLFSCHTMILDSRHFIIVFCIEVSDSLAQRKLLERDLRKTIEMVHNYFNVRIRMALGCPVEDPLRLDESYLAARQALEETSRDEALRFFERHGFQQQLVAGVRDYIKQNIDIKLTLPDVAEHFNLSPNYLSNLFTKFTGGSFVEYVTAEKIAAAKKMLIRGEGAIYEIAEKLKFESAFYFSKVFKKVEGISPREFLRRIEGS

SEQ ID NO: 72861 - DNA, 444 bp, Unknown
  Obtained from environmental sample
  misc_feature (1)..(444): n is a, c, g, or t
atgccagcaaacgtagaaaccatgttttatgtgagagaagtaccgtggcatggcttaggagtctgtgtcaattctgctttaagttcagaacaagcattggagcaatccgggctgaattggactgttacacaaaagccgattatgacaagtacgtatcagcccatccccggctacaaagcaaatgttcgccataccgataacaaggtacttggcgtagtaaccgacaggtacaaagtaattcaaaattccgaagcctttgctttcaccgataatctactcggtgaaggcgtatgctacgaaaccgccggatgcctcaacgacggcnagaaaatctggattctcgccaaactgcccgataagtacatcatcgaangagaacagatagagccgtatctggtcttttccatgaccactccggcaatggttcaatcaaagtcgccatga

SEQ ID NO: 72862 - protein, 147 aa, Unknown
  Obtained from environmental sample
  misc_feature (1)..(147): Xaa is any amino acid
MPANVETMFYVREVPWHGLGVCVNSALSSEQALEQSGLNWTVTQKPIMTSTYQPIPGYKANVRHTDNKVLGVVTDRYKVIQNSEAFAFTDNLLGEGVCYETAGCLNDGXKIWILAKLPDKYIIEXEQIEPYLVFSMTTPAMVQSKSP

SEQ ID NO: 72863 - DNA, 357 bp, Unknown
  Obtained from environmental sample
  misc_feature (1)..(357): n is a, c, g, or t
gtggatttgagctgctatggaatgaaaaataaatgggtagtagccataaatcgatggcaaaccctaaccgattttcacatacccaaagaaaatttggaaatgatttctgaattctgctttgaatttttggtacacgccgcaggcgttgagggcaagcaacagggcatggatttggaattgattaaatttttgggcgcaaactcccccattccagcaacttatgcaggtggggcaaacagcctaaaagactttgaaacctgcaatgaattatcaaaaggaagggtggatttgactataggcagtgctttggacatttttggggggaatgtgccttatgatgaatgcaaaaaaatttaa

SEQ ID NO: 72864 - protein, 118 aa, Unknown
  Obtained from environmental sample
  misc_feature (1)..(118): Xaa is any amino acid
MDLSCYGMKNKWVVAINRWQTLTDFHIPKENLEMISEFCFEFLVHAAGVEGKQQGMDLELIKFLGANSPIPATYAGGANSLKDFETCNELSKGRVDLTIGSALDIFGGNVPYDECKKI

SEQ ID NO: 72865 - DNA, 384 bp, Unknown
  Obtained from environmental sample
  misc_feature (1)..(384): n is a, c, g, or t
atggaaagggctctgttattttttggaggttacataactgtgaagaatcataaaaatgagccctgggtttttttcagagacatcgaaggggtaagcaccgcgccgggggtaacgcgcaaggttctctcttactgcgacgagttgatggcggtggcaaacgaatttgatcaaggcgctgtcggcgcaatgcacagccaccctcacacacagatcacctatgtagccgaaggccgcttccgctttacaatcggcgatgaagtaaaggaagtcggcaagggcgataccctctgcaaacggaacgggatagaacacggctgcgtgtgtctggaaaagggagttctggttgatttttttacgcctatgcgggaagattttattaggtag

SEQ ID NO: 72866 - protein, 127 aa, Unknown
  Obtained from environmental sample
  DOMAIN (51)...(118): Cupin domain
  misc_feature (1)..(127): Xaa is any amino acid
MERALLFFGGYITVKNHKNEPWVFFRDIEGVSTAPGVTRKVLSYCDELMAVANEFDQGAVGAMHSHPHTQITYVAEGRFRFTIGDEVKEVGKGDTLCKRNGIEHGCVCLEKGVLVDFFTPMREDFIR

SEQ ID NO: 72867 - DNA, 783 bp, Unknown
  Obtained from environmental sample
  misc_feature (1)..(783): n is a, c, g, or t
atggtattgctgcaccgggattccatacggcgatacggtcaagcacgattgcgcaaaagcgggttcccgatctggtacttcggcgcgggggaggacggcgaacgcgaagagcactctgttatcgcgcgtgacgcggtcgcgagtctcgatgaaacatcgtatatgctttgccatggtgagaccgagcttacccgtgtcgcgctggcgtcgcgcgggtattttaacatatataattcgcttgccgccgcgagcgccgctctggcgctcgggattgcgccggaaatcatagcgcgcggcatggccggggtgcgcatccccgggcgttttgagcttgtgccgaacgatcgcggctttttggtcgcggtggattatgcccataccgacgacgcgctcgctaatctgctgtcctccgcgcgccgtctcgatccgaagcgcatcatcacggttttcggctgcggcggtgatcgcgatcgcgcaaagcgtccccggatggcgcgcgcggcctcatcgctctccgacatagttatcgttacgagcgataatccgcgcaccgaaaatccggatgcgattatacaggacatccttccgggtatagccgcatctgatcgcgcgcgtgttgtgcctgatcgcgccgaggctatccgggcagcgcttcatgaggcgcgggagggcgacatagttctgatcgccgggaaagggcatgagaattatcagatcttcgcggatcggactatccattttgacgatcgcgaagtcgcggcggaggcattggcggcgctatga

SEQ ID NO: 72868 - protein, 260 aa, Unknown
  Obtained from environmental sample
  DOMAIN (105)...(191): Mur ligase family, glutamate ligase domain
  misc_feature (1)..(260): Xaa is any amino acid
MVLLHRDSIRRYGQARLRKSGFPIWYFGAGEDGEREEHSVIARDAVASLDETSYMLCHGETELTRVALASRGYFNIYNSLAAASAALALGIAPEIIARGMAGVRIPGRFELVPNDRGFLVAVDYAHTDDALANLLSSARRLDPKRIITVFGCGGDRDRAKRPRMARAASSLSDIVIVTSDNPRTENPDAIIQDILPGIAASDRARVVPDRAEAIRAALHEAREGDIVLIAGKGHENYQIFADRTIHFDDREVAAEALAAL

SEQ ID NO: 72869 - DNA, 660 bp, Unknown
  Obtained from environmental sample
  misc_feature (1)..(660): n is a, c, g, or t
ttgaaggccgatgtcccggggacgatcattcctttcggagcggttccggaagggtttgtcgtcaccgaggatcaaggtcttgacgggtatatgctcggctgtgacggcggagaagtgaggtttgccttgggaggggcgcataatctcataaacctctccgccgccgcagccgctgcagataagctgggccttgccaaaagcgttattgccgaacggatatcgcatatccgcgcggtcgaatcccggtcgcaggtcgtcggcgggagggtctccatcattaacgactgttataacgcgaatcccgaatccatgcgggcaggacttgtccttcttgcgtcggttcggggttcgcggcgtattgccgtgctcgccgacatgctcgaactcgggggggattcgacgcgtcttcatggtgagctcggggcatggataagcgccgggcaggtatgcgatgagcttgtggtgatcgggcctgccatggcggcatgcgcgcgcgaggcgaaggcgcgcggattttgcgcggagcgtctgcatatttttccttcatgcgacgcggtcaagccctggctggctgatttcgttcacacgggagataccgtactcttgaaggggtcccatgccatgcacctggaagagatgctgccgctgcttgagtcatag

SEQ ID NO: 72870 - protein, 219 aa, Unknown
  Obtained from environmental sample
  DOMAIN (79)...(162): Mur ligase family, glutamate ligase domain
  misc_feature (1)..(219): Xaa is any amino acid
MKADVPGTIIPFGAVPEGFVVTEDQGLDGYMLGCDGGEVRFALGGAHNLINLSAAAAAADKLGLAKSVIAERISHIRAVESRSQVVGGRVSIINDCYNANPESMRAGLVLLASVRGSRRIAVLADMLELGGDSTRLHGELGAWISAGQVCDELVVIGPAMAACAREAKARGFCAERLHIFPSCDAVKPWLADFVHTGDTVLLKGSHAMHLEEMLPLLES

SEQ ID NO: 72871 - DNA, 765 bp, Unknown
  Obtained from environmental sample
  misc_feature (1)..(765): n is a, c, g, or t
ttgtcctcgcacgaggacgaccacctgattctgtcgcgtagtattaattcggacggcgaatccacctgccgcattaacggctctccggtcagcgtttcacagctgcgggaaatcgggacgtccctggtcgatattcacgggcagaacgacggacagaaacttttagccgaatcaaaccactgcgcgtaccttgacgctttttccggcgccgccgccgcccttttagattaccaaacgaaatataagctgtttgcgtccaaacagaaagaattaaacgacctgaagaagaaagctcaggataaggagatacgtcaggacgagctaaggcggcagatcgatgaaataggcaaggcgaagctgtccgaaggcgaacaggacgagctgctggcaaggcgctctatcttaatgaacgccgggaaattaataggggccgtcgacgccgcctatagcgcccttgcgactaacggcgacgccgtcggtttgctgtccgccgcttcttctcaacttgataaggccgccgcttacgccgccgaactgaacgttttcgccgatagggttaacgggctgcgggcagacgtcgagcacgtcgcgcaacaaatcggcgcttttagaaaaagcctcaacttttcacccgaagagcaggatgatatagagagccgcttagccctgcttcaccgtcaggaagacgctacgcttcccccggcaagactatatcgaggcttgaatcaggccaggagcgaacttggcggagttagactaccctga

SEQ ID NO: 72872 - protein, 254 aa, Unknown
  Obtained from environmental sample
  misc_feature (1)..(254): Xaa is any amino acid
MSSHEDDHLILSRSINSDGESTCRINGSPVSVSQLREIGTSLVDIHGQNDGQKLLAESNHCAYLDAFSGAAAALLDYQTKYKLFASKQKELNDLKKKAQDKEIRQDELRRQIDEIGKAKLSEGEQDELLARRSILMNAGKLIGAVDAAYSALATNGDAVGLLSAASSQLDKAAAYAAELNVFADRVNGLRADVEHVAQQIGAFRKSLNFSPEEQDDIESRLALLHRQEDATLPPARLYRGLNQARSELGGVRLP

SEQ ID NO: 72873 - DNA, 990 bp, Unknown
  Obtained from environmental sample
  misc_feature (1)..(990): n is a, c, g, or t
atggcgagaaattcaaatcaggacacacagggnattattcaatctgtagttttcagcccggatggaaaacagatcatctcatgttcttatgatgacaaatatatcaggatatgggatgttgctacagggcgtgaagaaaaaaacctattagttgatgataaagttcaaaattttatatttagtcctgatggagtatatattatttccagatctacctctcttcccggaactattaatatatgggatattaaaacgggtaaagaaattagaagaatttatgggggattaagtgatgctgttatatctatggatattagccctgacggaagacgaatcgcatctgtttatgaagaatttacgtctcctggtcgggaaaatattgtaaaaacaagattttttgatttaacgacaggaaaacaaatacaatcctttttagacaacatagagcgtgtaacaaatattgcatttaatcctgacgggaagatgattattaccgaatctattgatgatggagtaattaaaatttgggatgtggttacagaacaagaactcagaaccatctcggatgatatctttttatcctttacctatgatggaaaacatattatttctcgatccaaaggttttaaaacactaaatattactatatgggatgtaaacaccggcatgaaaataaaaactgtttcaacaacggacttttttagattcttcgcaattagcccggatgaaagtttgattgcaactgtttcctatgaacataaaatattccaattaattgacacagctacaggtaagaaaatcaatactgaatcaagttttacaggtcatacatctcaaattacctgtttagccttcagccctgacgganaaatgatagtttccggttctgcggacaaatcaatcaaactttggggatgtgccacaggcaaagaaattcaaactatgggaagaataagttttaataacccctgcccttccgggggggggtga

SEQ ID NO: 72874 - protein, 329 aa, Unknown
  Obtained from environmental sample
  DOMAIN (268)...(305): WD domain, G-beta repeat
  misc_feature (1)..(329): Xaa is any amino acid
MARNSNQDTQGIIQSVVFSPDGKQIISCSYDDKYIRIWDVATGREEKNLLVDDKVQNFIFSPDGVYIISRSTSLPGTINIWDIKTGKEIRRIYGGLSDAVISMDISPDGRRIASVYEEFTSPGRENIVKTRFFDLTTGKQIQSFLDNIERVTNIAFNPDGKMIITESIDDGVIKIWDVVTEQELRTISDDIFLSFTYDGKHIISRSKGFKTLNITIWDVNTGMKIKTVSTTDFFRFFAISPDESLIATVSYEHKIFQLIDTATGKKINTESSFTGHTSQITCLAFSPDGXMIVSGSADKSIKLWGCATGKEIQTMGRISFNNPCPSGGG

SEQ ID NO: 72875 - DNA, 843 bp, Unknown
  Obtained from environmental sample
  misc_feature (1)..(843): n is a, c, g, or t
atgcgcgacccgcgcattctctacgtcatgaccctgttcaacaccgccacccccatcatcgacataaccctggaccgggacaaggccaaggccttgggcgtggaggtggccgacattttcgcggccatgcaagcctttctgggcggctattacgtcaacgacttcaacctggagggccggaccttccaggtcaacctcatggccggggccggccagcgccgcaacctcaccgaccttcacaacctccatgtccgctccggcgccggggccatggtgcccttgggctcccttttggaagccaggatcaccaccgccccccacaacatcacccgctacaacaacagccggaccatcaagatccagggttcggccaagcccggcctgggcacgggcgaagccatcgcggccatggaggcggtttccgccaacctcccggccggctacggctttgaatggaccggcggcaccctacaggagaaggaatcatccggccggaccgtctatgtcttcgtcctgtcgctcttgttcgcctatctcttcctggtggccctctacgagagctggaccatacccgtcggggttatcttctccatttccgccgccctctacggggccttgctcgcggtgatgatcagcggccagtccctgggcctctatgtccagatcggcctggtcaccctcatcgccctggcttccaagaacgccattctcatcgtggagttcgccaagacggcccgggcgcggggccgcggcatccgggaggccgcggtcgagggcgccaacctccggttccgggcggtcatgatgacctccatctcctttctggccctcggccgatcctga

SEQ ID NO: 72876 - protein, 280 aa, Unknown
  Obtained from environmental sample
  misc_feature (1)..(280): Xaa is any amino acid
MRDPRILYVMTLFNTATPIIDITLDRDKAKALGVEVADIFAAMQAFLGGYYVNDFNLEGRTFQVNLMAGAGQRRNLTDLHNLHVRSGAGAMVPLGSLLEARITTAPHNITRYNNSRTIKIQGSAKPGLGTGEAIAAMEAVSANLPAGYGFEWTGGTLQEKESSGRTVYVFVLSLLFAYLFLVALYESWTIPVGVIFSISAALYGALLAVMISGQSLGLYVQIGLVTLIALASKNAILIVEFAKTARARGRGIREAAVEGANLRFRAVMMTSISFLALGRS

SEQ ID NO: 72877 - DNA, 381 bp, Unknown
  Obtained from environmental sample
  misc_feature (1)..(381): n is a, c, g, or t
atgtccgctccggcgccggggccatggtgcccttgggctcccttttggaagccaggatcaccaccgccccccacaacatcacccgctacaacaacagccggaccatcaagatccagggttcggccaagcccggcctgggcacgggcgaagccatcgcggccatggaggcggtttccgccaacctcccggccggctacggctttgaatggaccggcggcaccctacaggagaaggaatcatccggccggaccgtctatgtcttcgtcctgtcgctcttgttcgcctatctcttcctggtggccctctacgagagctggaccatacccgtcggggttatcttctccatttccgccgccctctacggggccttgctcgcggtga

SEQ ID NO: 72878 - protein, 126 aa, Unknown
  Obtained from environmental sample
  misc_feature (1)..(126): Xaa is any amino acid
MSAPAPGPWCPWAPFWKPGSPPPPTTSPATTTAGPSRSRVRPSPAWARAKPSRPWRRFPPTSRPATALNGPAAPYRRRNHPAGPSMSSSCRSCSPISSWWPSTRAGPYPSGLSSPFPPPSTGPCSR

SEQ ID NO: 72879 - DNA, 555 bp, Unknown
  Obtained from environmental sample
  misc_feature (1)..(555): n is a, c, g, or t
atgggctggggtcggtggggggcttcgagtatcagctctggattacgagggccgccccttccggaaattcgaaggcgggggtttccaggtctggggccaggccatgcgcgacccgcgcattctctacgtcatgaccctgttcaacaccgccacccccatcatcgacataaccctggaccgggacaaggccaaggccttgggcgtggaggtggccgacattttcgcggccatgcaagcctttctgggcggctattacgtcaacgacttcaacctggagggccggaccttccaggtcaacctcatggccggggccggccagcgccgcaacctcaccgaccttcacaacctccatgtccgctccggcgccggggccatggtgcccttgggctcccttttggaagccaggatcaccaccgccccccacaacatcacccgctacaacaacagccggaccatcaagatccagggttcggccaagcccggcctgggcacgggcgaagccatcgcggccatggaggcggtttccgccaacctcccggccggctacggctttga

SEQ ID NO: 72880 - protein, 184 aa, Unknown
  Obtained from environmental sample
  misc_feature (1)..(184): Xaa is any amino acid
MGWGRWGASSISSGLRGPPLPEIRRRGFPGLGPGHARPAHSLRHDPVQHRHPHHRHNPGPGQGQGLGRGGGRHFRGHASLSGRLLRQRLQPGGPDLPGQPHGRGRPAPQPHRPSQPPCPLRRRGHGALGLPFGSQDHHRPPQHHPLQQQPDHQDPGFGQARPGHGRSHRGHGGGFRQPPGRLRL

SEQ ID NO: 72881 - DNA, 405 bp, Unknown
  Obtained from environmental sample
  misc_feature (1)..(405): n is a, c, g, or t
gtgccgccggacgaaaacggcgagaccttgatacaggcgggcattttgaaaataaaactgaacatatccgacctgtcgctggacgacacggaggaaaaggaaaaacggcggatgtacgccgcgtcgggcgcgaaatcgggcaagagcctgagcatctcgcctgaaatagacctgcgcgggctgatggtggaagagggcgtggacaaggcggacaaataccttgacgacgcgttcctgtccgggcttggcacggtcacgctgatacacgggaagggcaccggcgcgttgcgctccgcgatacaggcgatgtgcaagcggcacccgcacgtcaaggagtaccgtttgggcaaattcggcgagggcgagcacggggtgacggtggtggagctgaagaactcaccttaa

SEQ ID NO: 72882 - protein, 134 aa, Unknown
  Obtained from environmental sample
  DOMAIN (56)...(131): Smr domain
  misc_feature (1)..(134): Xaa is any amino acid
MPPDENGETLIQAGILKIKLNISDLSLDDTEEKEKRRMYAASGAKSGKSLSISPEIDLRGLMVEEGVDKADKYLDDAFLSGLGTVTLIHGKGTGALRSAIQAMCKRHPHVKEYRLGKFGEGEHGVTVVELKNSP

SEQ ID NO: 72883 - DNA, 435 bp, Unknown
  Obtained from environmental sample
  misc_feature (1)..(435): n is a, c, g, or t
gtgaatccggcaatcaccgcttcggtattccaaacggaagcgcacaaaatcatctttgccgttattcaagagctgcgaaaacagggtgtacggcctgatattgagattttgtccagggaactcgccaaaaaaaacaagattgaagctgccgggggctatgacggtattgctgccctcacagacggcgcgttcccttccagcgttaattattacgagactgaggtgcttgacgaatataggcggcgttgtgcatggagggtagcagcggaattacaggaatctcttanaaagaacacgttcacggatcaagagattgcggatactgctaaaaaactcaccgacataaccaccacatccagcctgcaaacggagaagagggatactgttttcccatctcttaaaaaaacagtttcccccggatacctgggatgttga

SEQ ID NO: 72884 - protein, 144 aa, Unknown
  Obtained from environmental sample
  misc_feature (1)..(144): Xaa is any amino acid
MNPAITASVFQTEAHKIIFAVIQELRKQGVRPDIEILSRELAKKNKIEAAGGYDGIAALTDGAFPSSVNYYETEVLDEYRRRCAWRVAAELQESLXKNTFTDQEIADTAKKLTDITTTSSLQTEKRDTVFPSLKKTVSPGYLGC

SEQ ID NO: 72885 - DNA, 696 bp, Unknown
  Obtained from environmental sample
  misc_feature (1)..(696): n is a, c, g, or t
gtgcccatcccggcggatgcaataagttccctcatagaactggccaaagaaatcggcatccggggcatttccgtcacggttccctacaaggaggagattatcccttacctggcgggcaaatcgaaagaggttgattacataggcgcctgtaataccattgtcgcgggccctcagggctggacgggctacaataccgacgcggcggccttttccgattcgctgttgaactttataggcaggaaggatttccggggcaggaagataaccatcgtgggcgcagggggagtcgccagggcggtagcctcggaggtacaccgtctcaaggggaaggctcttatcgtcaaccgcaccgtttcccgggcccgcagtcttgccgagttataccatttcatctgggcagggctggatatcaggggaatggatctgatggagagattctctgatatcattatccagacgagctctgtaggaatggctcccaacccggaagcggacccgattccattctataaattcaccggccgggagattgtgatggaccttatctatgagccggaaaagacccgctgcttgcagcgcgcggaagaggcgggctgccgtatattgaacggttacgatatgcttcaccggcaggcccgcaggcagtatgcccattatctgaagaaagaattcccgccttccttatttcacgggtga

SEQ ID NO: 72886 - protein, 231 aa, Unknown
  Obtained from environmental sample
  DOMAIN (1)...(53): Shikimate dehydrogenase substrate binding domain
  misc_feature (1)..(231): Xaa is any amino acid
MPIPADAISSLIELAKEIGIRGISVTVPYKEEIIPYLAGKSKEVDYIGACNTIVAGPQGWTGYNTDAAAFSDSLLNFIGRKDFRGRKITIVGAGGVARAVASEVHRLKGKALIVNRTVSRARSLAELYHFIWAGLDIRGMDLMERFSDIIIQTSSVGMAPNPEADPIPFYKFTGREIVMDLIYEPEKTRCLQRAEEAGCRILNGYDMLHRQARRQYAHYLKKEFPPSLFHG

SEQ ID NO: 72887 - DNA, 363 bp, Unknown
  Obtained from environmental sample
  misc_feature (1)..(363): n is a, c, g, or t
atgatgctgaaaaaattcctgaacgtggacgtgccaaacgtcttctgtaccaagatagcctcgagactcgcacgcacgtattccgaccggcactccttgaaaacgctcgcgcaggagctactcggcatagagttgaacaaggacgagcaatgctccgactgggcagcgaaaaaacttggcaaaaagcagatcgaatacgccgccgccgatgtgctttacttgcacgacatccgcgaaatcctcgccggaatgctggggcgtgaaggaaggacggcgctcgccgaggcatgcttcggattccttcccgcgcaggccgaactggacttggcgggctggcaggaccaggacatattcgcacattaa

SEQ ID NO: 72888 - protein, 120 aa, Unknown
  Obtained from environmental sample
  misc_feature (1)..(120): Xaa is any amino acid
MMLKKFLNVDVPNVFCTKIASRLARTYSDRHSLKTLAQELLGIELNKDEQCSDWAAKKLGKKQIEYAAADVLYLHDIREILAGMLGREGRTALAEACFGFLPAQAELDLAGWQDQDIFAH

SEQ ID NO: 72889 - DNA, 555 bp, Unknown
  Obtained from environmental sample
  misc_feature (1)..(555): n is a, c, g, or t
atgtcgacgcgaaatcttcgcgcaatttttgtatgggctgttttaaggccccgaagccacatccctgtggattcaatggggagtataatatataagcaagtgcaatgcaaggaaaagtttgtcgttctgagtctgttattttggcgcgcggccacccctccgggggaggggaatttagtggtgggggtggggtggaaagacgcgttcgcgcaggcgctctaccaatataaacagcgacggcgtcaagaaaaacgaccacaccaatcctacaagcatcccgccgaccagcaccgccgccatcgacaccttgaatccgcttgtcgaaaacatctggggcagcaggcccgtcaccaccgcaaccgtcgtcattatcaccatccgaaacttatccacataattgtcccaaagcgccttcgtgggctccgccccgttttctatcgcgaccgtcgtaggctcaagcagcaatatctcggcatttatcacaagcccgaccagcattattatcgaaagcatcgccccgatgttcatcgacgcgcccaaaagaaacaaaaataa

SEQ ID NO: 72890 - protein, 184 aa, Unknown
  Obtained from environmental sample
  misc_feature (1)..(184): Xaa is any amino acid
MSTRNLRAIFVWAVLRPRSHIPVDSMGSIIYKQVQCKEKFVVLSLLFWRAATPPGEGNLVVGVGWKDAFAQALYQYKQRRRQEKRPHQSYKHPADQHRRHRHLESACRKHLGQQARHHRNRRHYHHPKLIHIIVPKRLRGLRPVFYRDRRRLKQQYLGIYHKPDQHYYRKHRPDVHRRAQKKQK

SEQ ID NO: 72891 - DNA, 447 bp, Unknown
  Obtained from environmental sample
  misc_feature (1)..(447): n is a, c, g, or t
atgaacagcgtggggcaccggtttacgttagtgcttacgattttcacatcgtttgtcggggtgtttttatttttgtttcttttgggcgcgtcgatgaacatcggggcgatgctttcgataataatgctggtcgggcttgtgataaatgccgagatattgctgcttgagcctacgacggtcgcgatagaaaacggggcggagcccacgaaggcgctttgggacaattatgtggataagtttcggatggtgataatgacgacggttgcggtggtgacgggcctgctgccccagatgttttcgacaagcggattcaaggtgtcgatggcggcggtgctggtcggcgggatgcttgtaggattggtgtggtcgtttttcttgacgccgtcgctgtttatattggtagagcgcctgcgcgaacgcgtctttccaccccacccccaccactaa

SEQ ID NO: 72892 - protein, 148 aa, Unknown
  Obtained from environmental sample
  misc_feature (1)..(148): Xaa is any amino acid
MNSVGHRFTLVLTIFTSFVGVFLFLFLLGASMNIGAMLSIIMLVGLVINAEILLLEPTTVAIENGAEPTKALWDNYVDKFRMVIMTTVAVVTGLLPQMFSTSGFKVSMAAVLVGGMLVGLVWSFFLTPSLFILVERLRERVFPPHPHH

SEQ ID NO: 72893 - DNA, 903 bp, Unknown
  Obtained from environmental sample
  misc_feature (1)..(903): n is a, c, g, or t
ttggcaaaaccgtttttcagcatttactatttttataaaatgaataaaaaattactttttttagctctttttgtgccaatatcaataatggcgcaaacttggaacggtgcggctaatacagattggtttaatgcctcgcaaagttcgtttaccataaccacggcagagcaacttgctggattggcatcgcttgtgaacaatggtacaaattttaacagcaaaactattaaccttaacgcaaatattgcactcggtagtagagcttggactccaataggagatgcttctaatcacattttcaacggaacttttgacggcaatggttacgtggtaagcggtgttaatataaattctccaaatgataattatataggattattcggattttcaagcggaactataaaaaatcttggggtaacctcttctacaattaagggaaatggtgatgttggtgggcttgtaggtgaaaatagaggcacaataagaaattgctattccagagcttcggttacaggggatttgtatgtaggtggcttggtgggagccaacagtggtggcactataagcagcagttattctactggcagtgtgacagcaactgacaaagacattgctggcggattggtaggatataataatcaaggtacggtaagcggctattacgatagtgaaacaagcggtcaaaaggatactggcaaaggcactggcaaaacctcagcggaaatgagaacgcagtccactttctcaacctgggattttactggtatttggggcatgagcagccaaataaacgatggttatccctatttgcgtaacccttcaatacctcaatcgtcttctagttccttaccatcgtcttcttctagcaaatcatcttcttcgttaatagctcggccgatctga

SEQ ID NO: 72894 - protein, 300 aa, Unknown
  Obtained from environmental sample
  DOMAIN (172)...(198): The GLUG motif
  misc_feature (1)..(300): Xaa is any amino acid
MAKPFFSIYYFYKMNKKLLFLALFVPISIMAQTWNGAANTDWFNASQSSFTITTAEQLAGLASLVNNGTNFNSKTINLNANIALGSRAWTPIGDASNHIFNGTFDGNGYVVSGVNINSPNDNYIGLFGFSSGTIKNLGVTSSTIKGNGDVGGLVGENRGTIRNCYSRASVTGDLYVGGLVGANSGGTISSSYSTGSVTATDKDIAGGLVGYNNQGTVSGYYDSETSGQKDTGKGTGKTSAEMRTQSTFSTWDFTGIWGMSSQINDGYPYLRNPSIPQSSSSSLPSSSSSKSSSSLIARPI

SEQ ID NO: 72895 - DNA, 384 bp, Unknown
  Obtained from environmental sample
  misc_feature (1)..(384): n is a, c, g, or t
atgctacgaaatatgcaattaacgctttttgacaaaaaagcgcctgcgacaataagtattaaagaatctgcttctgccacgggagtttctattgctacaattaggaattggataaaaactggatacttaatatcatcaggaaaaggaacgatcacaattgattctttagaacaattcaaaaaagaagttataggaaaagaaaagttaaatcggatggcgaataaatcattcaaagacagccatgatcacaaacatataatatcaatatttctgaaaaaaattaaagaacgcacaaaaggatatagtaatattggtgaagattatgaattaagtctatcagactcatatcgaaataaagaaggaatatattatacgcccatgtaa

SEQ ID NO: 72896 - protein, 127 aa, Unknown
  Obtained from environmental sample
  misc_feature (1)..(127): Xaa is any amino acid
MLRNMQLTLFDKKAPATISIKESASATGVSIATIRNWIKTGYLISSGKGTITIDSLEQFKKEVIGKEKLNRMANKSFKDSHDHKHIISIFLKKIKERTKGYSNIGEDYELSLSDSYRNKEGIYYTPM

SEQ ID NO: 72897 - DNA, 732 bp, Unknown
  Obtained from environmental sample
  misc_feature (1)..(732): n is a, c, g, or t
ttgatcgcgaggctttcgcgccagcaagtcaaggtgagggaaagcggcgcgcggtattttgtggatttgaccgtggaagttccctccggtctgcgtatggatgaagcgcatgatattacggaattgctggaaagtctggtcggcgatgttctgcccggggtggaaacccacatccacatagagccggcggaaaatgaggctcatgccgattcttacgccgtttcccgccggctggcggatttgcatggcttgtccgtgcatgggcttgtgtcggcgacattgggcgatggcctgcacatttttgtgcatgtcgaattacctcccgacatgtcccttcaggaagctcacgcacgagtttccgcgtacgaaaaggatttatgcggaggcatcggggcggtacgtgtgatctcccacatggagcccgcgaaaaaggaacaggatagagagcgtgcgcctcttcgcgccgcggaggacaaaaaacgcatcgtgacggttctgcgcgaagttatgcgggaggatcggggtttgaggcattgccgtgatgaaaccgtttggagcgccggcagtcatgtgtcgctttcttttcgctgcacggcggatccggatgtgtctgtggcggacgcgcaccggcgaactgtccgcctggaaggcgaattgcgtaaacggatttcaggcttggggagaataacgattcatgtggagccggaagcgccgggacaagctgaggtataa

SEQ ID NO: 72898 - protein, 243 aa, Unknown
  Obtained from environmental sample
  misc_feature (1)..(243): Xaa is any amino acid
MIARLSRQQVKVRESGARYFVDLTVEVPSGLRMDEAHDITELLESLVGDVLPGVETHIHIEPAENEAHADSYAVSRRLADLHGLSVHGLVSATLGDGLHIFVHVELPPDMSLQEAHARVSAYEKDLCGGIGAVRVISHMEPAKKEQDRERAPLRAAEDKKRIVTVLREVMREDRGLRHCRDETVWSAGSHVSLSFRCTADPDVSVADAHRRTVRLEGELRKRISGLGRITIHVEPEAPGQAEV

SEQ ID NO: 72899 - DNA, 300 bp, Unknown
  Obtained from environmental sample
  misc_feature (1)..(300): n is a, c, g, or t
atgggcatcggcaaactcgtgggtatgcccgttcccggaacaatgaccagcgtgtggtgggaaaatctgcctgaaagcggcttgtactacggcattccaatcggcggttatatcgacagagatggaaacttcttggaaaacgcacaattggaaccggatgtcaaagtcatgaacgaaaccaacgttctttggaacaaccgcgaccagcaaatcgaagaggcggtgaaaattttgttgcaggaaacgcaacaaaacaaccaagacgtttggaaagggtttgattacaataaaaagaaataa

SEQ ID NO: 72900 - protein, 99 aa, Unknown
  Obtained from environmental sample
  misc_feature (1)..(99): Xaa is any amino acid
MGIGKLVGMPVPGTMTSVWWENLPESGLYYGIPIGGYIDRDGNFLENAQLEPDVKVMNETNVLWNNRDQQIEEAVKILLQETQQNNQDVWKGFDYNKKK

SEQ ID NO: 72901 - DNA, 750 bp, Unknown
  Obtained from environmental sample
  misc_feature (1)..(750): n is a, c, g, or t
gtgccctacgtcgaaatgtattacgtgacgggaaaagaacgagagcaggactttcgtgtgctttacgcgcagaacgcttggcgagggctgaacataggggcagagtacaacgtgattaattcaccgggcgtttacaaccgttcgtacacgcggcacagcaacattcgggcgttttcgaatttcatttcccccaaaaagcattatcgagctgttgcaggatattatttaaatacatttgagtccaacgaaaacggtggcattttacggccgttggattctgttgcagacgtatccaacaaaagagtgattagcgtcaaacttctaaacgccgagaatgtgtggaaagaaactaatttttacctcaaacaagcctaccatttcggcatcaatcgcaacgatacaattccaaattcggggctgaatttcggctatctttcgcacgcgcttgaaacaacacggtacagtaccatctaccgcgacaaatatttgaacgcagacaactaccctgctatttacaaagattccgcacaaacatttgattcgacttacgtcaatgttatgcgtaacacactgtcgtggaatatcggagatgtaacgtcgtttcaaaattcgcagtttttcaatttgagcgccggcgctattgtggatttggccaaggtgcggatggatagcctcgtcgacaacagagattacaactacatctatccgtttgccaaactgcagttgaactaccaaatcaatacattttaa

SEQ ID NO: 72902 - protein, 249 aa, Unknown
  Obtained from environmental sample
  misc_feature (1)..(249): Xaa is any amino acid
MPYVEMYYVTGKEREQDFRVLYAQNAWRGLNIGAEYNVINSPGVYNRSYTRHSNIRAFSNFISPKKHYRAVAGYYLNTFESNENGGILRPLDSVADVSNKRVISVKLLNAENVWKETNFYLKQAYHFGINRNDTIPNSGLNFGYLSHALETTRYSTIYRDKYLNADNYPAIYKDSAQTFDSTYVNVMRNTLSWNIGDVTSFQNSQFFNLSAGAIVDLAKVRMDSLVDNRDYNYIYPFAKLQLNYQINTF

SEQ ID NO: 72903 - DNA, 474 bp, Unknown
  Obtained from environmental sample
  misc_feature (1)..(474): n is a, c, g, or t
atggccggtaccggtatctttaaagctatttatgacgatggtgaatttcaagagattctcgacgcgctttccaaagcttccgacccccagttagagacccttgcgtggtttatgggagaggaattgcaggatataagcgaacaggcttttgagaatgaaagagatccggtaaccggcaaaaaatgggaacctataaagccccgtggaaacggagcaagtgaaccgggaagcgttactaccattttgcgggatcacggtactttatcagaatcactgacgcataacgacacccctgaaggcacggtttttggttctcacatggagtacgccagaatacaccaaaagggaggacaagcaaggagaggcaaaaaaaccaaaatcgaagcgcggccatatatgggagtaccgcaggattttgatcgccggattttgaatgatccggctgtgctggatttgttgggtttagggggatga

SEQ ID NO: 72904 - protein, 157 aa, Unknown
  Obtained from environmental sample
  DOMAIN (11)...(154): Phage virion morphogenesis family
  misc_feature (1)..(157): Xaa is any amino acid
MAGTGIFKAIYDDGEFQEILDALSKASDPQLETLAWFMGEELQDISEQAFENERDPVTGKKWEPIKPRGNGASEPGSVTTILRDHGTLSESLTHNDTPEGTVFGSHMEYARIHQKGGQARRGKKTKIEARPYMGVPQDFDRRILNDPAVLDLLGLGG

SEQ ID NO: 72905 - DNA, 705 bp, Unknown
  Obtained from environmental sample
  misc_feature (1)..(705): n is a, c, g, or t
gtgaaaattgtcctgacggcaaaaccagattttacctttactggcgtgaccacaactgcggatacattcacagttaatggtgcggtctcgacaacagcagtcattgagtccgttcccgcggatggctcaacatatacttttgtggctacattaaagaaaatcgtacccgccgcgaacattactgaaaccgctccagtgagagccaccggatcattgaatacaactgtaccaacgccaaccggagtaactgtaacaatgaagtggtataacgccgatacaaacgccgaagtaagcggaacaccagcagcctataccagatacaaagtggaatacaccctgacggaatccgctggctacacccttaccggagtgaatacgagcggatttagggtgaatggtcaagctgccacctataccgcccctgccggcgacaacaaagcaacgattacctacacattcccgagaacagagggcgctccaattaccacatccaacactataacaattcccactcttccaaaagttggcgtaaccataccggcagaaacatccattaccgcagtcccggttacttatagcgcaaaagtatcgtgggttgccagcgcctctaatacagctgctgctgtaacacctggtaatttcttagctaatacagactacttcgcaaaaattgtcctgacggcaaaaccgcggttatacctttaa

SEQ ID NO: 72906 - protein, 234 aa, Unknown
  Obtained from environmental sample
  misc_feature (1)..(234): Xaa is any amino acid
MKIVLTAKPDFTFTGVTTTADTFTVNGAVSTTAVIESVPADGSTYTFVATLKKIVPAANITETAPVRATGSLNTTVPTPTGVTVTMKWYNADTNAEVSGTPAAYTRYKVEYTLTESAGYTLTGVNTSGFRVNGQAATYTAPAGDNKATITYTFPRTEGAPITTSNTITIPTLPKVGVTIPAETSITAVPVTYSAKVSWVASASNTAAAVTPGNFLANTDYFAKIVLTAKPRLYL

SEQ ID NO: 72907 - DNA, 504 bp, Unknown
  Obtained from environmental sample
  misc_feature (1)..(504): n is a, c, g, or t
gtgtcgcccggagggcgtcttgattgcgtggttccgtgttgcgagactgaccaaatgaagacaaaaaaatcccccgcgcatgtctaccgtcccgatatagacggcctgcgggccttcgccgttcttgtcgcggtcacataccacgcttttccgaccgtattgcagagcggttttatcggccctgaggtttttttcgtgatctccggctatctcatcagcgggatcatcctgaacgacctgcaacaaggaaccttcagcctccggaatttctacgtccgcaggatacgccgcatctttcccgccctgctcgtcgtgttggcggccgcacttattttaggctggttcgtccttttcccttccgaataccgctctctgggcgagcatgtcttcggcggttccgtctttatttccaattttcttctctggcaggaggccggctatttcgacctcgcggcaaagagcaaacccctcctgcatcttggacttgggcaagctcggcgataa

SEQ ID NO: 72908 - protein, 167 aa, Unknown
  Obtained from environmental sample
  misc_feature (1)..(167): Xaa is any amino acid
MSPGGRLDCVVPCCETDQMKTKKSPAHVYRPDIDGLRAFAVLVAVTYHAFPTVLQSGFIGPEVFFVISGYLISGIILNDLQQGTFSLRNFYVRRIRRIFPALLVVLAAALILGWFVLFPSEYRSLGEHVFGGSVFISNFLLWQEAGYFDLAAKSKPLLHLGLGQARR

SEQ ID NO: 72909 - DNA, 657 bp, Unknown
  Obtained from environmental sample
  misc_feature (1)..(657): n is a, c, g, or t
ttggagctcatagatatccgcggggacgtggtaaccattgatgccatggggtgccaaacggcgatagcagaacaaatacggaagaaacaggcggactatatcctggcggtgaaggaaaaccacccaaccttgtgccaggatatccgggattatttcgattatctggaacaagggccgggccgaaacgtgccggctgaacagtgggacagcccccttgagaaagaccatgggagaatagagcggcgaagcgtcagcgccgtcacgagccttgactggctggaaggcaaagatgcctggaaagacttggcagctattatacgctaccgaacaagccgtaccgtgggagaggaaactgccgttaccgaccaatactatatcagcagcatggccgcttcagccgaaacattcgggcatcttattaggggccattggtcaattgagaatcggctccactggtctttggatgttttattccgggaagatgcttgtcaggtgcggaagggccgggctcctgaaaatctgaatgttttacggaagatagccctagcccggttgcgggccactccggtcgaaaaaaagcgttcttctatgaagcgcaagagttttaaggctgcgattaaccctcagttccttctttcggtcttattcggaaagtaa

SEQ ID NO: 72910 - protein, 218 aa, Unknown
  Obtained from environmental sample
  misc_feature (1)..(218): Xaa is any amino acid
MELIDIRGDVVTIDAMGCQTAIAEQIRKKQADYILAVKENHPTLCQDIRDYFDYLEQGPGRNVPAEQWDSPLEKDHGRIERRSVSAVTSLDWLEGKDAWKDLAAIIRYRTSRTVGEETAVTDQYYISSMAASAETFGHLIRGHWSIENRLHWSLDVLFREDACQVRKGRAPENLNVLRKIALARLRATPVEKKRSSMKRKSFKAAINPQFLLSVLFGK

SEQ ID NO: 72911 - DNA, 408 bp, Unknown
  Obtained from environmental sample
  misc_feature (1)..(408): n is a, c, g, or t
atggggcgcacggcgcacggcgtnatcggcataaggctgaacggcgacgacaaggtngtcgccatgtccgctttcaaaggtcccggccaattcctgacgatcgccgaaaaaggattcggcaagcgaaccgatgttgatagataccctcgtcatggacgcggcggacagggcgtaataaacttcgacgtggtttccaaaagcggcaaggtggtaaatacatgccatgtccacgccggagcgtccgtcatgctgattacagccaacggcaaactgattcagctccacgtcgatgatatccgcgatacgcagtcgcgcgcggctgtgggcgtcaaatgcatagatattgaagaaggcgattacgtggcaagcgttacagtggccgccggcgaggaagaaccggagaattag

SEQ ID NO: 72912 - protein, 135 aa, Unknown
  Obtained from environmental sample
  DOMAIN (28)...(78): DNA gyrase C-terminal domain, beta-propeller
  misc_feature (1)..(135): Xaa is any amino acid
MGRTAHGVIGIRLNGDDKVVAMSAFKGPGQFLTIAEKGFGKRTDVDRYPRHGRGGQGVINFDVVSKSGKVVNTCHVHAGASVMLITANGKLIQLHVDDIRDTQSRAAVGVKCIDIEEGDYVASVTVAAGEEEPEN

SEQ ID NO: 72913 - DNA, 495 bp, Unknown
  Obtained from environmental sample
  misc_feature (1)..(495): n is a, c, g, or t
ttggaaatgatattttggaatgatattaatggttggggtgatttacaggcaaaggttagaagtggactaattcgttcttgctcgcagcacagtgcggcagaaaaacttgatttaaacgaaattttaaacgaacctttgctttatccaattcatgatgaacttaccgctgtatgtaaaaagttagaacttgtacgtctggaacatggagggaaaaaaacatatcatactatgatagcggcttattattatgatttagcaaaggtttttgttactctgcgacaacttatgaaagaaaattcaataatttgttttgtcatcggagattcggctccttacggtgtgtatgctccggctgatatatggctaggtaaactcgctgttgccgcaggatttaaatcatggaactttgaaaaaacacgagatagaaatatcaaatggaaaaatagaaaacatactgtccctcttaaagaagggcgtttatggataagaggttag

SEQ ID NO: 72914 - protein, 164 aa, Unknown
  Obtained from environmental sample
  misc_feature (1)..(164): Xaa is any amino acid
MEMIFWNDINGWGDLQAKVRSGLIRSCSQHSAAEKLDLNEILNEPLLYPIHDELTAVCKKLELVRLEHGGKKTYHTMIAAYYYDLAKVFVTLRQLMKENSIICFVIGDSAPYGVYAPADIWLGKLAVAAGFKSWNFEKTRDRNIKWKNRKHTVPLKEGRLWIRG

SEQ ID NO: 72915 - DNA, 651 bp, Unknown
  Obtained from environmental sample
  misc_feature (1)..(651): n is a, c, g, or t
ttgtgcttctttgagaccctgcccggcctcgcctgtacggcggaggaactccaaggcagcttgacagagcttcctttttcttggcatatgcacctgccggcggatctgccctgggacatcggagcggaagcgtcagccaactgcgctttgcgcctgatgcgcaaggcggaagcgctgaaactccgcatggccgtgctgcacgcgccggctttgcctgcccgtaaggcgttgctggcggcctttgccgaggtatggtactcgcgttgcgccgtaccgctgttgctggaaaacattgcgggttgcgatctgctcgatgtcgtgcagatcatcgtggacgcggaattcggcgtctgcctggatctggggcatatgttggcatacgggcagcagaatattatggacgttcccgagcttgtctcacgtgtgcagcttgcgcactggagcgcgcccgacggggcggatcgccatcagtcgcttgcgcggctcacgcgggaagaaaaagatgccatccgggccgcaacggcgaaacttcccgacacgatcacgcatctactcgaaatatttgactggaacggaatagaagagtcgctggcgcttctgccggatcttctcccttcccggttggcgggaaaaacggatcgggaggcgtag

SEQ ID NO: 72916 - protein, 216 aa, Unknown
  Obtained from environmental sample
  misc_feature (1)..(216): Xaa is any amino acid
MCFFETLPGLACTAEELQGSLTELPFSWHMHLPADLPWDIGAEASANCALRLMRKAEALKLRMAVLHAPALPARKALLAAFAEVWYSRCAVPLLLENIAGCDLLDVVQIIVDAEFGVCLDLGHMLAYGQQNIMDVPELVSRVQLAHWSAPDGADRHQSLARLTREEKDAIRAATAKLPDTITHLLEIFDWNGIEESLALLPDLLPSRLAGKTDREA

SEQ ID NO: 72917 - DNA, 621 bp, Unknown
  Obtained from environmental sample
  misc_feature (1)..(621): n is a, c, g, or t
atggcnccgcccgcctgggcgcgcctttcccttgtcaccggcgacagaaaatacatagacgcaatggacgcaaagtactggaagtcatacgatttcctatacgacaaagaagaaaagctgttctacagggactccagctattttggcaagcaggaaaacaacggcaaaaaaatattctggagccggggaaacggctgggtgctggccgggctggcgcggctgttggacgtgatgccagcggattacccaacccgaaacaggtacgaggccctattcgtagagatggcaagccgcatacgcgacctgcagcaggcggacgggctgtggcgcccaagccttttggaccctgccagctacccaaccggggaaaccagcgggacaggctttttcgcctacgcatttgcctgggggataaacaacaagttgctgaagcgcgcggacttcgcccctgccgtggcccgcgcatggaaagccctaaacgagtgcatacagcccgacggcaggcttggctgggcccagcccataggccaggacccaaaactggtcaaggccgaggacaccgaagtctatgccgtcggcgcgtttttgctggctgggcgcgaagtgctggcgatgaagtga

SEQ ID NO: 72918 - protein, 206 aa, Unknown
  Obtained from environmental sample
  DOMAIN (1)...(206): Glycosyl Hydrolase Family 88
  misc_feature (1)..(206): Xaa is any amino acid
MAPPAWARLSLVTGDRKYIDAMDAKYWKSYDFLYDKEEKLFYRDSSYFGKQENNGKKIFWSRGNGWVLAGLARLLDVMPADYPTRNRYEALFVEMASRIRDLQQADGLWRPSLLDPASYPTGETSGTGFFAYAFAWGINNKLLKRADFAPAVARAWKALNECIQPDGRLGWAQPIGQDPKLVKAEDTEVYAVGAFLLAGREVLAMK

SEQ ID NO: 72919 - DNA, 762 bp, Unknown
  Obtained from environmental sample
  misc_feature (1)..(762): n is a, c, g, or t
gtgggcgcgaataaaaacagcgcgacaattatttccgaccataccgatatgtttgcgcaggcgtactttgtatatgacagcaaaaaaagtggcggcacaactacaagccacgttcggttttcaaagaagcctatacgtatgccctaccttgtttcaaatccgacttttgtggcgtgtcataatcaatcctttattggaaaatttgatatgttgtcgggcataaggacgggcgggacgtttttattgaatacgacctatacacccgaagaattgaataatgttttgacgcccgatattaagaaaacattgaaagataaaaaaatcaacttttacacaattaacgcatacaaaattgcgggcgaattgggattgaagggacgcattaacacaattatgcaatcttgttttttcaaattgaccgaagttattccgtttggcgaagccgtaaaattcatgaaaggcgcgattgacaaaagttacggcaaaaaaggcgcggcggttttggaaatgaactatgctgcggtcgatgcagccgagaaacatttgacgcggtttgacacctctgccctgaccgtttctgttgccaaagggtgcggctcgggctgcgcgtgttgtggcggatgcggcgcgaacaaaagcggcaacaaattagaagcctattacaatgcggtttgcaaaccgattacacgatgcgcggcgacgaattgccggtgtcggcgtttagcgcggacggacgtgttccctacgcgactacgctattga

SEQ ID NO: 72920 - protein, 253 aa, Unknown
  Obtained from environmental sample
  DOMAIN (2)...(180): Pyruvate ferredoxin/flavodoxin oxidoreductase
  misc_feature (1)..(253): Xaa is any amino acid
MGANKNSATIISDHTDMFAQAYFVYDSKKSGGTTTSHVRFSKKPIRMPYLVSNPTFVACHNQSFIGKFDMLSGIRTGGTFLLNTTYTPEELNNVLTPDIKKTLKDKKINFYTINAYKIAGELGLKGRINTIMQSCFFKLTEVIPFGEAVKFMKGAIDKSYGKKGAAVLEMNYAAVDAAEKHLTRFDTSALTVSVAKGCGSGCACCGGCGANKSGNKLEAYYNAVCKPITRCAATNCRCRRLARTDVFPTRLRY

SEQ ID NO: 72921 - DNA, 531 bp, Unknown
  Obtained from environmental sample
  misc_feature (1)..(531): n is a, c, g, or t
atgagacacgggaaaaagaacaaacattttaaccgggatgcgaattcaaggaagtcgctgtttttgaacctgacgaaatccttgattgagaaagagcagattaagacgacgcttcagcgcgcgaaggcgctgcgcggcattgtcgaaaagatgattacgcgcgcgaagaaggacactttggcgaaccgccgccttgcagcgagcgaattgcaaaacgacgaaaagacggtcaagaaattgttcgccgttttggggcggcgctatctttcgcgcccgggcggatacacgcgcgttttgaaggccgggtttcgctatggcgatgcggccgagatggcgataatagaattggttgaccgcgacgcggacgcgaaaaagtcggcggcgaaaaagccggtcgaaaagtcggaggcaaaaccgcgggcggaatccaaaacggagtccaaaaaggtcgcgattgacacgggcggaaccgtccgggcgtcgaagggcacaaaggaagtgtcggtgaaacgccgcgcggccggaaaataa

SEQ ID NO: 72922 - protein, 176 aa, Unknown
  Obtained from environmental sample
  DOMAIN (20)...(117): Ribosomal protein L17
  misc_feature (1)..(176): Xaa is any amino acid
MRHGKKNKHFNRDANSRKSLFLNLTKSLIEKEQIKTTLQRAKALRGIVEKMITRAKKDTLANRRLAASELQNDEKTVKKLFAVLGRRYLSRPGGYTRVLKAGFRYGDAAEMAIIELVDRDADAKKSAAKKPVEKSEAKPRAESKTESKKVAIDTGGTVRASKGTKEVSVKRRAAGK

SEQ ID NO: 72923 - DNA, 381 bp, Unknown
  Obtained from environmental sample
  misc_feature (1)..(381): n is a, c, g, or t
atggcattgaagcacaagaaaaaagttgtaaaaaaagtttcgcacggcgtggctcacgttcttgcgacgatgaacaatacgcggattacgattacggatcagggcggcgcggtgctgtgctgggcgaccgcgggcgcgaacagtttcaagggcgcgaaaaaatcgacgccctatgccgcggcgatcgtcgcggaaagcgtggcgaaaaaggcgtgcgaattgggcatgaaaaccgtcgacgtgcttatgcgcggaatcggcggcgggcgcgagtccgccgttcgcgggcttggcaacgcgggtcttatcgtccagacgattacggacacgacgcgcgttccgcacaacggatgccgcccgaagaaagtgcgccgcgtgtga

SEQ ID NO: 72924 - protein, 126 aa, Unknown
  Obtained from environmental sample
  DOMAIN (16)...(125): Ribosomal protein S11
  misc_feature (1)..(126): Xaa is any amino acid
MALKHKKKVVKKVSHGVAHVLATMNNTRITITDQGGAVLCWATAGANSFKGAKKSTPYAAAIVAESVAKKACELGMKTVDVLMRGIGGGRESAVRGLGNAGLIVQTITDTTRVPHNGCRPKKVRRV

SEQ ID NO: 72925 - DNA, 807 bp, Unknown
  Obtained from environmental sample
  misc_feature (1)..(807): n is a, c, g, or t
ttgatggtaggccgggaaatgacccagcagttccctcactccaatagaaagcctgaggatatagccaaaaatgaaattgccctggaagtgaaaaattggaccgtatacgatccggaattagtagatagaattgcccttaacaacatcaattttcaggtacgcaagggggaaattctgggaattgccggccttatgggcgcgggcaggaccgaaacgatgttaagtattcttggggtatggggaaagcggagttcaggggaagtgttgcttttcggcaagccaatcttgacccgttcgcccagcgatgtaataggtgcgggaattaactacctttcggaagatcgcaagggaaagggccttgtactcattcaaaatgtcgaagacaatatggccctgccaagcctttactcaaggcttaattctaccggattaattgatcaggatgttgagcttagcgccgtagaacagatgatccaggctttaaagataaagaccccttcggtagaacaactggtacagaatttgagcggcggcaatcagcagaaggtttctttaggcagatggcttttaacaaaaccaaaagtaattattcttgacgagccaacacggggaatagatgttggggccaaatatgaaatacattccattatgcaaaaccttgccgaacagggaatcgctattatcatgatctcctcggagcttcctgagattctgggaatgagcgacaggatcgttattatgcatgagggaaaagtatcgggagaagtgctaaatcgaaggactccggaaaaaaaagagtgtcgataa

SEQ ID NO: 72926 - protein, 268 aa, Unknown
  Obtained from environmental sample
  DOMAIN (56)...(250): ABC transporter
  misc_feature (1)..(268): Xaa is any amino acid
MMVGREMTQQFPHSNRKPEDIAKNEIALEVKNWTVYDPELVDRIALNNINFQVRKGEILGIAGLMGAGRTETMLSILGVWGKRSSGEVLLFGKPILTRSPSDVIGAGINYLSEDRKGKGLVLIQNVEDNMALPSLYSRLNSTGLIDQDVELSAVEQMIQALKIKTPSVEQLVQNLSGGNQQKVSLGRWLLTKPKVIILDEPTRGIDVGAKYEIHSIMQNLAEQGIAIIMISSELPEILGMSDRIVIMHEGKVSGEVLNRRTPEKKECR

SEQ ID NO: 72927 - DNA, 759 bp, Unknown
  Obtained from environmental sample
  misc_feature (1)..(759): n is a, c, g, or t
atgattacccagggagtaaatgccttaatcatcgctccgcatgatgtagttgcaggcaagcagcttgtgcaaattgcccataaggaaaaaatccctgtcgtagcctatgatcgtcccattacagacggaggcgcggatctttatatttgtgttggtcagttccttattggcaaagccatgggtcagcacatttgggataatgtgcccagaggcaaccttgtgtttttgaagggcgatgctactgacgatacaatctacccaatggcggacggtaccatgtctgtgataaagcccaggcttgacagcgggacatacaagatcgtgatggaacaatttgtcgttgattgggatcccgccaatgccctgaggcttatggagcaggcactgaccgccaacagaaatgatatccagggggttatagcccagaacgatggtattgccggtgcggcgatacaggcaatggcagcccagggactggcagggaaggttcccgttaccggccaggatagtgaagttgacgcgattaagaggctcattgcgggaacccagggtatgacgataagctacaataaccttgctatgtcagccgccgctctggaagcagcagtaaagcttgccaaaaaagagaatccaggtgccacagaaaaagataccgatggcacgccaatgataagcttcccgcctgccataattgacaggaacaattaccgcagcctgcttattgacaccggtttgatgagcgaagacgctctgcgctaa

SEQ ID NO: 72928 - protein, 252 aa, Unknown
  Obtained from environmental sample
  misc_feature (1)..(252): Xaa is any amino acid
MITQGVNALIIAPHDVVAGKQLVQIAHKEKIPVVAYDRPITDGGADLYICVGQFLIGKAMGQHIWDNVPRGNLVFLKGDATDDTIYPMADGTMSVIKPRLDSGTYKIVMEQFVVDWDPANALRLMEQALTANRNDIQGVIAQNDGIAGAAIQAMAAQGLAGKVPVTGQDSEVDAIKRLIAGTQGMTISYNNLAMSAAALEAAVKLAKKENPGATEKDTDGTPMISFPPAIIDRNNYRSLLIDTGLMSEDALR

SEQ ID NO: 72929 - DNA, 375 bp, Unknown
  Obtained from environmental sample
  misc_feature (1)..(375): n is a, c, g, or t
ttgggtgagcggctcggcatcgctgagcaggaagcttttgagcgggtgctggcgcttaaaaaacggcacatcatccgccggctgggcgcgaacttccattccgcgcggctcggcttccgctccactctctgcgcggccaaggcgccaccggacagactggacgcctttattgccgaggtcaacgcgcagcccggcgtcacccacaactacctgcgcaagcacgagtacaacatctggttcacctgcatcggcccttcccgagacgccgtccgcgccgtgctggacggcatcacggagcgcaccggcgttcccatcctcaacctgcccgcaacgaaaatgtacaagattaaagtggatttttccatgaacggatag

SEQ ID NO: 72930 - protein, 124 aa, Unknown
  Obtained from environmental sample
  misc_feature (1)..(124): Xaa is any amino acid
MGERLGIAEQEAFERVLALKKRHIIRRLGANFHSARLGFRSTLCAAKAPPDRLDAFIAEVNAQPGVTHNYLRKHEYNIWFTCIGPSRDAVRAVLDGITERTGVPILNLPATKMYKIKVDFSMNG

SEQ ID NO: 72931 - DNA, 510 bp, Unknown
  Obtained from environmental sample
  misc_feature (1)..(510): n is a, c, g, or t
atgtacagaatcggccgaggacgaagtgagttttccggtggcaacagcatcggttattgtgccttctttgactgtagcagcctgaccgaagtgagttttccggtggcaacaagcatcggttattgtgccttctttgactgtagcagcctgaccgaagtgagttttccaaaagtagaagaaattggagataattgtttcctatctactggaaccgtctccctcaccattactatgggtaaggttgcccctatgctgggaaactctatattttctgatgtaactagcgctaaaattgttacggttaaggtaccatcctctgctgtcaactatggcacatttaccggtacaccccctactattaccgtttccggtacggataccacgtataactgggctaatggcttccggggcggcggctggattgggggggctgcatggcctggtgtttcaggttacggaccaagttctatcaacagtgacataaccctgtacatagtacaggaaaattaa

SEQ ID NO: 72932 - protein, 169 aa, Unknown
  Obtained from environmental sample
  misc_feature (1)..(169): Xaa is any amino acid
MYRIGRGRSEFSGGNSIGYCAFFDCSSLTEVSFPVATSIGYCAFFDCSSLTEVSFPKVEEIGDNCFLSTGTVSLTITMGKVAPMLGNSIFSDVTSAKIVTVKVPSSAVNYGTFTGTPPTITVSGTDTTYNWANGFRGGGWIGGAAWPGVSGYGPSSINSDITLYIVQEN

SEQ ID NO: 72933 - DNA, 366 bp, Unknown
  Obtained from environmental sample
  misc_feature (1)..(366): n is a, c, g, or t
atgttaaacagtggtaatcccggtttaatgccggtaagtaatttgagtgctgctgacgaacagcgaataaaggatttcttacagggcgctgtgtatgcgtggtgcaataacaaaaaaaacgaaccttttttatgcaggaatttaataggcggggataatttttattgggagcatacaccccttcaagttttatacaataaccacatcaatgccggtgaagacaatgatgaagctataacagaagccggcaaagacgccggaatgttgcttaaagcggtattggctgatgataaaaacaaatcatttaaacaggaaaaagcaactgaaggcggtaaagaaataagcaagtattggcttatatcgtaa

SEQ ID NO: 72934 - protein, 121 aa, Unknown
  Obtained from environmental sample
  misc_feature (1)..(121): Xaa is any amino acid
MLNSGNPGLMPVSNLSAADEQRIKDFLQGAVYAWCNNKKNEPFLCRNLIGGDNFYWEHTPLQVLYNNHINAGEDNDEAITEAGKDAGMLLKAVLADDKNKSFKQEKATEGGKEISKYWLIS

SEQ ID NO: 72935 - DNA, 501 bp, Unknown
  Obtained from environmental sample
  misc_feature (1)..(501): n is a, c, g, or t
gtgttttttgtggttgtggcgttgctgctgctttttcttcaaaccggcgcttgctcggcttataaatccttggttgaaaagaacttggaaattatcaccctcgaagaacaagtgccgaaaaagagcaagcaaagcaaattaaccaatgatgtgcatgaagaattggtgagaaaagtcctcgtcgttatggaagatacggccgtgatttgcgataccgaattttcaattaataaacttgcagatttggtgcaatccaattacatctatgtttcggaagccatcaacacggttttgcagaaaaacttccgttcgctcttgaacacctaccgcatacgcgaggcacaacgcctgttttctgagcccgatgccgccaaatacaccattgatgctgttgccttgcaagtcggctttaaatcaagaagcaccttttacgatgtgtttaaagaaattaccggtgtgagcccgtatttctatatgaagtccatgcaaaaagggttatga

SEQ ID NO: 72936 - protein, 166 aa, Unknown
  Obtained from environmental sample
  SIGNAL (1)...(20)
  DOMAIN (113)...(160): Bacterial regulatory helix-turn-helix proteins, AraC family
  misc_feature (1)..(166): Xaa is any amino acid
MFFVVVALLLLFLQTGACSAYKSLVEKNLEIITLEEQVPKKSKQSKLTNDVHEELVRKVLVVMEDTAVICDTEFSINKLADLVQSNYIYVSEAINTVLQKNFRSLLNTYRIREAQRLFSEPDAAKYTIDAVALQVGFKSRSTFYDVFKEITGVSPYFYMKSMQKGL

SEQ ID NO: 72937 - DNA, 798 bp, Unknown
  Obtained from environmental sample
  misc_feature (1)..(798): n is a, c, g, or t
gtgttgcagaattacagttgcgcgggcagtccctttcttatgtttttaccttttatttgtcttgccttgccggaggattctccgttttggacggcgaaagaaaacgaaggaatttgggtggaactgggcagcgcttcaaagacctttcttctggaaaagccgggccttatgatagtaaatcacgggaagacaggtacatcggaaatcattccaggtaaggtctattatgacgaccccaattattccaagctggtctacaacacccacttcccctgggaagatcatgatccaagcggcggaacctctatggaatacagttttcgcagtcttgatcccagagatgtcaggggcgacgacgttaatttctatctaaccggtaaaaagctgcaaaacgacgctgataaaaatcaggcttttacgacatctcaaagcatactcttcaacggggttcgaaatgacgttatgtaccggcaattaatcatgcgaaagccgccgaataacggcgtgggctatatcattgatctcgcggaaatcgttattcccggaggcgtgatccgcgttgaccgcagccgtatggcattcgagaatgaattgacgctgggccatttcggtttaccgcatatggatggaaaacaagccgttgtaaaacaatttgaagacggagacagannagtcatcacagcttcgatcccagggatccacgggatccctggcagaaaactcgcgctgataacgtatcacggctgggacaaggtatgcagcgtgattcatgggggggaggaacgcggaagcagatga

SEQ ID NO: 72938 - protein, 265 aa, Unknown
  Obtained from environmental sample
  SIGNAL (1)...(22)
  misc_feature (1)..(265): Xaa is any amino acid
MLQNYSCAGSPFLMFLPFICLALPEDSPFWTAKENEGIWVELGSASKTFLLEKPGLMIVNHGKTGTSEIIPGKVYYDDPNYSKLVYNTHFPWEDHDPSGGTSMEYSFRSLDPRDVRGDDVNFYLTGKKLQNDADKNQAFTTSQSILFNGVRNDVMYRQLIMRKPPNNGVGYIIDLAEIVIPGGVIRVDRSRMAFENELTLGHFGLPHMDGKQAVVKQFEDGDRXVITASIPGIHGIPGRKLALITYHGWDKVCSVIHGGEERGSR

SEQ ID NO: 72939 - DNA, 531 bp, Unknown
  Obtained from environmental sample
  misc_feature (1)..(531): n is a, c, g, or t
atggggggcgggatatccataggggcccacaagaatggcaggtacattgacgcgaacgatggccttgacggcgaaggtccattttcgccccagcgaagcggcagcctgcccgttggagcattcatgaaattggtcttgagcggccagtactctcccgccgagctaaaactgctgatcaaaggcaagggcggcttgataaacttgctggggacttccaacttggtcgaacttggaaaacaataccttgccggaaacgagcaagtccgatccgtattggacgcgcaggcctaccaaatatcgaaatggatcagttcgatgcttccagcctttgacggcgagaaggttgatcagattttgctgaccggcggcatggcgagggcggagttcttagtaggcgaaattcgccgcctgctgaaagcctttgggtgcgggataacggtctatccgggcgaaaacgaaatgtcggccctggccaaaggggccatcagggtgctttcgggcaaggagagcgcaaaagaatacgccccatag

SEQ ID NO: 72940 - protein, 176 aa, Unknown
  Obtained from environmental sample
  DOMAIN (1)...(174): Acetokinase family
  misc_feature (1)..(176): Xaa is any amino acid
MGGGISIGAHKNGRYIDANDGLDGEGPFSPQRSGSLPVGAFMKLVLSGQYSPAELKLLIKGKGGLINLLGTSNLVELGKQYLAGNEQVRSVLDAQAYQISKWISSMLPAFDGEKVDQILLTGGMARAEFLVGEIRRLLKAFGCGITVYPGENEMSALAKGAIRVLSGKESAKEYAP

SEQ ID NO: 72941 - DNA, 660 bp, Unknown
  Obtained from environmental sample
  misc_feature (1)..(660): n is a, c, g, or t
gtgctggaaaaattaaatccatttgctgccattaactatatanggaaggcaatcgggtatgacggatatctgacggaatacgcaaagttaagacggcttaacgaggacgaattgaccgacatattgtcggagcttcaagaaagttccaagattcatgacacatatgatgaatggtttcaatatatggaagattacaagcaagaactcatcttacaggcggaaaggcaaaaaaagaaagataccgacgccgtttctatggctacatatcatgcggcaaaaggactggaatacaggattgtcatattgaccgacgtaaacgaggatataacgccgcaccgaaaagccgtcgtacaggaggatctggaagaagaaagaaggatgttctatgttgccatgactagggcgaaggaggagttgcacatatacagcgttaaggaaagatatggcaagaagatgtcgccgtctaggttcctaggcgagataatgcttgacagaaccatgcttgccgtaggcgcaagggtcaggcacaaggtgtttgggaatggaagcgtcatagagtgcgacagggatacaattacgataaggtttgataataagtcgatggtaaagaagctgagttatacatactgcgtacaggagcagttactggaggggatatga

SEQ ID NO: 72942 - protein, 219 aa, Unknown
  Obtained from environmental sample
  misc_feature (1)..(219): Xaa is any amino acid
MLEKLNPFAAINYIXKAIGYDGYLTEYAKLRRLNEDELTDILSELQESSKIHDTYDEWFQYMEDYKQELILQAERQKKKDTDAVSMATYHAAKGLEYRIVILTDVNEDITPHRKAVVQEDLEEERRMFYVAMTRAKEELHIYSVKERYGKKMSPSRFLGEIMLDRTMLAVGARVRHKVFGNGSVIECDRDTITIRFDNKSMVKKLSYTYCVQEQLLEGI

SEQ ID NO: 72943 - DNA, 885 bp, Unknown
  Obtained from environmental sample
  misc_feature (1)..(885): n is a, c, g, or t
atgaaaatgatttgttnctacggatccccgtcgcaaatttaccctcacggcggatgcttcaggcgcatagcgcatatcgattcacttttangcgcggaggaaaggatatattgttaccagtataaatatgccgggatgcctcttgaaactgttccgcgtattaaaaaaattgccgagaatgtatcattttttcctgtttgtttttctaactccacgcataatgagctttttgtctctttattgcggaagtgcgcttttttatatgcgcataccgtggagtcaggaccatttctttatccatattacgatagtggaaaaattatcactgatttacatggaattcctcctgaagaggcggagatgttaggtcatatgaacaaggcgcgatttttcgcggcctatgaacggacgctaatacaaaaaagttatcgtgttatcggcgtctcccgggccatgtttcaccattaccaaaataaatatggccttcccgccgagcgcttcctttatcttcccatcgcgccgaatattgagcctgcatcgcgtgaaaaaagaagccgcgcgactcgggtcatctattcaggtggaacgcaaatctggcaacaggttcccaaaatgctggaagctgtcaggcaactggtgcctgagtttgaattcctgttccttacacatgatgaggatgtgttcaggcggatagccgaaaatgaaggcgtttcctccctgattcgcatacgttcttgttcggaatctgaattgcccgaatattacgcttgggctgattacggattttgccttcgcgaggattccccggtcaatatggtcgcctgcccgaccaagctgatggaatatgccgcgtgcggagttgtgcccatatctcggccgatctga

SEQ ID NO: 72944 - protein, 294 aa, Unknown
  Obtained from environmental sample
  misc_feature (1)..(294): Xaa is any amino acid
MKMICXYGSPSQIYPHGGCFRRIAHIDSLLXAEERIYCYQYKYAGMPLETVPRIKKIAENVSFFPVCFSNSTHNELFVSLLRKCAFLYAHTVESGPFLYPYYDSGKIITDLHGIPPEEAEMLGHMNKARFFAAYERTLIQKSYRVIGVSRAMFHHYQNKYGLPAERFLYLPIAPNIEPASREKRSRATRVIYSGGTQIWQQVPKMLEAVRQLVPEFEFLFLTHDEDVFRRIAENEGVSSLIRIRSCSESELPEYYAWADYGFCLREDSPVNMVACPTKLMEYAACGVVPISRPI

SEQ ID NO: 72945 - DNA, 537 bp, Unknown
  Obtained from environmental sample
  misc_feature (1)..(537): n is a, c, g, or t
atgcccggcggccgggaacgggaaaacctggtggaactggggcgggtcctccggcctcacggggtgaagggcgccttcctcgtctcggtttacacggaagacccagcggcgcttttggaccgcccggggctggagcttcggtcgcccgacggtcgggaacggcggccggccgagggcttggccggccgggccacggacgggcgcttagtcgtcaaactccccggcttggaggcccgcgaagaggcggcggccctgaaaggctggcgtctggttctgccccgtaatctcctgccccccctgccggacgatgaagtctattgggccgaccttctgggcctcctggtctccaccaaggccggccgggccttgggccgggtcgaggggctcatggaagccggggccggcctgctcctggcggtgattgattcggccggcgtcgaaaggttaattccttttcagcccggcctcttggccgaggtcgatctcgccggcggccgcctggttctcgacccgccgcccggcctcttggatctttga

SEQ ID NO: 72946 - protein, 178 aa, Unknown
  Obtained from environmental sample
  DOMAIN (12)...(96): RimM N-terminal domain
  misc_feature (1)..(178): Xaa is any amino acid
MPGGRERENLVELGRVLRPHGVKGAFLVSVYTEDPAALLDRPGLELRSPDGRERRPAEGLAGRATDGRLVVKLPGLEAREEAAALKGWRLVLPRNLLPPLPDDEVYWADLLGLLVSTKAGRALGRVEGLMEAGAGLLLAVIDSAGVERLIPFQPGLLAEVDLAGGRLVLDPPPGLLDL

SEQ ID NO: 72947 - DNA, 846 bp, Unknown
  Obtained from environmental sample
  misc_feature (1)..(846): n is a, c, g, or t
ttgagggaagtgcgtctggccctcttggaggccgacgtcaattacaaggtggtcaaggattttctagaggccgtggaaacccgggcccggggggccgaagtcctggccagcctcaccgcgccccagcaagtgctgaaaatagtctatgaggaactgcgcgacctcatgggcggttcggccagcgggctggacctgggcggccggccgccggcgccgattctcctggtgggcctccagggctccggcaaaaccaccaccgccgccaagctcgcctggcatctcaagaaaagcggccgtaagccctacctggtcccggccgatgtccggcgtccggcggccattctgcagctgacccgcctgggccaggaggcggaggtgccggttttcccctccacccaggagatgaccccggtggatatcgctgcccgggccctggccgccgccgccagtgaaggctgcgatgtggtcatcatcgataccgccggccggctgaccgttgatgaagaactcatggccgaactcggccgcctcaaggcggccacgactccccgcgaaatactcctggtggccgatgccatgaccggccaggaagcggtgaccatggccgaggccttcaacgaccgcctggacctcagtggggtcattctctcgaagatggaaggcgacgctcgcggcggcgcggccatgagcatccgggccgtggtggaccgccctctgaaattcgtcggcacgggcgaaaaaatcgacgccctggatatctttcatcccaaccgcgtggcttcgtacatcctggggctgggcgacctggagagtctcatcgancaggccccgcgaggccatggatga

SEQ ID NO: 72948 - protein, 281 aa, Unknown
  Obtained from environmental sample
  DOMAIN (1)...(57): SRP54-type protein, helical bundle domain
  misc_feature (1)..(281): Xaa is any amino acid
MREVRLALLEADVNYKVVKDFLEAVETRARGAEVLASLTAPQQVLKIVYEELRDLMGGSASGLDLGGRPPAPILLVGLQGSGKTTTAAKLAWHLKKSGRKPYLVPADVRRPAAILQLTRLGQEAEVPVFPSTQEMTPVDIAARALAAAASEGCDVVIIDTAGRLTVDEELMAELGRLKAATTPREILLVADAMTGQEAVTMAEAFNDRLDLSGVILSKMEGDARGGAAMSIRAVVDRPLKFVGTGEKIDALDIFHPNRVASYILGLGDLESLIXQAPRGHG

SEQ ID NO: 72949 - DNA, 777 bp, Unknown
  Obtained from environmental sample
  misc_feature (1)..(777): n is a, c, g, or t
atggcctcgcggggcctgntcgatgagactctccaggtcgcccagccccaggatgtacgaagccacgcggttgggatgaaagatatccagggcgtcgattttttcgcccgtgccgacgaatttcagagggcggtccaccacggcccggatgctcatggccgcgccgccgcgagcgtcgccttccatcttcgagagaatgaccccactgaggtccaggcggtcgttgaaggcctcggccatggtcaccgcttcctggccggtcatggcatcggccaccaggagtatttcgcggggagtcgtggccgccttgaggcggccgagttcggccatgagttcttcatcaacggtcagccggccggcggtatcgatgatgaccacatcgcagccttcactggcggcggcggccagggcccgggcagcgatatccaccggggtcatctcctgggtggaggggaaaaccggcacctccgcctcctggcccaggcgggtcagctgcagaatggccgccggacgccggacatcggccgggaccaggtagggcttacggccgcttttcttgagatgccaggcgagcttggcggcggtggtggttttgccggagccctggaggcccaccaggagaatcggcgccggcggccggccgcccaggtccagcccgctggccgaaccgcccatgaggtcgcgcagttcctcatagactattttcagcacttgctggggcgcggtgaggctggccaggacttcggccccccgggcccgggtttccacggcctctag

SEQ ID NO: 72950 - protein, 258 aa, Unknown
  Obtained from environmental sample
  misc_feature (1)..(258): Xaa is any amino acid
MASRGLXDETLQVAQPQDVRSHAVGMKDIQGVDFFARADEFQRAVHHGPDAHGRAAASVAFHLRENDPTEVQAVVEGLGHGHRFLAGHGIGHQEYFAGSRGRLEAAEFGHEFFINGQPAGGIDDDHIAAFTGGGGQGPGSDIHRGHLLGGGENRHLRLLAQAGQLQNGRRTPDIGRDQVGLTAAFLEMPGELGGGGGFAGALEAHQENRRRRPAAQVQPAGRTAHEVAQFLIDYFQHLLGRGEAGQDFGPPGPGFHGL

SEQ ID NO: 72951 - DNA, 429 bp, Unknown
  Obtained from environmental sample
  misc_feature (1)..(429): n is a, c, g, or t
gtgccgacgaatttcagagggcggtccaccacggcccggatgctcatggccgcgccgccgcgagcgtcgccttccatcttcgagagaatgaccccactgaggtccaggcggtcgttgaaggcctcggccatggtcaccgcttcctggccggtcatggcatcggccaccaggagtatttcgcggggagtcgtggccgccttgaggcggccgagttcggccatgagttcttcatcaacggtcagccggccggcggtatcgatgatgaccacatcgcagccttcactggcggcggcggccagggcccgggcagcgatatccaccggggtcatctcctgggtggaggggaaaaccggcacctccgcctcctggcccaggcgggtcagctgcagaatggccgccggacgccggacatcggccgggaccaggtag

SEQ ID NO: 72952 - protein, 142 aa, Unknown
  Obtained from environmental sample
  misc_feature (1)..(142): Xaa is any amino acid
MPTNFRGRSTTARMLMAAPPRASPSIFERMTPLRSRRSLKASAMVTASWPVMASATRSISRGVVAALRRPSSAMSSSSTVSRPAVSMMTTSQPSLAAAARARAAISTGVISWVEGKTGTSASWPRRVSCRMAAGRRTSAGTR

SEQ ID NO: 72953 - DNA, 369 bp, Unknown
  Obtained from environmental sample
  misc_feature (1)..(369): n is a, c, g, or t
gtgttttgcggttcgacgggtgaggaacgaatgtgtaaactgccgcttgatttaaccggcagccaggatatgaaaaaaagttttcaaaaatgcgccataagctggggttgttgcgttaccctgcgtgacggcagaatctacacctgctgcatcgcggcgcatattaaattttttaatgagtattttaagcagaatcttgttataagcgacagggattatgttgacatatacaaggttaacagcaaggatgagattatcgaatttcttgaacaacctttccccttctgccgttattgtatgataacagagacaaaattcgcccagcgctgggcggtttccaaaaaagaaattaccgaatggataaattaa

SEQ ID NO: 72954 - protein, 122 aa, Unknown
  Obtained from environmental sample
  misc_feature (1)..(122): Xaa is any amino acid
MFCGSTGEERMCKLPLDLTGSQDMKKSFQKCAISWGCCVTLRDGRIYTCCIAAHIKFFNEYFKQNLVISDRDYVDIYKVNSKDEIIEFLEQPFPFCRYCMITETKFAQRWAVSKKEITEWIN

SEQ ID NO: 72955 - DNA, 669 bp, Unknown
  Obtained from environmental sample
  misc_feature (1)..(669): n is a, c, g, or t
gtgggcgcgggaggcacggtcggcccgggcggcggcggcggagcttccgccagtttttctcaaactagttctgttggtacgacgggtaattttatttctccgcatggaagtggcggcgcgggaggcggcctttcagggggagcggggggatcctcatccagtgttaacggcggcaattcttcaagccttatatcttatccttcaaattccatgagatcaggaggtatttccatttcatcttactcccataatgattttgacttaaattcatatattcctttcctgtcttatccggtcgaaggcacatatacctactcttccagttccaacagcaatgttgtttatattacaagcaataataaatcttctaccataaaaacaaatttcacattctccggtaacagcggatcaggaggaaacgccgcttcctttacatatcttacaggcgatttggcttggcttgatacgagatatgccggcggactcggcgcttctccttcccctcttacgcccatatccattaccggttcttcaacccccactcttacaattggtcactcaaattcataccaacacggttcttatgggggaaacaaccgcgattccactttgggtggaggggccgcacccggcgaggcggggtcaattaccatttataaaatttattaa

SEQ ID NO: 72956 - protein, 222 aa, Unknown
  Obtained from environmental sample
  misc_feature (1)..(222): Xaa is any amino acid
MGAGGTVGPGGGGGASASFSQTSSVGTTGNFISPHGSGGAGGGLSGGAGGSSSSVNGGNSSSLISYPSNSMRSGGISISSYSHNDFDLNSYIPFLSYPVEGTYTYSSSSNSNVVYITSNNKSSTIKTNFTFSGNSGSGGNAASFTYLTGDLAWLDTRYAGGLGASPSPLTPISITGSSTPTLTIGHSNSYQHGSYGGNNRDSTLGGGAAPGEAGSITIYKIY

SEQ ID NO: 72957 - DNA, 639 bp, Unknown
  Obtained from environmental sample
  misc_feature (1)..(639): n is a, c, g, or t
atgggaaaatacagtaatggtattttaggagcgttttcaggcaaagttggtcccgttgtcggttcaagttggagaggcaaagcctatattcgttcctatacaaagaaaattcacaatccacaaacgccgctgcagatgatgcaacgcgcaaaggtaagcattgttgcaaagttcatcagtccggtaagaggtattataaatgttggttggaagcagtacgcacacggcatgacgccgggcaatgcagcaacaaagtacatgctggcaaacgccattatcggcgactatccgaactatgacattgaccctgaaaaggtgcttatttcgtcaggctcgcttgctactgcaaccaatgccacagcaacctttgccgatggtaaagttacatttgcatgggacgacaattccggcgtgagttccgcagcgccaaccgacaaggcgttaattgcagtgattaatcccgaaaagagcgaagccgtatatcttgacagtgcagccgagcgctcaactacaacccttgacataaacctgccgacacactggacgggcgacaccgttatctgctatcttggtttcatttccgagaacaaaaaacagacatcaaacagtatttatcttggtgagattaacgtaagttag

SEQ ID NO: 72958 - protein, 212 aa, Unknown
  Obtained from environmental sample
  misc_feature (1)..(212): Xaa is any amino acid
MGKYSNGILGAFSGKVGPVVGSSWRGKAYIRSYTKKIHNPQTPLQMMQRAKVSIVAKFISPVRGIINVGWKQYAHGMTPGNAATKYMLANAIIGDYPNYDIDPEKVLISSGSLATATNATATFADGKVTFAWDDNSGVSSAAPTDKALIAVINPEKSEAVYLDSAAERSTTTLDINLPTHWTGDTVICYLGFISENKKQTSNSIYLGEINVS

SEQ ID NO: 72959 - DNA, 738 bp, Unknown
  Obtained from environmental sample
  misc_feature (1)..(738): n is a, c, g, or t
atggcccggctcggcgcgcgcaatatcaacggctacaatcaaaaactccaggcatacgggcaggagcgcccggcggatattcaagacctggaacctcttgcctatcttgtcatcattattgatgaacttgccgacttgatgcttaccgcggcgcgtgaggtggaaaccagcatcgtgcgcctggcccagcttgccagggcggcgggcatccatatgatcctcgcgacccagcggccgagcgtggatgtcgtcaccggcatcatcaaggcgaatcttccctgccgcatttccttccaggttacctccaaacacgattcgcgcaccattcttgactgcgtgggcgcggaacatctgctcggcaagggggacatgctgttcaagcccggcggcggcaagcttcagcgcctgcatgcgccttttgtcagcgatgaggaagtcatggccgtggtcaaacactggaaaagctgcctgccgccggcctacaaggtggatttcagcgagtggggcggcaaggccgcggataatgcccgcaacggcagcgtctccgatgcttccggcgaccccctgtatgccgaagtgcaagcttttgtgaaagaccagggcagggtctccatttccctgttgcagcgccgtttcggcattggcttcaaccgtgcggcccgcatgatggaacaactggaacgcgacggcgtcatcactcccggcgatggcggcaagccgcgccaaaccatcaaatag

SEQ ID NO: 72960 - protein, 245 aa, Unknown
  Obtained from environmental sample
  misc_feature (1)..(245): Xaa is any amino acid
MARLGARNINGYNQKLQAYGQERPADIQDLEPLAYLVIIIDELADLMLTAAREVETSIVRLAQLARAAGIHMILATQRPSVDVVTGIIKANLPCRISFQVTSKHDSRTILDCVGAEHLLGKGDMLFKPGGGKLQRLHAPFVSDEEVMAVVKHWKSCLPPAYKVDFSEWGGKAADNARNGSVSDASGDPLYAEVQAFVKDQGRVSISLLQRRFGIGFNRAARMMEQLERDGVITPGDGGKPRQTIK

SEQ ID NO: 72961 - DNA, 540 bp, Unknown
  Obtained from environmental sample
  misc_feature (1)..(540): n is a, c, g, or t
gtgataaatagtgattatgcactgaaacttttaagccgttctacacgaaatgatatttatattactcctatggtaggaaataaagtatacagaaaacagtttttacttgaaaacaaaatgtcatttttgcacaataattgctacgaagatgatgtgtttacgtttatttcatttgtcattaaccctaaagttgttttagtctcaggaacacaacaacattacagacaacgtgaaaattcaataacgcatagtttttccaaaaaaacgatagacgacctcatagaggcatttttatatctcaagaattttctcattgataacaagatatttgatgaatataaatctgaatacgaatcattttttgagcgatgtatttccactacatacaaaatacttatcacaacgggagtttcaacacaagaaaagaagcaatatttgctctacttactggagcgagtgatttcaaagttcactcttaaggcaattgtaaattatttggatttgaatcgagttcataaatttttaggaatcgactattaa

SEQ ID NO: 72962 - protein, 179 aa, Unknown
  Obtained from environmental sample
  misc_feature (1)..(179): Xaa is any amino acid
MINSDYALKLLSRSTRNDIYITPMVGNKVYRKQFLLENKMSFLHNNCYEDDVFTFISFVINPKVVLVSGTQQHYRQRENSITHSFSKKTIDDLIEAFLYLKNFLIDNKIFDEYKSEYESFFERCISTTYKILITTGVSTQEKKQYLLYLLERVISKFTLKAIVNYLDLNRVHKFLGIDY

SEQ ID NO: 72963 - DNA, 693 bp, Unknown
  Obtained from environmental sample
  misc_feature (1)..(693): n is a, c, g, or t
gtgaattttacctcggccgccggcggcgatgcgaagttcaccttgccggctgcggcgcagggcggcgggtatacaatacgtttcgattacaacggcgacagttacggcggcgcgtttcgcgtcgcggaatacgtgaagccgcattttgacgtgaacctgacgatggacaagccggactatgcgaccggcgagacgcccacaggcaggatcgagttgcgctatcccaacggcaaagccgtgaagaacggcaaggtgtccgtcacgctgagcgcgcagaaaacaacgattgtcggcggcgaactgcgctactcgggactgtttcccgtgcagatcgagcaacaggaactgcaaaccgacgacaacggcaatgctgcgcttgtcctgcctgccgcaaaagaccccagccggtataaactcacgctgctcgcccaggacggcgcggcgtaccgtgtgcgcgtcacccgcgaagtgctgattgcgcgcggcgccatgccatatacgctgaccgcgccgcgttcgttttcgcagctgcaggaacccatgacctttacgctggccgcgcttgccgacgcgacgagcataccaggcgctgcaacaaaggagcacacgcctgcgaaatgggaatgggtgcgtcttgaatcgcagacangggcggcggcgagctgcctgcctccgacacggccggcggcgtga

SEQ ID NO: 72964 - protein, 230 aa, Unknown
  Obtained from environmental sample
  misc_feature (1)..(230): Xaa is any amino acid
MNFTSAAGGDAKFTLPAAAQGGGYTIRFDYNGDSYGGAFRVAEYVKPHFDVNLTMDKPDYATGETPTGRIELRYPNGKAVKNGKVSVTLSAQKTTIVGGELRYSGLFPVQIEQQELQTDDNGNAALVLPAAKDPSRYKLTLLAQDGAAYRVRVTREVLIARGAMPYTLTAPRSFSQLQEPMTFTLAALADATSIPGAATKEHTPAKWEWVRLESQTXAAASCLPPTRPAA

SEQ ID NO: 72965 - DNA, 825 bp, Unknown
  Obtained from environmental sample
  misc_feature (1)..(825): n is a, c, g, or t
gtggcgcgcgccgtggacatggccggcgtggaaatggacatagacgacttccctccgttcagaggggattttgccgagctgtcgcacatgtgccacaggctgcgcgagcgcggattccgaatcgaggcgatcacggaaaatccacgctttcttgatatgaaagaagggccgttttcgcccgccggaatgttttctgcgtctttgaattcggcggcctcggcattttcggttaacttcgtggagccgcgacctgggcggctttcgtcgggtttcatcgaccgcgctgcgaaaagagccttcctgtccgaccgtgagctgtccggcatttcggcgcagaccgacccggcctctgtggttcaggcggcgcgcgttccatcggagtggcgcgaccgcctggccggcgggcagttggtcgtccacgaggactacggcgtggcggcgtttcgcgggatcgaggagattatgacctcgcatggcgcgggcggggagacgctggacgccatcgtcctcgagttcgcggagaacaaacggctgctgattccagtattgcagtttcacaaactgacgcctctggccgagcacgagggcgacgaaacgccgctcgattccctgtcgggaacgcgctggaaaaaatcgatggagaaggatcgggagcgggcgagagcggaggcccgtgccctgatggagctctttgcccagcgcgagctggagcgccgtgagcccttcgcgaacgataacgatctttgccgcgacttcgccgcggcctttccgtacgccgagacggtcgatcagctcagggcgtggcggagatcatggacgatctga

SEQ ID NO: 72966 - protein, 274 aa, Unknown
  Obtained from environmental sample
  DOMAIN (131)...(232): CarD-like/TRCF domain
  misc_feature (1)..(274): Xaa is any amino acid
MARAVDMAGVEMDIDDFPPFRGDFAELSHMCHRLRERGFRIEAITENPRFLDMKEGPFSPAGMFSASLNSAASAFSVNFVEPRPGRLSSGFIDRAAKRAFLSDRELSGISAQTDPASVVQAARVPSEWRDRLAGGQLVVHEDYGVAAFRGIEEIMTSHGAGGETLDAIVLEFAENKRLLIPVLQFHKLTPLAEHEGDETPLDSLSGTRWKKSMEKDRERARAEARALMELFAQRELERREPFANDNDLCRDFAAAFPYAETVDQLRAWRRSWTI

SEQ ID NO: 72967 - DNA, 477 bp, Unknown
  Obtained from environmental sample
  misc_feature (1)..(477): n is a, c, g, or t
atgctggaacaggagatatccaagctgagggggcgggccacggcgcagacggagctgtccttcaccaagggcggctcgattccgaccgtctatatccctcaggacagcgtgcgcgtgaccctttaccgccgccttctaagggccactgacatggccgagattatcgcccttcgcggggaaatggaggaccgcttcggtccaatgccggagcccacgcgctacctggccgacttgacggcgatacgcaactgcggctccgccgccgggcttcgcagcgtgtcggtcacgcagggggaaactaaagtcaagggcggcgtgcagggtctgttcgcgtttttgaagggcaagcggggctggacaattatgggcgagagcgccctggggcctggcgggcccgcgggcgtcaaaattctgaccgaggctatggaaggcgttttgcgagaggagaaggaagaccatctaaacccaacagtttaa

SEQ ID NO: 72968 - protein, 158 aa, Unknown
  Obtained from environmental sample
  DOMAIN (27)...(137): TRCF domain
  misc_feature (1)..(158): Xaa is any amino acid
MLEQEISKLRGRATAQTELSFTKGGSIPTVYIPQDSVRVTLYRRLLRATDMAEIIALRGEMEDRFGPMPEPTRYLADLTAIRNCGSAAGLRSVSVTQGETKVKGGVQGLFAFLKGKRGWTIMGESALGPGGPAGVKILTEAMEGVLREEKEDHLNPTV

SEQ ID NO: 72969 - DNA, 948 bp, Unknown
  Obtained from environmental sample
  misc_feature (1)..(948): n is a, c, g, or t
ttgtctgataaaagcgttgacttatggcgaacgataaaagtatggatcgactacgtcacaactcatgggctagaagacatcaagtttgtcatagtgaccacagcgtctgtaccagaaaattcggcagcatcgtacctacgtattggcaacaaaaaaaacactatccgtgcttttgatttattaaaacaagcatcggagcaatctaagaataagacaaacgcagattattatacttcttttagcgaaatgccgactgaaacaatgcataaacttcttgaccgcgctacagttgtggataacaacaaagatatcttagatgtagttgagcatattaggcaacagattcgctattcaacaaaaccggaatttgaagataaagttcttgaacacattgagggttggtggtttgaaaaaacaatagaagccttatcttctgttgacccagtgtttatttcacagagggatgtacgctcaaagatatgtgatattgcggccaactatttatctaataatttaccgatagacatcgacttttcagaaaacgttgatattaagagtttccctcgaaacgagcagatattttgtgaacagctacgcttggttgctgtcaaagagatgagattaggaatagcaattcacgattactatcgggcatttacgcaaaggaacaaatggatacaagatgaattgctttacattgatgaattagagaagtatgaatatcggctgattgatgagtggaaacacctatttgcccaaatgggtgatgatctaaacgccaatagtgacgaggggaaaaaacaagaggcgggtcgtaatttgtataatcaaattgagcaccataaagacattaggattagacctttatgttcagacgcattcgtaatgcgtggcagttaccatatatggcaaacaatctccgagttggtggcacctcggccgatctga

SEQ ID NO: 72970 - protein, 315 aa, Unknown
  Obtained from environmental sample
  misc_feature (1)..(315): Xaa is any amino acid
MSDKSVDLWRTIKVWIDYVTTHGLEDIKFVIVTTASVPENSAASYLRIGNKKNTIRAFDLLKQASEQSKNKTNADYYTSFSEMPTETMHKLLDRATVVDNNKDILDVVEHIRQQIRYSTKPEFEDKVLEHIEGWWFEKTIEALSSVDPVFISQRDVRSKICDIAANYLSNNLPIDIDFSENVDIKSFPRNEQIFCEQLRLVAVKEMRLGIAIHDYYRAFTQRNKWIQDELLYIDELEKYEYRLIDEWKHLFAQMGDDLNANSDEGKKQEAGRNLYNQIEHHKDIRIRPLCSDAFVMRGSYHIWQTISELVAPRPI

SEQ ID NO: 72971 - DNA, 519 bp, Unknown
  Obtained from environmental sample
  misc_feature (1)..(519): n is a, c, g, or t
atggccgggccttgggcgtcgatccggcgcggctacgaccggacgtctttaatcctggggaattcaatttcaatgtcccaagataatcctttctctgacggtttttttgaggtattccggccccaaccgctcataaatatccctgaatgggcggagttaaagcgtgttctaccggccagcgggtcgtcgggggcggggccttggcgtaatgcgcggacgccgtaccttgttgaggtgatggaggagttatcgccgcaaagcaaatcaaaggaaatcgtatttttgaaagggagtcaaatcggcgctaccgagagcgccgtanacttcttgctctaccaaatggatttaaagcccggtagttttttatatgttatgcctacggaaacggacgccataaaactaagcaagcaacgacttacaccctccatagacgccattgatagcctccgatctaaatgcagaaacgaacgggtaactcccttttggaaaaagtatactacggcggttatacagtattga

SEQ ID NO: 72972 - protein, 172 aa, Unknown
  Obtained from environmental sample
  misc_feature (1)..(172): Xaa is any amino acid
MAGPWASIRRGYDRTSLILGNSISMSQDNPFSDGFFEVFRPQPLINIPEWAELKRVLPASGSSGAGPWRNARTPYLVEVMEELSPQSKSKEIVFLKGSQIGATESAVXFLLYQMDLKPGSFLYVMPTETDAIKLSKQRLTPSIDAIDSLRSKCRNERVTPFWKKYTTAVIQY

SEQ ID NO: 72973 - DNA, 417 bp, Unknown
  Obtained from environmental sample
  misc_feature (1)..(417): n is a, c, g, or t
atgctggcagtcgcgcagtcttccccgggggctatcggagtgaatcttgcggcttacgtgggttttacctacaccggcccgctgggcggatatgccgcggcccttggcctgattgccccctctatcgttattattatcattgtcgcccggatgcttgaggcttttaaggaaaacaaaatagtgaaaaccctttttacctcgtttcggcctgccgctgccgggcttctttccgccgcgggttttggcgcaatcacgctttctgtgtggaatgccgccgcgcctgagtggtatcagtttatccgctggaaagaaacgctgcttctgggtgttatttttttgctgttatacaaattcaagaaacaccccattttgtacattgccggcgcgggggtaatcggggtgctcctgaaattgtag

SEQ ID NO: 72974 - protein, 138 aa, Unknown
  Obtained from environmental sample
  DOMAIN (1)...(137): Chromate transporter
  misc_feature (1)..(138): Xaa is any amino acid
MLAVAQSSPGAIGVNLAAYVGFTYTGPLGGYAAALGLIAPSIVIIIIVARMLEAFKENKIVKTLFTSFRPAAAGLLSAAGFGAITLSVWNAAAPEWYQFIRWKETLLLGVIFLLLYKFKKHPILYIAGAGVIGVLLKL

SEQ ID NO: 72975 - DNA, 642 bp, Unknown
  Obtained from environmental sample
  misc_feature (1)..(642): n is a, c, g, or t
ttgaggatagcacgcttacctggccgggctgggatatcacgcgggctaccggcgagggaacgattcatcttgtgcgtgcgcaataaaaatcaggagaacatcgtgtatttcaaaaaacttgtcggcaagaaatgctatctgtcacccatagacgcgaatgacgcggaaaaatttaccgaatggctgaacgatctggatttgatcataaatctggggccggtctatcaccagatgataaacgccgacaacgaaagaaaactcctgagcgaattggcaaaagagcataattattcgatagtggatctgcaaaccaatgcactcattggcaactgcggctttcacgaaatagatcatctgaaccagaccggcgaagtcgggatattcatcgggaacaagagcttatggggcaaaggatacggaacggaggctatgcggttattgctggattacggattcaaggcgctcaatttaaacaatattttggtacgggtttttccgttcaatgagagggcgctcaggtgttatcaaaggctggggttcacgatcatcggaagacggcgcgatgccctcgtccgcgatctgaaaaaacatgatgttgtgcttatggatatattggctgatgagtggaatctgcccgaatag

SEQ ID NO: 72976 - protein, 213 aa, Unknown
  Obtained from environmental sample
  DOMAIN (99)...(181): Acetyltransferase (GNAT) family
  misc_feature (1)..(213): Xaa is any amino acid
MRIARLPGRAGISRGLPARERFILCVRNKNQENIVYFKKLVGKKCYLSPIDANDAEKFTEWLNDLDLIINLGPVYHQMINADNERKLLSELAKEHNYSIVDLQTNALIGNCGFHEIDHLNQTGEVGIFIGNKSLWGKGYGTEAMRLLLDYGFKALNLNNILVRVFPFNERALRCYQRLGFTIIGRRRDALVRDLKKHDVVLMDILADEWNLPE

SEQ ID NO: 72977 - DNA, 561 bp, Unknown
  Obtained from environmental sample
  misc_feature (1)..(561): n is a, c, g, or t
atgattatatcaacaaacaaagagccaggttttgacgaatttaaggaactcattgataccgttacgtcaaggctaaacgaggacgcggcgaaacgcgcttcttattatctggagcgcaaggcgcagcttttggaagatgatgttctggcgtttcttaaagaggcggcgaagggtacaaaattcgcgggaacaattgaaaaaatatccggccagcgttttccggacattgtcgcgggaaaatattacggcgttgaggtaaaaagttccagagacgaaaattggacaacattaggcggcagcgtgaatgagtcaacccgagttgaaaatgttgagcgtatttttttaacgcttggcagactggtagaacccatagaatttcgcagccgcccatacgaagagtgtctctctgatgtggttgtgacccattatccccgttataaaattaatatgaatttgaaatccggcgaaacgatatttgacaaaatgggaacaacgtacgatgaattacggctatccgataatcctattggcaggattgttgattatacaaaagccagctaa

SEQ ID NO: 72978 - protein, 186 aa, Unknown
  Obtained from environmental sample
  misc_feature (1)..(186): Xaa is any amino acid
MIISTNKEPGFDEFKELIDTVTSRLNEDAAKRASYYLERKAQLLEDDVLAFLKEAAKGTKFAGTIEKISGQRFPDIVAGKYYGVEVKSSRDENWTTLGGSVNESTRVENVERIFLTLGRLVEPIEFRSRPYEECLSDVVVTHYPRYKINMNLKSGETIFDKMGTTYDELRLSDNPIGRIVDYTKAS

SEQ ID NO: 72979 - DNA, 360 bp, Unknown
  Obtained from environmental sample
  misc_feature (1)..(360): n is a, c, g, or t
ttggtaaacattgccaggggcaaaccagaagtagatttaaacgatattggcccgacaatacgttctgagcatcatggtaatatcgagtttagaagattatcaatagaaaatggcggaaaaaatacggaagagcttcaaaaaggtttagtcgaaagacgtttaacaatacgggaatgcgcgcggatacagacttttcccgatgattacgagtttgttattccggtagatggtgatacaaaaagcgtgtcagcctcagacgcttataagataatcggtaacgctgttcccccattattggggtatcatatagccaaacggcttgagaaaaactggaaactctactttggaggcggccactaa

SEQ ID NO: 72980 - protein, 119 aa, Unknown
  Obtained from environmental sample
  misc_feature (1)..(119): Xaa is any amino acid
MVNIARGKPEVDLNDIGPTIRSEHHGNIEFRRLSIENGGKNTEELQKGLVERRLTIRECARIQTFPDDYEFVIPVDGDTKSVSASDAYKIIGNAVPPLLGYHIAKRLEKNWKLYFGGGH

SEQ ID NO: 72981 - DNA, 660 bp, Unknown
  Obtained from environmental sample
  misc_feature (1)..(660): n is a, c, g, or t
ttgatggccgagagagctcccggtcgtggcttcggaaaactggccgctttttgcgacgtgttctgcgaaacaggagtgttcagcgtggagcagagccgcgccatccttgaagcggccaaaaagctgggatttcgtctgaagatccatgccgacgaagtgaacgactttggcggagcggctttggcggctgaagtaaaggcgacttccgccgagcatctcctggccgccggagatgcgcagctcgcccgcatggcggaaagcggcgccatagcgacccttctcccggccacggcgtatagcttgcgcaaaccctacgcccgggccaggcggatgctggaactgggccttcccgttgccttggccacagactgcaaccccggctcctgtttctgcgagagcatgccctttgtgatgggccttgccgtactcggcatggggcttacgccggaagaagctctggtggggtgtacactcaacgcggcatacgccctgggtatggagaaacaggcgggcagccttgaaaaaggcaaaaatgccgactttctgcttctggacggacaatcccccgctgccgtgccctaccacgccggcgggagaagtgtcgcgcgcgtttacaaacgagggacgcttgcggcgaaaaacggcatactctgctgctga

SEQ ID NO: 72982 - protein, 219 aa, Unknown
  Obtained from environmental sample
  misc_feature (1)..(219): Xaa is any amino acid
MMAERAPGRGFGKLAAFCDVFCETGVFSVEQSRAILEAAKKLGFRLKIHADEVNDFGGAALAAEVKATSAEHLLAAGDAQLARMAESGAIATLLPATAYSLRKPYARARRMLELGLPVALATDCNPGSCFCESMPFVMGLAVLGMGLTPEEALVGCTLNAAYALGMEKQAGSLEKGKNADFLLLDGQSPAAVPYHAGGRSVARVYKRGTLAAKNGILCC

SEQ ID NO: 72983 - DNA, 576 bp, Unknown
  Obtained from environmental sample
  misc_feature (1)..(576): n is a, c, g, or t
atggtaaacaacgatatcgttaatgggtttgatgacgaaaaggatgaaagccttaagatcaaacttcaaaaagtaagcgaagtagaaggggggcttgtcctctatcttaccggatatatcgatacctataattccaattattttcaaaaacgagttcaaaaggccatcgaagccgggtacatcaggctggttttccagtgcgggggactaaattacgtatcttccaccggaatcgggtcgtttacagcttttctaaaagcggtaaagccccgaggcggggatctggttcttctggaaattcagccaaaagtctatgaggttttccagttgctcggtttctcccagttctttaatataaaggacagtttggaggattcaatcaattttttcagaaaaggcactacgacggaggctgtatcccttttcccaaaagtgttttcctgcccaatttgctccaaaagacttaaggcgctaaaaccgggccggtttcgttgttccgagtgtaaaaccatacttgccattgacagtgcaggtcaggtttttctggctaaatccggtctccgtcgtccgatctga

SEQ ID NO: 72984 - protein, 191 aa, Unknown
  Obtained from environmental sample
  DOMAIN (19)...(126): STAS domain
  misc_feature (1)..(191): Xaa is any amino acid
MVNNDIVNGFDDEKDESLKIKLQKVSEVEGGLVLYLTGYIDTYNSNYFQKRVQKAIEAGYIRLVFQCGGLNYVSSTGIGSFTAFLKAVKPRGGDLVLLEIQPKVYEVFQLLGFSQFFNIKDSLEDSINFFRKGTTTEAVSLFPKVFSCPICSKRLKALKPGRFRCSECKTILAIDSAGQVFLAKSGLRRPI

SEQ ID NO: 72985 - DNA, 402 bp, Unknown
  Obtained from environmental sample
  misc_feature (1)..(402): n is a, c, g, or t
ttgctgcgactgccggctaaaaccgtggccctctgggatgcgttgactggcggcgagcgcggcctagacacccccgtttcggtggtgggcgcctcggtgatcggcgggcaagccgccgaagccggtaacatgcccatgttcttgctgctactagcatcactgaacttctttttaggcgccttcaacttggtgccattattgccacttgatggcgggcatatggcgatcgcagcgtacgagaagatccgcaactggatccgccagctagccggcaaacccgctggcgccccggtcgattaccttaagctaatgccattaacgtacgcggtggtggtagttggcggggcgtttatgctgctgaccttagcggccgacattatcaacccgatccaaatattctag

SEQ ID NO: 72986 - protein, 133 aa, Unknown
  Obtained from environmental sample
  misc_feature (1)..(133): Xaa is any amino acid
MLRLPAKTVALWDALTGGERGLDTPVSVVGASVIGGQAAEAGNMPMFLLLLASLNFFLGAFNLVPLLPLDGGHMAIAAYEKIRNWIRQLAGKPAGAPVDYLKLMPLTYAVVVVGGAFMLLTLAADIINPIQIF

SEQ ID NO: 72987 - DNA, 897 bp, Unknown
  Obtained from environmental sample
  misc_feature (1)..(897): n is a, c, g, or t
atggcccgaaaggagagatgccgcagttggtcctggcacatccctgtgccgctaacgagtttggatgtagcttatgactggaataatatgctcaatgaatataccagcaggaaccctggcaacgagcaacaacgcagtgccgtagccacattattttaccattttggcttggcaaggggtgcaaccagtagttttagagtgttgatcgaaaactttggatatgacaaaggtcaacaacgcctcctccatgaatattatagtgatgccgaatgggaggcaataatacggcggcagttggatttagggcttccagtactctatgctgcaagtcgttacgatgaaaataataataaaagtagtggtcatagctttattgtggatggttacgataatactggcaaatttcatatgaattttgggtggagcggttcgtatgacgggtggtattatcttaataatatagacctcggcggcggaaaacgttacaatttcctgcctccagctatggaaatcaatatcagacctgatatcggtagcattggtagcaacgaaatggcgttagatagctttaccacaagcaaagcaacggcatcacaaaacgagctgtttaccgttactgccaaagtaaggagcttcggcattttccctggcggtcaggcaggggttgcattggtggacaacaacggcaatattgcggcaatagtcggaattataaatagctacaatgccattagccttgcaggcacacgtatttcaacaataaattgctccgcgccaactaccgtaagcgcagggcaatacaacctgagatatgtaaccaaaatgaacggagagacaacatggaaaatcgttaataggtctttgccagatgtccccaaagccatcctttcaccntga

SEQ ID NO: 72988 - protein, 298 aa, Unknown
  Obtained from environmental sample
  misc_feature (1)..(298): Xaa is any amino acid
MARKERCRSWSWHIPVPLTSLDVAYDWNNMLNEYTSRNPGNEQQRSAVATLFYHFGLARGATSSFRVLIENFGYDKGQQRLLHEYYSDAEWEAIIRRQLDLGLPVLYAASRYDENNNKSSGHSFIVDGYDNTGKFHMNFGWSGSYDGWYYLNNIDLGGGKRYNFLPPAMEINIRPDIGSIGSNEMALDSFTTSKATASQNELFTVTAKVRSFGIFPGGQAGVALVDNNGNIAAIVGIINSYNAISLAGTRISTINCSAPTTVSAGQYNLRYVTKMNGETTWKIVNRSLPDVPKAILSP

SEQ ID NO: 72989 - DNA, 732 bp, Unknown
  Obtained from environmental sample
  misc_feature (1)..(732): n is a, c, g, or t
gtgggcggcggcaattacagcctgcagaaaaccagtcctgccatagatgcaggcgacaaaaatcatatcggcgcggaatttaacgttgatgtggctggcaatagccgtatttttaacaacctcgtggatatgggcgcatacgaatacaaccagtccgtgctcgtttccgtaaccggcatatcgttgaacaaaaaaacgctttcgcttgcaggaaaaggcgtcagcgaaaagttaactgctaccgttgcgcctgtgaacgcggacaataaaagcgtaatatggacgagcagcaaccttgcggtggctaccgtagccggtgacggaacggtaacgacaatatctccaggcacggcaaccataaccgctactgcctgtgcaggaggctttactgacgtctgcactgtaacagtcgagccggtagcggcaacgggcataagtttagacgatagcgcccttacattcaatgttggcggctacaaaaaactgacggcaaccgttgcgcctgcaaataatacctacccgacaacatggatgagcagcaaccctgccatcgcttcagtggcttccgatggcacggtaaaagcgctgtcattgggcgaagcaaccattaccgcaaccaatggcgacaaaactgccgactgcgcaataacagtagagccaacggcggtaaccggaataagactgtatttttcatatattatatcaagtaatggtcaacttgttccacaataa

SEQ ID NO: 72990 - protein, 243 aa, Unknown
  Obtained from environmental sample
  DOMAIN (141)...(218): Bacterial Ig-like domain (group 2)
  misc_feature (1)..(243): Xaa is any amino acid
MGGGNYSLQKTSPAIDAGDKNHIGAEFNVDVAGNSRIFNNLVDMGAYEYNQSVLVSVTGISLNKKTLSLAGKGVSEKLTATVAPVNADNKSVIWTSSNLAVATVAGDGTVTTISPGTATITATACAGGFTDVCTVTVEPVAATGISLDDSALTFNVGGYKKLTATVAPANNTYPTTWMSSNPAIASVASDGTVKALSLGEATITATNGDKTADCAITVEPTAVTGIRLYFSYIISSNGQLVPQ

SEQ ID NO: 72991 - DNA, 606 bp, Unknown
  Obtained from environmental sample
  misc_feature (1)..(606): n is a, c, g, or t
atgtttcaacttatttttatttcaaaatttatgcgtctggctgctggcagaattgggcaattgttaaattataatagcattgccacagaacttggcattgatttgaaaactgtaaaatcttggttttccatattggaaactagttttatagtattctttttgcaaccgcatttcaataatttttccaaaaggcttgttaaaactccaaagctatatttttacgataccgggcttgccagcagcctgctgggcataaaaaaagagaatgatttaaattcgcactgggcaaaaggcgcactttttgaaaatatgattatagcagacttatgcaaaaattatctgaacaaagccattcagccgccattgtatttttggagagacaataccggaaatgaaattgattgcattatagacaatggctccaatataaaaagcattgaaataaaatcatcttccacaatttccactgatttcttcaaaggtttgaatttttataaaaacctaaacaaaacaagcgagcaatatttagtttatggcggaaaagctaattctagcagaaatagcattgaaatagttagttggaaaaatattctgtctgttctttag

SEQ ID NO: 72992 - protein, 201 aa, Unknown
  Obtained from environmental sample
  misc_feature (1)..(201): Xaa is any amino acid
MFQLIFISKFMRLAAGRIGQLLNYNSIATELGIDLKTVKSWFSILETSFIVFFLQPHFNNFSKRLVKTPKLYFYDTGLASSLLGIKKENDLNSHWAKGALFENMIIADLCKNYLNKAIQPPLYFWRDNTGNEIDCIIDNGSNIKSIEIKSSSTISTDFFKGLNFYKNLNKTSEQYLVYGGKANSSRNSIEIVSWKNILSVL

SEQ ID NO: 72993 - DNA, 666 bp, Unknown
  Obtained from environmental sample
  misc_feature (1)..(666): n is a, c, g, or t
gtggttgatataaacctgaccatggctgaggaaacggctcatcggcttgaggcaaaggggattaccgccatgcaatttaaggctgatgtaacaagtcctgatgaaacagcccggatggtgaagacaatcatcgacaaatggggagaacttaccattggggtaaacaatgctggaatgggcgcatggcgggactcgctgacgcaggaattcagtgaatggagaaaaattcttgctctgaatctggatgctgtttttttatgcgcccagagtgaagccagggaaatgatgaaaaaaggatatggaaaaataattaacaccgcttcaatgtccggccatatttccaacactcctcaaaaccagagcgcttataacacttccaaagccggcgtactgcaccttacccgcagccttgctgcggaatgggcgccgaaaaacatcatggttaacagtattagtcctggttataccaagaccgaactggtagataaacttctggaaagcccggaagggaaaaccatactccctaaatggctcgaaaagatacccatgggaagaatggcaaaaacagaggatttacagggcgctgtggtatatcttgcttctccggcatcagactacatgaccggagcggatctgagtattgacggcggatattgctgctggtaa

SEQ ID NO: 72994 - protein, 221 aa, Unknown
  Obtained from environmental sample
  DOMAIN (1)...(142): short chain dehydrogenase
  misc_feature (1)..(221): Xaa is any amino acid
MVDINLTMAEETAHRLEAKGITAMQFKADVTSPDETARMVKTIIDKWGELTIGVNNAGMGAWRDSLTQEFSEWRKILALNLDAVFLCAQSEAREMMKKGYGKIINTASMSGHISNTPQNQSAYNTSKAGVLHLTRSLAAEWAPKNIMVNSISPGYTKTELVDKLLESPEGKTILPKWLEKIPMGRMAKTEDLQGAVVYLASPASDYMTGADLSIDGGYCCW

SEQ ID NO: 72995 - DNA, 873 bp, Unknown
  Obtained from environmental sample
  misc_feature (1)..(873): n is a, c, g, or t
ttggtcagaatcggccgagttatgaccagaaataatgaaaattctaggtggtggccaattctatatattggaaaacacgctgataaagacatacctggaagttatatctggcgattgcgtcctgaattggcggacgctttgaaagaaatagacttatctgatattccgctttatagcaagtcaataaatgattcaaccgggcaaataaattactggtggctcaacgccaatcccaaaatatggagtttttctgatttacaaatcggtcaagaacagagctacacactgctcaatgaaagtgggaataaacggcgaatatatgagaactttctggctgccaaggccggtgatcttgttattggatatgaatctactcctgttaagcaaatcgtcgctttatgtaaaatttccagagaaaatgatggtaagtctctatattttgaaaaaaatgaaggattgtctacaccaatcgaatacagtgccatcaaagacatctatgaatttcaaaaaacggaattttatgttaatcctaacggtagtcttttcaaattgacaaaggaacaatatgagctattgcttgatattatccgggagcaaaatccatgtatttctgttggggataatcaattcgatgattatacaaagcaaaactttctttccgaggtttttttatcagagggagaatatgattctttagtcgcgcttttagaacataagaaaaatattatattacaaggcgctcccggagttggcaagacgtttatggcanagcgtttggcatattccttacttggtaaagaagatgataatagggtaaaaatggtacaatttcaccgaaaatactcatacgaagattttatcatgggttcataa

SEQ ID NO: 72996 - protein, 290 aa, Unknown
  Obtained from environmental sample
  DOMAIN (69)...(197): Family of unknown function (DUF589)
  misc_feature (1)..(290): Xaa is any amino acid
MVRIGRVMTRNNENSRWWPILYIGKHADKDIPGSYIWRLRPELADALKEIDLSDIPLYSKSINDSTGQINYWWLNANPKIWSFSDLQIGQEQSYTLLNESGNKRRIYENFLAAKAGDLVIGYESTPVKQIVALCKISRENDGKSLYFEKNEGLSTPIEYSAIKDIYEFQKTEFYVNPNGSLFKLTKEQYELLLDIIREQNPCISVGDNQFDDYTKQNFLSEVFLSEGEYDSLVALLEHKKNIILQGAPGVGKTFMAXRLAYSLLGKEDDNRVKMVQFHRKYSYEDFIMGS

SEQ ID NO: 72997 - DNA, 468 bp, Unknown
  Obtained from environmental sample
  misc_feature (1)..(468): n is a, c, g, or t
ttggtttggcaggattttttcaccacctattccatgtgcgacgagaatgcccgcatgtatgatgtgttgcggcaggaagccgaataccaggttctgcgtctgcgggatcatccctgtatttggctttggtgcggcggtaatgaaagcctgatgagcgccagttttgattatcccggggaagaaatgacgggtattgaaatattcaacgagatatttcgttcggtctgctctgccctggatccggaacgttactatcaccgttcttctccgggcggcggttcgtatcccaacgatccgcttgaaggggatactcacggttatattcatatatggtatgttccgggaaattactatccggtttttttgagcgagaacaaccgggtttccacaccggcgaaacgcaccctgcggcggatgatgaaagaggaggatctctggccggaagggtatgacgggcttcacgcataa

SEQ ID NO: 72998 - protein, 155 aa, Unknown
  Obtained from environmental sample
  misc_feature (1)..(155): Xaa is any amino acid
MVWQDFFTTYSMCDENARMYDVLRQEAEYQVLRLRDHPCIWLWCGGNESLMSASFDYPGEEMTGIEIFNEIFRSVCSALDPERYYHRSSPGGGSYPNDPLEGDTHGYIHIWYVPGNYYPVFLSENNRVSTPAKRTLRRMMKEEDLWPEGYDGLHA

SEQ ID NO: 72999 - DNA, 735 bp, Unknown
  Obtained from environmental sample
  misc_feature (1)..(735): n is a, c, g, or t
atggatattcttgccaacccggacaagatcgtcccggaaaaatttgtatttgataattatgtacaggcgtggaggctggccaatttcaagctgtacacctttaacagcgtttttatgtctttctttattgtgttaggcagcatcataacttgtactgtagcaggttatgtttttgaccgcggacggttccggggcaaggaaattatttttgccatggtgctttcttccatgtttgtttccctggggagtcttaccctgtatcccaccctgatgattgccaaattcttcggtattaaccgctccctctggggagtgataatcatcagggtgttcggtcttgatgtagcgagcctctttatcgccagaggctatgttaataccattccccgcgaaattgacgaagccgcccgcattgacgggtgtaactttcccggtatttttgcgaagattatttttcccctgttgaaaccacttgtcgcgacaatcggaattctacagttccgctcggcctggaacgattacatgatgcccatgattttcaccatgactaacaggagccgtatgccgctggtggtcggagtggtcaacctgaaggccaacggcggcgagacggcggccaattgggcactgatgctcgccggtacctccatctccattgtccccatgataattattttccttgtttttaaccggtattttattgaaaatttaaccgccggcgcggttaaaggataa

SEQ ID NO: 73000 - protein, 244 aa, Unknown
  Obtained from environmental sample
  DOMAIN (33)...(239): Binding-protein-dependent transport system inner membrane component
  misc_feature (1)..(244): Xaa is any amino acid
MDILANPDKIVPEKFVFDNYVQAWRLANFKLYTFNSVFMSFFIVLGSIITCTVAGYVFDRGRFRGKEIIFAMVLSSMFVSLGSLTLYPTLMIAKFFGINRSLWGVIIIRVFGLDVASLFIARGYVNTIPREIDEAARIDGCNFPGIFAKIIFPLLKPLVATIGILQFRSAWNDYMMPMIFTMTNRSRMPLVVGVVNLKANGGETAANWALMLAGTSISIVPMIIIFLVFNRYFIENLTAGAVKG

SEQ ID NO: 73001 - DNA, 801 bp, Unknown
  Obtained from environmental sample
  misc_feature (1)..(801): n is a, c, g, or t
atgcaaacagaaaatgaagaagagattgacctgttggaaataataaagcgagtctttaggcacaagattttggctgcttttgtttttgtgcttattgtaggaatggcttttgccgttgcgcttacagccacgcctttttatctaacagagtcaaaaatcatttaccaagtttctggaggctcgcaaagcagcgggctaggtgcgctggcagcacttgccggagtttcttccaaaggagatgacccttctgcatatttgcaagatataattttgtctaacaatatgcttcagtctattttggcggaaaaatggaaggtcaccaaagccctgccagatacttcaactccagttgatttgaaaactctatggaaaataaagccagataccacaaaagaagactggcaaatcaggatggaatatggtctgctgggggctcttaaaaaaggcaaatatataggtttttcacaagaaaaaaagagcggggtaataacgctttccacggaatttcaagaccctcaggtttcttatgatgtaaatattttcatatataatcagttaaatgatattttgaaaaataaaatgcacttcaaagcatcggaaaatcgaaaatttacagaagaaaggcttgcagaggtaaaagagaaccttaaagaggcagaagaaaaccttcgcagattcaggcagcgaaataggcttcgcatggatcccttagatgaactggaagatgcaagatttcagagagatgtttttatgaatcaggaaattatgatacagtgcaaaagcagtctcggccgattctga

SEQ ID NO: 73002 - protein, 266 aa, Unknown
  Obtained from environmental sample
  DOMAIN (7)...(184): Chain length determinant protein
  misc_feature (1)..(266): Xaa is any amino acid
MQTENEEEIDLLEIIKRVFRHKILAAFVFVLIVGMAFAVALTATPFYLTESKIIYQVSGGSQSSGLGALAALAGVSSKGDDPSAYLQDIILSNNMLQSILAEKWKVTKALPDTSTPVDLKTLWKIKPDTTKEDWQIRMEYGLLGALKKGKYIGFSQEKKSGVITLSTEFQDPQVSYDVNIFIYNQLNDILKNKMHFKASENRKFTEERLAEVKENLKEAEENLRRFRQRNRLRMDPLDELEDARFQRDVFMNQEIMIQCKSSLGRF

SEQ ID NO: 73003 - DNA, 921 bp, Unknown
  Obtained from environmental sample
  misc_feature (1)..(921): n is a, c, g, or t
atgttatttctatctgtttcggtaataacattcgggttagcgctctgcggggcaggctgtctttttagccggatttttggtttttcatcgccgcgcaatccgtggatttacttctggcttgggttttttattatcagtacgctttccatgttcgtttctctttttgttcctgtaaatttgataagccttatcattttctttattataggcgcggcgggcctgcctttgttctacagggaatataaaagagcggcggcgcagttcgatagttttgaaaaaaagatattcatatttattgcttttctggcaatcgtcgttattacctgtcttggagcatatacgtcatggccgggagtttatgatacggacttataccacgcgcagataatacgctggtataatgaatatggcacgccgccgggtcttggaaatttacacacgcggctggctttcaactcttcatggctttctctggcggctctttttgacaacggaatttggaatagccgcagcgcgtggataatgcccgctttatcgctttttggaggcatattctattgtttgcatgagttgattttttcacggaaaaacgaaaccagactttatagtctttgcattttgttatggataggcttaaaagttgcatcaggctctgctgaaccggctctttactatgatactcctgttcatattttgaacgctataattattcttgaggcatattatattctttccggttattccggaaaaaacctttcccaaaaagaaattcaaaacatagcaaatatcctcatgctcagcgtangcgcttttatgataaagcctataggcgcggtatcgcttttattctcgggtttactggccttatatgtacttgtacgaaatacaaacaaactgtttcttcatggtgttttatattaa

SEQ ID NO: 73004 - protein, 306 aa, Unknown
  Obtained from environmental sample
  SIGNAL (1)...(23)
  misc_feature (1)..(306): Xaa is any amino acid
MLFLSVSVITFGLALCGAGCLFSRIFGFSSPRNPWIYFWLGFFIISTLSMFVSLFVPVNLISLIIFFIIGAAGLPLFYREYKRAAAQFDSFEKKIFIFIAFLAIVVITCLGAYTSWPGVYDTDLYHAQIIRWYNEYGTPPGLGNLHTRLAFNSSWLSLAALFDNGIWNSRSAWIMPALSLFGGIFYCLHELIFSRKNETRLYSLCILLWIGLKVASGSAEPALYYDTPVHILNAIIILEAYYILSGYSGKNLSQKEIQNIANILMLSVXAFMIKPIGAVSLLFSGLLALYVLVRNTNKLFLHGVLY

SEQ ID NO: 73005 - DNA, 900 bp, Unknown
  Obtained from environmental sample
  misc_feature (1)..(900): n is a, c, g, or t
ttggattacatgaaaagcgaaggggcggtaaaaagacagccatttgaaaagggaaccgcttttccttcaatttttcttgttgcgtataacgccctgcaaaggtacgcgatttcggattatgtgcggcttttttcaaaccggaatggcgttccaggaactgtaagcgagagggttccaccggttaaaaagagcctttcggaaggcaagcctgttattatcggcatgaatacccctccttcatttcatagagccagaaatatatggcagcccatagaaaatccaaataacgaatatggcggacacgctatgtgcgtgatcggatatgacgatgaaaagaacggcggggccttcgagattcaaaacagttggggaactgattggggtaacggcggatatatatggatacgctatgaagattttgccaactgggtttttcaagcttacgaaattattgaaaacctcgctatctataacaaatcggtaaactttgcggcttccataaaaattgaggtttacagaaatagcgagggtatgcctgtcgtttacgacaggcagggattttatcaaacaaccacgtcttacccgtcgggaaccgattttcgtttccttatgaccaacaaatatccggcgtatgtgtacgcttttgccggggacagcagtacgccggacactgaaaggatattcccccttaggggcgtatcgccggtactggattatacggacagcacaatagcatggcccggagaagacgactggatcaggcttaataatgttgttggaacggattaccttgtggtactgttcgcgaaagaagctctggatatagacgccgttcaaaggcgtttcgcgggcgaaaggggaacgtttccgcaagcgcgtcccgagggcggcagggcctaa

SEQ ID NO: 73006 - protein, 299 aa, Unknown
  Obtained from environmental sample
  misc_feature (1)..(299): Xaa is any amino acid
MDYMKSEGAVKRQPFEKGTAFPSIFLVAYNALQRYAISDYVRLFSNRNGVPGTVSERVPPVKKSLSEGKPVIIGMNTPPSFHRARNIWQPIENPNNEYGGHAMCVIGYDDEKNGGAFEIQNSWGTDWGNGGYIWIRYEDFANWVFQAYEIIENLAIYNKSVNFAASIKIEVYRNSEGMPVVYDRQGFYQTTTSYPSGTDFRFLMTNKYPAYVYAFAGDSSTPDTERIFPLRGVSPVLDYTDSTIAWPGEDDWIRLNNVVGTDYLVVLFAKEALDIDAVQRRFAGERGTFPQARPEGGRA

SEQ ID NO: 73007 - DNA, 795 bp, Unknown
  Obtained from environmental sample
  misc_feature (1)..(795): n is a, c, g, or t
atgctagatataaaaacaaaagaagcaaatttaaatataaaacaagaaaacaatagaataaaacaacaagaaataaaaaatctagaacaacaagaaaatccaacaaatgattttgcagtatttgtttctcaaatattagacgatataaatatatcattaaaagttgaaattagtaatgataatcgaaattatatcattaaaagtatacatgaagatgttacattaacaataaataatattagtgaaggtgagaaaaatcttttagctttgttgtttttttattatgaactttttaatgataacaaacaacagcagataaaaacagaaatagaattaattattgttgatgatccaatctcaagtatggatgattctaataaattttatattttagaattaatgagaaaccttttgaatttaccaagtaaacaaatatttatattaactcatagttgggatgatttctgtaatttaacatatggaaaagatactaaaggaaaaaatacaaaagaaaaaaaattaatttattcaaattttgaaataaaaaaaattaatggtcaaagcgaattagttaagttaattgatattgtaaaaccatataaacacttattcaaagaaatttatgattactcgcaaaatccagatactttgtttgagaaaaattgtgaagtatatcattatccaaacgtaataaggagagtttttgaagaatggtatggctttaaaatgggtaaaagttttaatttaacaagtaatcggaaagaatttttagcaagtgagttcaaacttacttaa

SEQ ID NO: 73008 - protein, 264 aa, Unknown
  Obtained from environmental sample
  misc_feature (1)..(264): Xaa is any amino acid
MLDIKTKEANLNIKQENNRIKQQEIKNLEQQENPTNDFAVFVSQILDDINISLKVEISNDNRNYIIKSIHEDVTLTINNISEGEKNLLALLFFYYELFNDNKQQQIKTEIELIIVDDPISSMDDSNKFYILELMRNLLNLPSKQIFILTHSWDDFCNLTYGKDTKGKNTKEKKLIYSNFEIKKINGQSELVKLIDIVKPYKHLFKEIYDYSQNPDTLFEKNCEVYHYPNVIRRVFEEWYGFKMGKSFNLTSNRKEFLASEFKLT

SEQ ID NO: 73009 - DNA, 822 bp, Unknown
  Obtained from environmental sample
  misc_feature (1)..(822): n is a, c, g, or t
ttgaacttcaacgcgccgcccgcaatgccgaaaaacaacggctcaaaactctcggcggagctcttggacgccttaggccagcgggcacaggagcagttggcccaaaaagaggactttcttacaagatcaatggccggccccgggccggggtacaaggtggagttgccggataagcagaagatgatgctcatgatgctggagcggctgacggaggcgcttaccggcaaaaaaggcaactttaactcgaacgttatcaacccgttcgagaacatctcccaaccgcggggatacgtgccgttgcagcagttgcccttcccgatcttcgcaaacaacggcgtggcggccggcgggcagccgcaggccatggccaccgtagaaaggaccgaaacataccaggagtaccagagcatgtctttcagcgccaccggtgtagtcaatacggccgacgggcggcagatccggttcgatatgaacgttagtatgagttacgagttctattcgcagaactcttctaccatagagcgggcggttcaggtcggcaacctatgcgacccgcttgtcataaactatggcggcaacctcccggagtttaccgatgatcggtacgctttcgacatagagatcggcggcgacttggagaatatcttcatgccgacgggcggctcgggcttcttggcctacgacaaanacggcaacggcaagatagacgacggctctgaactgttcggcgccgcaagcggcaacggttttgcggaattaccgcgtacgacagcgacaaaaacggttggattgacgagaaccacgagatattcgcggcgctaa

SEQ ID NO: 73010 - protein, 273 aa, Unknown
  Obtained from environmental sample
  misc_feature (1)..(273): Xaa is any amino acid
MNFNAPPAMPKNNGSKLSAELLDALGQRAQEQLAQKEDFLTRSMAGPGPGYKVELPDKQKMMLMMLERLTEALTGKKGNFNSNVINPFENISQPRGYVPLQQLPFPIFANNGVAAGGQPQAMATVERTETYQEYQSMSFSATGVVNTADGRQIRFDMNVSMSYEFYSQNSSTIERAVQVGNLCDPLVINYGGNLPEFTDDRYAFDIEIGGDLENIFMPTGGSGFLAYDKXGNGKIDDGSELFGAASGNGFAELPRTTATKTVGLTRTTRYSRR

SEQ ID NO: 73011 - DNA, 816 bp, Unknown
  Obtained from environmental sample
  misc_feature (1)..(816): n is a, c, g, or t
ttgtattttactttttccttgctgccgacaatcatcggagtcgtcattagttttatgaaatatgacgtcattcaaaaaccacagttcacaggcctggacaattacctcagaatatttcaggatgaattcttctataaataccttttgaacacggttcggtataccgttatgttcgttccttttagtttcaccgcttctcttggggccgcccttcttttaaaccggaaaaaaaggggcatttcaatctttcggaccgctttttatctgcctgtgctctgctccacagtggctatggccacgatttggctttggctgctaaatagccagcagggtgtcataaataccctgctttataaaatcgggattgtcgggcctgcgtggctccaagatagcaattacgcgatgaaagctattgtttttatgagcgtatgggctggatttggcgggaatatgatgatttttctcgcgggacttcaaggtgtaccggactatctttacgaagcggcttatattgacggcgcaaataagtttatggcatttattcatgttaccataccggggatcgggactactattttctttgttaccacaactttgattatcggctcaatgcaaatgtttgacgccgcctttgttcttaccgggggaggacctgggggaagtaccaaatcattggtgtattacatttatgaagtcgcgtttcgggatcttcgcatgggatatgcttcatcaatgtcggttaccctgtttttcttaattttcattttttcgtttattaacattaagtttaataaagaatccagcggtctgctttaa

SEQ ID NO: 73012 - protein, 271 aa, Unknown
  Obtained from environmental sample
  DOMAIN (44)...(269): Binding-protein-dependent transport system inner membrane component
  misc_feature (1)..(271): Xaa is any amino acid
MYFTFSLLPTIIGVVISFMKYDVIQKPQFTGLDNYLRIFQDEFFYKYLLNTVRYTVMFVPFSFTASLGAALLLNRKKRGISIFRTAFYLPVLCSTVAMATIWLWLLNSQQGVINTLLYKIGIVGPAWLQDSNYAMKAIVFMSVWAGFGGNMMIFLAGLQGVPDYLYEAAYIDGANKFMAFIHVTIPGIGTTIFFVTTTLIIGSMQMFDAAFVLTGGGPGGSTKSLVYYIYEVAFRDLRMGYASSMSVTLFFLIFIFSFINIKFNKESSGLL

SEQ ID NO: 73013 - DNA, 675 bp, Unknown
  Obtained from environmental sample
  misc_feature (1)..(675): n is a, c, g, or t
atgttaaggaaagtactattattcacattggcggtatttttcttgtcgggatcatggttggctgcagcaggttctcaatctgcagggtcaagcagcggtcaaactcaggtagctatttggggtagttggagcggtaccggtatggctcagtttgaggagcagatagcgaaatttaacgcggaacaccccaatatccgcgcgacgtatacattgcagcaggactttgagagaaggcttctggttgctattgccggcggggatgttcccgatggcctgctctgggatcggtttcaaactaccctgtacgccccccgaggcgctatgcgggctgtagatgatttaatcgcccgggacagacttaatttaaataccattttcttcccggaagcggtaaaggaacttcaaaacggcggtaagacctacggacttccccttgtagttgacaacagagcattgttctataacaaggagatctttagggaggttggtcttgatcctaacaaaccgcctacaacatgggccgagcttgaagagtacgcaatcaagatgacgaaatgggaaggcaacaggatggtacggtccggatttgcgttgaacgatgtaggtttgttcaatacgtggatactccaagcaggcggcgacatggttacggccgatagcaaagaaccgctttaa

SEQ ID NO: 73014 - protein, 224 aa, Unknown
  Obtained from environmental sample
  SIGNAL (1)...(23)
  DOMAIN (6)...(215): Bacterial extracellular solute-binding protein
  misc_feature (1)..(224): Xaa is any amino acid
MLRKVLLFTLAVFFLSGSWLAAAGSQSAGSSSGQTQVAIWGSWSGTGMAQFEEQIAKFNAEHPNIRATYTLQQDFERRLLVAIAGGDVPDGLLWDRFQTTLYAPRGAMRAVDDLIARDRLNLNTIFFPEAVKELQNGGKTYGLPLVVDNRALFYNKEIFREVGLDPNKPPTTWAELEEYAIKMTKWEGNRMVRSGFALNDVGLFNTWILQAGGDMVTADSKEPL

SEQ ID NO: 73015 - DNA, 669 bp, Unknown
  Obtained from environmental sample
  misc_feature (1)..(669): n is a, c, g, or t
atggatggcatcgtcacatctaggcgcatagaggcgggcgagacagccgtcattggcaccatgaaccagccaggcaccgtgcttctcaccatctccgacatgagcaaggtggagacagaaatggaagtagatgaagcctccattccaaacgtcaagaacggcctagacgctcaagtccgcatagatgcatatccaaacgagacattcaaaggtattgttacagaggtcggtggaagccccctgctgcaaagcggccagcaggcggcggtaaagttcaaggtaaaagtgcagataattgatccccccgccaccatcaagccgggcctaagtgcccaagccgacatctttacgggcaccagcgacaatgcgctggccataccattccaagcattggtggtcagggacatcgtgcttaaagagggcgaaacatttaagccaggcgacaaaaaggaagaagaaggcgttttcttggtggagagcggctccgtgaaatttgtacccatcaaaacagggctggcaggcgacatgagcatcgaagtgcttgaaggcctcaaagagggcgatgtcatagcttccggccccctgagggccctccgcgagctaaaggacggcaccaaagtgaaagccgacgccnaaaaagcggacatcanaaaagcaggaaaaagctaa

SEQ ID NO: 73016 - protein, 222 aa, Unknown
  Obtained from environmental sample
  misc_feature (1)..(222): Xaa is any amino acid
MDGIVTSRRIEAGETAVIGTMNQPGTVLLTISDMSKVETEMEVDEASIPNVKNGLDAQVRIDAYPNETFKGIVTEVGGSPLLQSGQQAAVKFKVKVQIIDPPATIKPGLSAQADIFTGTSDNALAIPFQALVVRDIVLKEGETFKPGDKKEEEGVFLVESGSVKFVPIKTGLAGDMSIEVLEGLKEGDVIASGPLRALRELKDGTKVKADAXKADIXKAGKS

SEQ ID NO: 73017 - DNA, 951 bp, Unknown
  Obtained from environmental sample
  misc_feature (1)..(951): n is a, c, g, or t
gtgattgtgtacggaattgtgcagcagtatggcatgaatgggctgattattgccaccgttctggccggcgtgatgttagtgacaatgggtgtgttgaaactcggctccattattaaatacattccctacccgattatcgtaggatttaccggcggcattgcggtggtgattttctccactcagatgaacgacttttttggattgggcatcgctgaccagccggctgattttatttccaaatggggcgctatttttagccacgcaggtactattgacatttggactactctgctgtcactcctcacggtggcgattattctggtctggccgcgattgaacaggaagctgcccggctcgcttgtcgcgctggtgctcgttacggtgataagtttgctgctctcgcattttgcccacattcccttcgacaccattggcactaagtttcccgaactggcggacgatatcccgcttcctaaggccgcaacgcccggcattgacatggatactatccgccgattgtttcagcctgcttttaccattgccattctttgcgccattgagtcgctgctggccgccatggtggccgacggaatcacaggcaagcgtcatgattccaataccgagttgattggacaggggattgccaatatcattactccgctatttggcggtattccggctaccggcgccattgcccgcacgatgaccaatatcaataacggcggaaaatcgccggtggccgggttagttcatgcggtagtgctgttgctcgtttttctttttctgatgccgtatgccgtgtatgtacctctctcctgtctggccggaattttggtggtgattgcttacaacatgagcgaatggcgtgcgtttcgttacctgttgaagaacgataaaacggacgtcgccgtactgttagtgaccttcggcctgaccgtgataatgacctga

SEQ ID NO: 73018 - protein, 316 aa, Unknown
  Obtained from environmental sample
  DOMAIN (29)...(316): Sulfate transporter family
  misc_feature (1)..(316): Xaa is any amino acid
MIVYGIVQQYGMNGLIIATVLAGVMLVTMGVLKLGSIIKYIPYPIIVGFTGGIAVVIFSTQMNDFFGLGIADQPADFISKWGAIFSHAGTIDIWTTLLSLLTVAIILVWPRLNRKLPGSLVALVLVTVISLLLSHFAHIPFDTIGTKFPELADDIPLPKAATPGIDMDTIRRLFQPAFTIAILCAIESLLAAMVADGITGKRHDSNTELIGQGIANIITPLFGGIPATGAIARTMTNINNGGKSPVAGLVHAVVLLLVFLFLMPYAVYVPLSCLAGILVVIAYNMSEWRAFRYLLKNDKTDVAVLLVTFGLTVIMT

SEQ ID NO: 73019 - DNA, 354 bp, Unknown
  Obtained from environmental sample
  misc_feature (1)..(354): n is a, c, g, or t
atgagtaattcccattttatttttgaccgcgttaatagcggcactcaccttgtaagcgccggtgtgcttatggcttggtggctatcgccgcgctcacgcaatctgctgaaagggcagccctacgaatgtggcatccctacgcgcggtacctcgtggatgcaattccgcgtggggtattacctgtttgccattctctacttggtgtttgatgtagaaacggtattcctgtttccgtgggctaccgtaacgaaagatatgggtgtacaagggttggcatatattatgttttttctggttatccttgcactgggactcgcttatgcatggaaaaaaggagcattgaaatggaagtaa

SEQ ID NO: 73020 - protein, 117 aa, Unknown
  Obtained from environmental sample
  DOMAIN (17)...(116): NADH-ubiquinone/plastoquinone oxidoreductase, chain 3
  misc_feature (1)..(117): Xaa is any amino acid
MSNSHFIFDRVNSGTHLVSAGVLMAWWLSPRSRNLLKGQPYECGIPTRGTSWMQFRVGYYLFAILYLVFDVETVFLFPWATVTKDMGVQGLAYIMFFLVILALGLAYAWKKGALKWK

SEQ ID NO: 73021 - DNA, 423 bp, Unknown
  Obtained from environmental sample
  misc_feature (1)..(423): n is a, c, g, or t
ttgcggcacccgccccgctggtcatcacagacgttcgggcttgacccatcgggcaggttcatgtggacgggcgagagcggcatcacgattgacgagctgctcaacgacaggaaaaagccggagagccagttggagaagtcgatgcggctgatcaggacggcactggcgaccgggccggtcttggccgacgagatgaaacggatggcagaggacgaggggatatcgccgagtacgttcaaccgagcaaagacagagctgggcgtcatatcgaaaaaacgcggcgaccaatggtattggatactgccagtcgaggtagagttcgaggaagatactcaagatactcaagaatgtcaagatgctcatgatgacaccgtggcaaacatgacagtcatggcactcttgccgagcggaacggagggctga

SEQ ID NO: 73022 - protein, 140 aa, Unknown
  Obtained from environmental sample
  misc_feature (1)..(140): Xaa is any amino acid
MRHPPRWSSQTFGLDPSGRFMWTGESGITIDELLNDRKKPESQLEKSMRLIRTALATGPVLADEMKRMAEDEGISPSTFNRAKTELGVISKKRGDQWYWILPVEVEFEEDTQDTQECQDAHDDTVANMTVMALLPSGTEG

SEQ ID NO: 73023 - DNA, 429 bp, Unknown
  Obtained from environmental sample
  misc_feature (1)..(429): n is a, c, g, or t
atggcaaggacaaaaacatcgggcttcttcttcaagatgaccccggaggaagaagaactgttcgagcgccgcatggcgcagacgggcatcaaaaacaagagcgcgttcatccggaaaatgtgcatagacggccatgtgttcagcttagacatgccggaactggacgagataaaaaggctgatcggcatcgcgggtaacaatctgaatcaactggcgcgccgcgccaactacggtatcgagccgtaccgcgaggatgttgccgatctcaatggacagtttacggagatccgcatcgaatttggcaaggtgctggcgaagctgaccgacatcgccgacgccaagccggggaaacggtttgtcccgccgccgacgatcagggacatgccgtggtactcatcggaaccgtcagcgacgggggaggcagactga

SEQ ID NO: 73024 - protein, 142 aa, Unknown
  Obtained from environmental sample
  DOMAIN (57)...(98): Bacterial mobilisation protein (MobC)
  misc_feature (1)..(142): Xaa is any amino acid
MARTKTSGFFFKMTPEEEELFERRMAQTGIKNKSAFIRKMCIDGHVFSLDMPELDEIKRLIGIAGNNLNQLARRANYGIEPYREDVADLNGQFTEIRIEFGKVLAKLTDIADAKPGKRFVPPPTIRDMPWYSSEPSATGEAD

SEQ ID NO: 73025 - DNA, 450 bp, Unknown
  Obtained from environmental sample
  misc_feature (1)..(450): n is a, c, g, or t
gtgatagattggccgagcatcgcacagccgcgtggtgcgctccacctatggctgctcacgaagatgggcgcgggcgtgacgctcgtgggcccgccgacgctactgccaaccgagatgaaagagcactggcccgacgctaggttcagcaacgacttcgacgaagtgatacccgacatggacgcgataatgatgctccgctgccagttcgagcgcggtacggggatgcacataccaagcgtcggggagtactccagacactaccagctcaacgccgcaaggatgggcaaagccaaggccgaggtggccgtgctgcacccaggtcccataaacaggggcgtggagataacgagcgatgtggccgacggccccaacagcctgatactcagacaggtggccaacggcgtgccagtgaggatggcggtgctgtacctgctgtcgtcctgtcgctaa

SEQ ID NO: 73026 - protein, 149 aa, Unknown
  Obtained from environmental sample
  DOMAIN (12)...(145): Aspartate/ornithine carbamoyltransferase, Asp/Orn binding domain
  misc_feature (1)..(149): Xaa is any amino acid
MIDWPSIAQPRGALHLWLLTKMGAGVTLVGPPTLLPTEMKEHWPDARFSNDFDEVIPDMDAIMMLRCQFERGTGMHIPSVGEYSRHYQLNAARMGKAKAEVAVLHPGPINRGVEITSDVADGPNSLILRQVANGVPVRMAVLYLLSSCR

SEQ ID NO: 73027 - DNA, 822 bp, Unknown
  Obtained from environmental sample
  misc_feature (1)..(822): n is a, c, g, or t
ttgctcgaaatagcactggttgagctgatgggtgctaagccgactggcagaacattacaccactacataaacccggaatgtgaagtgccggaagagtttgtgaagatacatggattgaccacggactttctaaaagacaaaccaaagttcaaaggcgttgcgaaagaaatttgggattttataggtggcgattgccttatctggcatcatgccgacttttccctgccattttttgaaaatgaacttgaagcgtccggcattaaaacgccttatatttttcccggcgcagatataatggatatggccgaggacataagcgtagacctgcctaaatatggcttgaacgcattatgtgaatactatggtataaatatgtcgccggggaagattcgtggcgcattgcttgatgccacgctgattgccgaggtttataaaaagataaacgctaacggcgcatatttggatgacttgtttgacatggcatataaggtagaaggaaaatcacaggcggatttaagcgtccctatatgggcgaggatagacccgaagtcagacgagtatattcgaattgtagcaaaaaatctttgtaaggttggaaaggataggatgatagagattctttccaaacataaaagctatatggcaaaggccgcccttgtcgtcatatcagaaaatctggaaactttgaaaaaactctcggagtgtgatgatgaagtcattcgtgaagaagcgaccaagaaattaaagaaactgaaaccgaccgagaaaatcgccccggccatccgtcccgctttgcgagccgagattccgcccgaaagctaa

SEQ ID NO: 73028 - protein, 273 aa, Unknown
  Obtained from environmental sample
  DOMAIN (1)...(144): Exonuclease
  misc_feature (1)..(273): Xaa is any amino acid
MLEIALVELMGAKPTGRTLHHYINPECEVPEEFVKIHGLTTDFLKDKPKFKGVAKEIWDFIGGDCLIWHHADFSLPFFENELEASGIKTPYIFPGADIMDMAEDISVDLPKYGLNALCEYYGINMSPGKIRGALLDATLIAEVYKKINANGAYLDDLFDMAYKVEGKSQADLSVPIWARIDPKSDEYIRIVAKNLCKVGKDRMIEILSKHKSYMAKAALVVISENLETLKKLSECDDEVIREEATKKLKKLKPTEKIAPAIRPALRAEIPPES

SEQ ID NO: 73029 - DNA, 384 bp, Unknown
  Obtained from environmental sample
  misc_feature (1)..(384): n is a, c, g, or t
gtgggcttcatagcactgttcggagtgtcagtccaaaatgcgataatcatggtggccaacctgaacaaaaatgtgaagcatgggaacctagacgatagagtgattattggtgcaacagagcgattccgccctgtgcttatgaccgcgactgttgccatgctggggctttttcctgcttcaatcgccagggggctgggcagcgacatccagcgcccacttgctaccgtggtggtgagcgggctgataacggccacattgctgactttgattgtcctgccagtgctctattctcttgtggagcgctggcaccgggccaaatactctgggcgggcgcaaggcgagtcgcaacttggccaaaccgaatcattagacaatttggactga

SEQ ID NO: 73030 - protein, 127 aa, Unknown
  Obtained from environmental sample
  misc_feature (1)..(127): Xaa is any amino acid
MGFIALFGVSVQNAIIMVANLNKNVKHGNLDDRVIIGATERFRPVLMTATVAMLGLFPASIARGLGSDIQRPLATVVVSGLITATLLTLIVLPVLYSLVERWHRAKYSGRAQGESQLGQTESLDNLD

SEQ ID NO: 73031 - DNA, 513 bp, Unknown
  Obtained from environmental sample
  misc_feature (1)..(513): n is a, c, g, or t
atgagcaccaatatgagaagcgttgcattgatgacattggcaacattgattgccacgccaaactttgttttggcatacagtcaaacgccccagccaagcgcaaaaaggcaactgagcctgtcggggttcttggaagaagtgctaaagacaaacatggatattgcagccaagcggttcgacataaccagcgcagaggcccaaatagccatagagaagctgttccccgacccagagattgcggcgggaatatcatcgaaagagatgaatggcccaaacaaaccagaaaaccctacgcagtacatggccgaacttagctggacgctcgaactgggcggcaagagggccgcgagggccggggcggccaagtccgctgccgttaaagcaaaggccgagtttgaggcgtttttagaggagaccagggccgtggcggcagccacgttcattgacgcactcagggccagaagaatagccaacgagaagcgcaggatccaccaagggttcaagacattctga

SEQ ID NO: 73032 - protein, 170 aa, Unknown
  Obtained from environmental sample
  SIGNAL (1)...(25)
  misc_feature (1)..(170): Xaa is any amino acid
MSTNMRSVALMTLATLIATPNFVLAYSQTPQPSAKRQLSLSGFLEEVLKTNMDIAAKRFDITSAEAQIAIEKLFPDPEIAAGISSKEMNGPNKPENPTQYMAELSWTLELGGKRAARAGAAKSAAVKAKAEFEAFLEETRAVAAATFIDALRARRIANEKRRIHQGFKTF

SEQ ID NO: 73033 - DNA, 630 bp, Unknown
  Obtained from environmental sample
  misc_feature (1)..(630): n is a, c, g, or t
atgaacattaactatgttttattttttatctgcatttctttttgtgtttttatgtttttttattttaaatggtatataaaaaggcgcacatctgttttaggacaactggaagaataccggacagaagtttacaggcttattgccgatataaatgccgttacggacagggattcacagttgatagaagacagaatagaaaaacttagagctcttttggacgaaaccgacaaacgtatatctgtctatgtgaaagaacttgaaaaaagccgtacaggggaggcgttatacgcaagcctaggacgcggtattcgcgcagcacttaatactgatgttaaaccgccgccccaattatccgccgtccgtccaaatgttgaagtccaacggcagcttttttcagcgccgcttgaaaaaacgccgctatcacagtcttcgcaggtaacatcgcccgttcagtctgcggttcaaggcggcgctcaagtacaaaagccttcttccaaacgtcagatacgcgcttctattgatctccttgcaaatgagggattaccccccgcagaaattgcttcgcgcctcgacataagcattgcagaagttgatttggcaatgaatctgcgccgaagaaaaaaaagttag

SEQ ID NO: 73034 - protein, 209 aa, Unknown
  Obtained from environmental sample
  misc_feature (1)..(209): Xaa is any amino acid
MNINYVLFFICISFCVFMFFYFKWYIKRRTSVLGQLEEYRTEVYRLIADINAVTDRDSQLIEDRIEKLRALLDETDKRISVYVKELEKSRTGEALYASLGRGIRAALNTDVKPPPQLSAVRPNVEVQRQLFSAPLEKTPLSQSSQVTSPVQSAVQGGAQVQKPSSKRQIRASIDLLANEGLPPAEIASRLDISIAEVDLAMNLRRRKKS

SEQ ID NO: 73035 - DNA, 468 bp, Unknown
  Obtained from environmental sample
  misc_feature (1)..(468): n is a, c, g, or t
atggcgcagtatgcaagcaatacaaccgtaagcccagaaaaaacgcagaacgatattaaagagactctgcggcggtacggcgctgttaggtttgggattttagaggaagccacaaaagcgcatgtcatgtttgagtttgataaacttatgatacagctttctgtaagcctgccaaacaaagaggattttattaagacggaagcgggcagatcaagaaaaaaaaaggccgccgatgatgcctataaccaggcaatccggcagcgctggcgggcgcttctattggcgataaaagcaaaattggaagccgtagagacaggaatatccacacttgaaaaagaattccttgcttttgttgtgctgccggacgggcagagtgtcggagatcatttgataccggagataaaaagaatcgccggtactgggaaaatgccccagttattgccatatagcagagaaagaaatgtctga

SEQ ID NO: 73036 - protein, 155 aa, Unknown
  Obtained from environmental sample
  misc_feature (1)..(155): Xaa is any amino acid
MAQYASNTTVSPEKTQNDIKETLRRYGAVRFGILEEATKAHVMFEFDKLMIQLSVSLPNKEDFIKTEAGRSRKKKAADDAYNQAIRQRWRALLLAIKAKLEAVETGISTLEKEFLAFVVLPDGQSVGDHLIPEIKRIAGTGKMPQLLPYSRERNV

SEQ ID NO: 73037 - DNA, 351 bp, Unknown
  Obtained from environmental sample
  misc_feature (1)..(351): n is a, c, g, or t
atgaccatatccggccaggggccgaattccgccccggcgctctttaaaaaggccagggccgtgggggtgacggtttcgccggagccggccagggcggtcacggccacccccggaagcattttgaggaccgccggggccggggcggacaagagcccgtggcggcagtggatggtcccgtcgcgcaggggcagggggccgcagatgaggcggccggggcccaggcggtccaggagcagggcggccaggccgatatccagaaggctgtccagggccccgacttcgtggaagtggatctcctcgggcttgaggccatgcaccgcgccctcggctcggccagcgtctcggccataa

SEQ ID NO: 73038 - protein, 116 aa, Unknown
  Obtained from environmental sample
  misc_feature (1)..(116): Xaa is any amino acid
MTISGQGPNSAPALFKKARAVGVTVSPEPARAVTATPGSILRTAGAGADKSPWRQWMVPSRRGRGPQMRRPGPRRSRSRAARPISRRLSRAPTSWKWISSGLRPCTAPSARPASRP

SEQ ID NO: 73039 - DNA, 411 bp, Unknown
  Obtained from environmental sample
  misc_feature (1)..(411): n is a, c, g, or t
gtgcatggcctcaagcccgaggagatccacttccacgaagtcggggccctggacagccttctggatatcggcctggccgccctgctcctggaccgcctgggccccggccgcctcatctgcggccccctgcccctgcgcgacgggaccatccactgccgccacgggctcttgtccgccccggccccggcggtcctcaaaatgcttccgggggtggccgtgaccgccctggccggctccggcgaaaccgtcacccccacggccctggcctttttaaagagcgccggggcggaattcggcccctggccggatatggtcatcgaacgccaggccctggcctatggaacgaaaatattcacggacgtgcccaacggcgccatattcgccctgggccgcgcctcggcctttgactga

SEQ ID NO: 73040 - protein, 136 aa, Unknown
  Obtained from environmental sample
  misc_feature (1)..(136): Xaa is any amino acid
MHGLKPEEIHFHEVGALDSLLDIGLAALLLDRLGPGRLICGPLPLRDGTIHCRHGLLSAPAPAVLKMLPGVAVTALAGSGETVTPTALAFLKSAGAEFGPWPDMVIERQALAYGTKIFTDVPNGAIFALGRASAFD

SEQ ID NO: 73041 - DNA, 675 bp, Unknown
  Obtained from environmental sample
  misc_feature (1)..(675): n is a, c, g, or t
ttggcccacggaaccctgcccggcctgaaaagcctccatgtggaaggcatacccaggctgaccccggaagacataggctacgcccgcgaactgggctacgtcataaagcttttggccgtctcggcccgggacgaggacggccgcctggaagtgcggctccacccggccatgctgcnccggacgcatatcctggctgaaataagcggccccctgaacgcggtgctggtttccggccacgcggtgggtgacgtgctgctgaacggcgccggcgcgggcatgatgcccacggccagttccgtcctggccgacttgatggacctggcccgggccgacagggtcaattccacctcccgggtgccctccctgggctggtccatactgcgcgacgaaacccccaagctcatgagcgaaaccaagaccgcctattatctccgcttcaccgtggccgaccgtcccggcgtcctggcggccatcgcccggctgctggccgagcggggcataagcctggcccaggtgatccagaaaaatccccttccgggacaggaaaccgtgaacctggtcatgctcacccacctggcccaggagcgtgacctgatggccgccctggccgattcggaccggctggaaaccgtgctggccccgaccaaacttatccgcgtggagaccagactttga

SEQ ID NO: 73042 - protein, 224 aa, Unknown
  Obtained from environmental sample
  DOMAIN (1)...(105): Homoserine dehydrogenase
  misc_feature (1)..(224): Xaa is any amino acid
MAHGTLPGLKSLHVEGIPRLTPEDIGYARELGYVIKLLAVSARDEDGRLEVRLHPAMLXRTHILAEISGPLNAVLVSGHAVGDVLLNGAGAGMMPTASSVLADLMDLARADRVNSTSRVPSLGWSILRDETPKLMSETKTAYYLRFTVADRPGVLAAIARLLAERGISLAQVIQKNPLPGQETVNLVMLTHLAQERDLMAALADSDRLETVLAPTKLIRVETRL

SEQ ID NO: 73043 - DNA, 330 bp, Unknown
  Obtained from environmental sample
  misc_feature (1)..(330): n is a, c, g, or t
ttgcaaatgtcgcatctggtttcaggagaggttactatgcggcatattgcaaaaattgcttttggcacaaatgggaaagtccctgaactaactgattcagatataacgaaccagtttgtaaaaccgataaccagtttttcttatcctgaaaatggaagagtacagtttaattgggaattgctggtaactgaaaacaacggcatggcaattcttgaatttggtctgcttacagctgatggtacgctgtttgcgcgaaagtcaagggagaatcctattcataagcagaaggacatctctcttgaaggtcaatggactattattttaaattag

SEQ ID NO: 73044 - protein, 109 aa, Unknown
  Obtained from environmental sample
  misc_feature (1)..(109): Xaa is any amino acid
MQMSHLVSGEVTMRHIAKIAFGTNGKVPELTDSDITNQFVKPITSFSYPENGRVQFNWELLVTENNGMAILEFGLLTADGTLFARKSRENPIHKQKDISLEGQWTIILN

SEQ ID NO: 73045 - DNA, 600 bp, Unknown
  Obtained from environmental sample
  misc_feature (1)..(600): n is a, c, g, or t
atgaaccatgatattttattagaaataataaaacgaaaaataaaatgcccggatagtttatggcttattgaaaatattatccgaagttttcccggtgagaataatgttcctattggcaattttaccagccaatggttcggaaatctttacatgaatgaagtagatcaatttgtgaaacacgagcttcaaaaaaaatacggtcatattgattatgtcaggtactgcgatgatttttgcttgttcaataatgacaaaaaaatactaaaaacagccagagaagaaataagaaagtttttagatgaaaaattaaaactaaaattcagcaagtgcgatatttttccaataaaacacggtgttgattttcttgggtataggcattttgacaattatattttattgcggaaacggacaaccaagagggtacggaagcggcttgccacgcttccaaaactttatgaaaaaaagaaaatcacagccgaacaatttcggtcttctgtcgcctctacatggggctggttaaaacacgcaaacacacacaatttacaggtaacaataaagctgaatgaattaaagaaaataataggagaattaaatgaataa

SEQ ID NO: 73046 - protein, 199 aa, Unknown
  Obtained from environmental sample
  misc_feature (1)..(199): Xaa is any amino acid
MNHDILLEIIKRKIKCPDSLWLIENIIRSFPGENNVPIGNFTSQWFGNLYMNEVDQFVKHELQKKYGHIDYVRYCDDFCLFNNDKKILKTAREEIRKFLDEKLKLKFSKCDIFPIKHGVDFLGYRHFDNYILLRKRTTKRVRKRLATLPKLYEKKKITAEQFRSSVASTWGWLKHANTHNLQVTIKLNELKKIIGELNE

SEQ ID NO: 73047 - DNA, 783 bp, Unknown
  Obtained from environmental sample
  misc_feature (1)..(783): n is a, c, g, or t
atgaaagtgagctctatgccggacatccagaatgagcccgacgaccgggagatacccctcgcgaaagtgggggtaaaggggcttgaatatcccatccgggttctcgacaaagtgaagaaagtccagcataccgcggccaaagtggatctgtttgccaaccttccccatcatttcaagggaacccacatgagccgtttcgttgaaatattccaccgctaccgggaagacctttccatgccaagatttctggaaatgctcacggaaatacgcgatgacttgcgggctgaatccgccttcggttccatggcctttccctacttcgtggaaaaggccgcgccggtttctttgctccagggaatcatctcctgccaatgcctttaccggggaagggtggacaagggaaagcatttcaccgtggcaatttccgtgccggtaagcacggtttgtccctgttccagagccatttccgaccggggcgcccataaccagcgggggatcgtaacggtggaacttgagctggggcccttcttctggctggaagatataatcgccatggtggaaggctcggcctcaagcccggtttattccctcatcaagagggaagacgaaaaatacatcaccgagcgggcctacgacaaccccaagtttgtggaagacctcgtgagggatgtctacgcgaaaatccgcggcctcgggcagttcccgcgtttttcggtggaagcggagaattttgaaagcatccacaaccacagcgcctacgctttagcggaatattgcccttaa

SEQ ID NO: 73048 - protein, 260 aa, Unknown
  Obtained from environmental sample
  DOMAIN (5)...(260): Uncharacterized ACR, COG1469
  misc_feature (1)..(260): Xaa is any amino acid
MKVSSMPDIQNEPDDREIPLAKVGVKGLEYPIRVLDKVKKVQHTAAKVDLFANLPHHFKGTHMSRFVEIFHRYREDLSMPRFLEMLTEIRDDLRAESAFGSMAFPYFVEKAAPVSLLQGIISCQCLYRGRVDKGKHFTVAISVPVSTVCPCSRAISDRGAHNQRGIVTVELELGPFFWLEDIIAMVEGSASSPVYSLIKREDEKYITERAYDNPKFVEDLVRDVYAKIRGLGQFPRFSVEAENFESIHNHSAYALAEYCP

SEQ ID NO: 73049 - DNA, 513 bp, Unknown
  Obtained from environmental sample
  misc_feature (1)..(513): n is a, c, g, or t
atgcgggaattgagactaaaaggaatattggcagaacgaaaagaaagagaaagactgatgagagaaaacgacaaacgttcgggatatttggaaaaccgttttggagaagtggcggaacatctggtgcttcccagtattatggagaaatttaatgcccgggggtttacctttgataagactgcccagaacattgccataaaagacgctcaagacaggttccaggaggcggatattgacatccttctggaaaataaagacgtagcaatcgctatagaggtaaaggctaaaacaagccaaaaagatgtgaaccgccataaggaaaggatggctgttctccgcagatgggcagatcggcatcaggataaacggaaatatcacggagcgatggcgggggctattatgaccaacgaggtaaaaaactatgccttaaaggaggggttttttacgatcgtgcaaagcggtgatacggttaaaattgatgtgcccgaggatttttcaccacgggagtggtga

SEQ ID NO: 73050 - protein, 170 aa, Unknown
  Obtained from environmental sample
  misc_feature (1)..(170): Xaa is any amino acid
MRELRLKGILAERKERERLMRENDKRSGYLENRFGEVAEHLVLPSIMEKFNARGFTFDKTAQNIAIKDAQDRFQEADIDILLENKDVAIAIEVKAKTSQKDVNRHKERMAVLRRWADRHQDKRKYHGAMAGAIMTNEVKNYALKEGFFTIVQSGDTVKIDVPEDFSPREW

SEQ ID NO: 73051 - DNA, 939 bp, Unknown
  Obtained from environmental sample
  misc_feature (1)..(939): n is a, c, g, or t
atgctcatgtctaggatgaaggacgagatagtgaagagtgccgccgaaaggctggccagcgaccgcattgatgaggccatccagaccgctggcatagagccaatctcgcgcccagcactggccagtgccgaactgtccgaaggctctggcggaacggtgaacgtccagttcgacgtggcccccgaagtcaatttgcccgactacaaagatctgcggctggtcaagaaaaagcgcatcatcgacgatgacttggtggagcgcagccttgaggaaatgcgccagcgggctgcccgcatggtacctgtcgaaggcggggcggagataggccatttcgtagaattcgacctgaggtacaagccccaagggatgaaggccagaaccaacaacgacaggagactgcgcctagaggcaggcaggcccttcgatgccgagctggttggcatgaaggtcgatgagaccaaaaagttttcgctgcaagtccccgacgatgaccaagaccgcaatgtggcgggcaaactagtccagcacgaggtgaccatcacggacataagggccagggtggtgccagagatcaacgacgagttcgcaaaggacacgggccactatgacagcctagccgcactgagggagggtgtccgcaaagagctggaggaaagctccgaaagcgaggcattgtcccgcctccaaggcgacctgctggacaagctgctcgacgcggctccattcgaggtgccgctaagcatggtccacctgcaactggacgactactgtcgggaactggccgacaagctggcccagatgggtcttggcggcagaagcatgaactggcaggcctaccgccaacgccgcctgagtgatgcacagcgcgccgtgcgaagcggctattgctccaagcactgggaacgcaggcgacatccaagtccagctcggccgatctga

SEQ ID NO: 73052 - protein, 312 aa, Unknown
  Obtained from environmental sample
  DOMAIN (182)...(312): Bacterial trigger factor protein (TF) C-terminus
  misc_feature (1)..(312): Xaa is any amino acid
MLMSRMKDEIVKSAAERLASDRIDEAIQTAGIEPISRPALASAELSEGSGGTVNVQFDVAPEVNLPDYKDLRLVKKKRIIDDDLVERSLEEMRQRAARMVPVEGGAEIGHFVEFDLRYKPQGMKARTNNDRRLRLEAGRPFDAELVGMKVDETKKFSLQVPDDDQDRNVAGKLVQHEVTITDIRARVVPEINDEFAKDTGHYDSLAALREGVRKELEESSESEALSRLQGDLLDKLLDAAPFEVPLSMVHLQLDDYCRELADKLAQMGLGGRSMNWQAYRQRRLSDAQRAVRSGYCSKHWERRRHPSPARPI

SEQ ID NO: 73053 - DNA, 351 bp, Unknown
  Obtained from environmental sample
  misc_feature (1)..(351): n is a, c, g, or t
ttgagcatccggtgcaactgctcatgggcgaagccatcaaggggggaagacaacaccatgccggctgattttattactgaggatatacggctttgcatcctgcgcctgatggacagcgcggacggcagcttgaacaacgccgtgctgctcgtcggcgtgcgccgctacgggcaccgcatcaccctggacagcctggcttcggaactggactggctggcggcgcagggcctctgcaccatcaagcatgaagacgggctgatcgtgcccacgctgacccagcggggcaaggatgccgcccggggaatcgtctcgcatcccggcgtcaaggaacccattccgggcctgggttaa

SEQ ID NO: 73054 - protein, 116 aa, Unknown
  Obtained from environmental sample
  misc_feature (1)..(116): Xaa is any amino acid
MSIRCNCSWAKPSRGEDNTMPADFITEDIRLCILRLMDSADGSLNNAVLLVGVRRYGHRITLDSLASELDWLAAQGLCTIKHEDGLIVPTLTQRGKDAARGIVSHPGVKEPIPGLG

SEQ ID NO: 73055 - DNA, 876 bp, Unknown
  Obtained from environmental sample
  misc_feature (1)..(876): n is a, c, g, or t
ttgcctgttttaatgacagtgataaactgtatctccggcgctatttacacaaataaactcaggcttcgcgacagggtgcaggtttacgccctggcgttaattttcctgatattgctttacaattcaccgtccggtcttgtactctactggacaatgaacaatttactttcactgataaaaaatgttttttacaaattcgggaatccgctgaatgtcctgtacctgattataagcgcttttgcggttatttttattttctatctgctttttttcaacgacggggcgttaaaaaaacgcttaatactgtcgtctttctgtttattggttctgtttgttcctgttcttatgaggcagtataaccgtctgcaagatcattttatggttccgctgatggaaaatgacaagaaacgcctgttgctgtttttcgttttatgcgcggctttgacggcgcttgccggactttccattccatcatctgtaattgcttcatcgcctcaggaattcagtttcattgacgcgtataaatcacccctgtattttatttttataacattttttaaatttacaggcctttttcttttctggccgttttgcttttatttcctttttggaaaaaaattacaatgttttttaacgcttctcttctggacggcggtaacaaccgctttaatcaataatttcgcgtttcagaaaaatttttccgccatttccaatactttcacttttaataattcattaaacgccttaaatgcctcaaaaccggcgtctgtattgggtatttttctgacattgatattttttacggcatttctgttattaataaagcataaacgcataaaaataatcagcacgtcgttgtcctgtattttctcttaa

SEQ ID NO: 73056 - protein, 291 aa, Unknown
  Obtained from environmental sample
  misc_feature (1)..(291): Xaa is any amino acid
MPVLMTVINCISGAIYTNKLRLRDRVQVYALALIFLILLYNSPSGLVLYWTMNNLLSLIKNVFYKFGNPLNVLYLIISAFAVIFIFYLLFFNDGALKKRLILSSFCLLVLFVPVLMRQYNRLQDHFMVPLMENDKKRLLLFFVLCAALTALAGLSIPSSVIASSPQEFSFIDAYKSPLYFIFITFFKFTGLFLFWPFCFYFLFGKKLQCFLTLLFWTAVTTALINNFAFQKNFSAISNTFTFNNSLNALNASKPASVLGIFLTLIFFTAFLLLIKHKRIKIISTSLSCIFS

SEQ ID NO: 73057 - DNA, 564 bp, Unknown
  Obtained from environmental sample
  misc_feature (1)..(564): n is a, c, g, or t
ttggccgagcttgcgcgacgtcagtccgggcttgggcatgaaatactcgctgtcgcgcgggcgcaggagcgagcgagcgccccacgccgccagcagcagcagcgccgcatacgcgagccggcttttgatccgcagatcctcgagcgccgccgcgtggcgccaggccgcggcgtagacggcgcccaagagcgcggccgtcgccagcaggcgcgccgccaggtcgcggtcgcccgcggcgaggtgccaaagcttcgcccacgcgcccgccgccgccggcgagatcatgccgccataggcggcgagataggagaaatagtgcagctgcagcaggaagcccgcgagcagcagcgctttcggcagcaggcgcggcggcgcgctctccgccagcagcagcggcagcaggaccagcatgcccgcaagcccggggagggaggcctggcggtagaaaaccgcggccaatacgtcggggacgagcaggagggcgaatatgccgcccgccgcggcgaggctcgcgagcctggcccgccgctcgtgcgacttcacgtatcttatccgctgcactag

SEQ ID NO: 73058 - protein, 187 aa, Unknown
  Obtained from environmental sample
  misc_feature (1)..(187): Xaa is any amino acid
MAELARRQSGLGHEILAVARAQERASAPRRQQQQRRIREPAFDPQILERRRVAPGRGVDGAQERGRRQQARRQVAVARGEVPKLRPRARRRRRDHAAIGGEIGEIVQLQQEAREQQRFRQQARRRALRQQQRQQDQHARKPGEGGLAVENRGQYVGDEQEGEYAARRGEAREPGPPLVRLHVSYPLH

SEQ ID NO: 73059 - DNA, 957 bp, Unknown
  Obtained from environmental sample
  misc_feature (1)..(957): n is a, c, g, or t
ttgcgaggcgtagacagagaggcttcgcgcggtcaggattcgagcgtcaagaccttgtactgcggggcagacgacacgccgtgttcggtaaaggctgtacagacaaacgggacgctcaggattaaagggaaagacgcgatgaggggttacggacgatacggcctcgccccgtggcgcggtaaatacggtattttttgggagtttttctacgaaacgtgcggctacaaccttgagtccggtgaatggattgccgacaattgtctaatcgtcaattccacaattaccgacgtaatcgtcgaaaaaggcgttacgcgtataggtgaccacgcctttgccggtttgattaaactgaaatccatcacgattcccgcgagcgtaacgtctatcggggaggacgcgtttagcggctgcgagaacttgacgtccataaaggtcgcggccggcaacgcctgctactcttccgttaacggcgtacttttaagtaaagataagacaacccaaaaacactatcccctaggaaaatttgcgttttccggttgtgtcgactcaacatcagtgacgataccggccggcgcgacgggtatctattacgaggcgtttcacggttgcgccaaactgacgtccgtaagtacggatgaaggcaacccggaatacagttctgtagacggcgtgttgttcagtaaaaccaaagacacattgatactgtacccacgcggcagacagggcgcgtacgctatcccgaacggcgttacgaatatcgacgaattcgcgttcgccaattgcgccggcttgacctccgtgacaattccgaaaagcgtaacgaaaatcaaaaagagagcgtttaccggatgtaccggcctgacctccgtagcgatcccaaacagcgtaaattatataggatggtcggcgttcagcggttgctccggcctaacgtccgttacgataggagacagttaa

SEQ ID NO: 73060 - protein, 318 aa, Unknown
  Obtained from environmental sample
  misc_feature (1)..(318): Xaa is any amino acid
MRGVDREASRGQDSSVKTLYCGADDTPCSVKAVQTNGTLRIKGKDAMRGYGRYGLAPWRGKYGIFWEFFYETCGYNLESGEWIADNCLIVNSTITDVIVEKGVTRIGDHAFAGLIKLKSITIPASVTSIGEDAFSGCENLTSIKVAAGNACYSSVNGVLLSKDKTTQKHYPLGKFAFSGCVDSTSVTIPAGATGIYYEAFHGCAKLTSVSTDEGNPEYSSVDGVLFSKTKDTLILYPRGRQGAYAIPNGVTNIDEFAFANCAGLTSVTIPKSVTKIKKRAFTGCTGLTSVAIPNSVNYIGWSAFSGCSGLTSVTIGDS

SEQ ID NO: 73061 - DNA, 378 bp, Unknown
  Obtained from environmental sample
  misc_feature (1)..(378): n is a, c, g, or t
gtgttcatcatgggggtcgaggatttcgccaatctggacacgtggcggcgcggcatcgagctgccggagcttatggattttgcgatcatggcgcgcgccgattccggacgcgatctgttcaggagtacgctcgcgcgcctgtggccggccgcggatccgccggacagccttgatgtcgcgcgcatgccgggcggaacggtctgccgctttctcatgatgccgccgcttgacatcagcgcttcattggtgcgaacgaagtgggcaaacggaaacgacgtcaggtttctggttcccgatccggcgctgcctgtgctgcgcgaacacgaacacatcgtggccgcccactggcggacggcctccgtgcccagccatgagtga

SEQ ID NO: 73062 - protein, 125 aa, Unknown
  Obtained from environmental sample
  misc_feature (1)..(125): Xaa is any amino acid
MFIMGVEDFANLDTWRRGIELPELMDFAIMARADSGRDLFRSTLARLWPAADPPDSLDVARMPGGTVCRFLMMPPLDISASLVRTKWANGNDVRFLVPDPALPVLREHEHIVAAHWRTASVPSHE

SEQ ID NO: 73063 - DNA, 861 bp, Unknown
  Obtained from environmental sample
  misc_feature (1)..(861): n is a, c, g, or t
ttgacgtgctatagtttgctcatcaacaatatcgtagatgacacctgcgccagacatcaggaacggattgttgaggcgctcattgcttcggcggtgatctattatcatttatgcgactatcacatgtcttatcaatacttgatgaaagtcctgccgctgtgtgagaaatacaaattcacgacctactttccccgaatttataccaatattgggaatgtttatctcagtttcaaaaagtatgatattgccaaacaatattatttaaaagcattacatcttcacgaggatagtacagctttggccatacatttctgtaatttggggggtgtcgaattatccgtcggagactccgacagtgcattctactttctcagtatggcgctgcaaatcagcaaacggcacaacggcgccattttgagtaatgcgctgaacaatttggcttggtattatgaaaaacgaaaatgctatgattcggcctattattgttatcaacaagccttggatgaagctcggaaaaaaaacaaacttgagtcggaagcccgaagtctttttaatttaggcgatttgtttttggagatggggcaaacggattctgcgttatattatatagatctgtcaaacagacttgcaacggaacaccatttccttggtatccgttcggacaattatttgctattgtccaaaatagaagaagacaaaggacgcaacaaaagcgcactggcctacttcaaaacacacgccaacctcaaagactcggtgtttaatgtcacaaccttcggcaacatcactcaaatgcagcgtctttacgaagtgtcgaaaaccaatcaacaaatagaacaattggctttgaaaagaaagtaa

SEQ ID NO: 73064 - protein, 286 aa, Unknown
  Obtained from environmental sample
  DOMAIN (64)...(97): Tetratricopeptide repeat
  misc_feature (1)..(286): Xaa is any amino acid
MTCYSLLINNIVDDTCARHQERIVEALIASAVIYYHLCDYHMSYQYLMKVLPLCEKYKFTTYFPRIYTNIGNVYLSFKKYDIAKQYYLKALHLHEDSTALAIHFCNLGGVELSVGDSDSAFYFLSMALQISKRHNGAILSNALNNLAWYYEKRKCYDSAYYCYQQALDEARKKNKLESEARSLFNLGDLFLEMGQTDSALYYIDLSNRLATEHHFLGIRSDNYLLLSKIEEDKGRNKSALAYFKTHANLKDSVFNVTTFGNITQMQRLYEVSKTNQQIEQLALKRK

SEQ ID NO: 73065 - DNA, 453 bp, Unknown
  Obtained from environmental sample
  misc_feature (1)..(453): n is a, c, g, or t
atgaattttgaatttggaacattggcgcaacagattgacgaggggctacgagccaacttgcccgatttttgggtggtagccgttgagtgccttctggtaggcttgctgctgctactgggttacgccatacttgccatgctgctcatatacgtagaacgtaaggtgtgcgccaggtttcaggtacgtctcggacccaatcgcgttggaccgttcggtatttttcagacggtagccgacacgctaaaaatgatgctcaaagaggttattcccattaacaatattgataagtttttgttctacaccgcgccatttgtagtagtggcagcatctatgctaacctttgctgcgctgccgtttgccaaaggcattcaagcagtggacttcaacattggcgtattttacgttatggcaatttcatccatcagcatactcggaatttgctctcggccataa

SEQ ID NO: 73066 - protein, 150 aa, Unknown
  Obtained from environmental sample
  misc_feature (1)..(150): Xaa is any amino acid
MNFEFGTLAQQIDEGLRANLPDFWVVAVECLLVGLLLLLGYAILAMLLIYVERKVCARFQVRLGPNRVGPFGIFQTVADTLKMMLKEVIPINNIDKFLFYTAPFVVVAASMLTFAALPFAKGIQAVDFNIGVFYVMAISSISILGICSRP

SEQ ID NO: 73067 - DNA, 519 bp, Unknown
  Obtained from environmental sample
  misc_feature (1)..(519): n is a, c, g, or t
atgccaaaagagcgcatgaccggcatgggacacatgagccgcgagctggcagtggcgcaagcagtgagcggtccctcagggcgtgcctcaggctttagctgcgacattcgcaagcatcgtccctacggcgtttacgacagggttaagttcaacgaggtaatgcgcagcaaaggggatacctttgcccgctacagcgcacgcctggaggaggtttcggagtctttgaacatactggagcagctgatagataatattcccgaaggacaatggctggtgaaaacaaagcccattattcgtttacccgaaggagaatacatggagtgggtggaggctgctcgcggtgcgtttggcgtgtacatttgcagcaagggcgaaaaaactccgtaccgcgtaaagttccgctccacaggtatgccgctggttgccgtggttgatgaaattagccgcgatgaaaaagttgccgacctgattgccattggcggctcgctggactacgtagtgccggatattgacagataa

SEQ ID NO: 73068 - protein, 172 aa, Unknown
  Obtained from environmental sample
  DOMAIN (1)...(172): Respiratory-chain NADH dehydrogenase, 49 Kd subunit
  misc_feature (1)..(172): Xaa is any amino acid
MPKERMTGMGHMSRELAVAQAVSGPSGRASGFSCDIRKHRPYGVYDRVKFNEVMRSKGDTFARYSARLEEVSESLNILEQLIDNIPEGQWLVKTKPIIRLPEGEYMEWVEAARGAFGVYICSKGEKTPYRVKFRSTGMPLVAVVDEISRDEKVADLIAIGGSLDYVVPDIDR

SEQ ID NO: 73069 - DNA, 663 bp, Unknown
  Obtained from environmental sample
  misc_feature (1)..(663): n is a, c, g, or t
ttgattttaggcctcgcctacgcgatggaaaaaggatacgctggaatggaagtgaaaaacattaccctgcaaggcaagggtactaaggatattgagtttaaggacaatgagtatttggagcagtgtctgcaagagttgcacgctaacggcgtaaatatttttgtagaaaagctggatgtgcttatcaactgggggcgcggcaactcggtgtggccgctgacttttgccaccagctgttgcggcattgagtttatgagcgtgggtgctgcccgctacgactttgcccgctttggtttcgaggtaacccgctctagccctcgtcaggccgatgttattgtagttgccggtactatcgtatacaagatggctcccgtgcttaggcgcttatacgaccaaatggcagaccccaagtacgtagtggccatgggcagctgcgctatctctggcggtccgtttgtaaaatcgtaccacgtggtaaacaacgtgtgcgatattattccggttgacgtatacgttccgggctgcccgccacgccctgaggcgttgctctacgggcttatgcagctacagcgcaaaatgaagatagaaaattttttgcctaaagcgcaaaaagcgcagaggagaaccagaacaaagctgaaggtggtaaaagcaaaacagtag

SEQ ID NO: 73070 - protein, 220 aa, Unknown
  Obtained from environmental sample
  DOMAIN (82)...(190): NADH ubiquinone oxidoreductase, 20 Kd subunit
  misc_feature (1)..(220): Xaa is any amino acid
MILGLAYAMEKGYAGMEVKNITLQGKGTKDIEFKDNEYLEQCLQELHANGVNIFVEKLDVLINWGRGNSVWPLTFATSCCGIEFMSVGAARYDFARFGFEVTRSSPRQADVIVVAGTIVYKMAPVLRRLYDQMADPKYVVAMGSCAISGGPFVKSYHVVNNVCDIIPVDVYVPGCPPRPEALLYGLMQLQRKMKIENFLPKAQKAQRRTRTKLKVVKAKQ

SEQ ID NO: 73071 - DNA, 939 bp, Unknown
  Obtained from environmental sample
  misc_feature (1)..(939): n is a, c, g, or t
gtggcacccgtgcccatgtacgaggtggggcagcgcctgcttgacgccggggaagcgttcgccgccatgcggccggaggagcttttcgcggtgattgccaagcaggcggagcagggcgtgactttcatgaccgtccattgcgggctgacccgccggggagcggaattcgccactcggggcgaccgcgcgctcgggattgtttcgcgcggcggttccatgctggcccgctggatgctggaaaacgggcgggaaaatcccctgctggaaggctttgaccgggtggtggagattgccctgcgccataacgtcaccctgtccctgggcgacgggctgcgccccggcgcgggcgtggatgcgggcgacgccgcgcagtgggaggaagtgatcatgctgggccggcttgcccggcaggctttggatgcgggcgtgcagtgcatgatcgaggggccgggccatgtgcccctgcatgaagtggacgcgcaaatccgcaccatcaagcgcctgacgcacaacgcccctctgtatgtgctggggccgttgaccatagacagttcgcccggatacgatcatatcgccggcgccataggcggcgccctggccgtgcgggcgggggcggattttttgtgctacataactccggccgagcatctgaccctgccggatgccgcggatgtgcacgccggagtcatggcgtcgcgtgtggcggcccagagcggcgaggtggcgctgggcgcgccgcgcgccctccggcgtgaaaaggacatgaacgaggcgcgcaaggcattgaactggcaggggatggccgctgcggctctggacccgtccatgcttcacatgcggcgcgcgggccacaaggatgaggaagtgtgcgcgatgtgcggcaagttctgtgccgtgaagatgttgcgcgaaaccgaagccgcgcccgccggacgctga

SEQ ID NO: 73072 - protein, 312 aa, Unknown
  Obtained from environmental sample
  DOMAIN (1)...(306): ThiC family
  misc_feature (1)..(312): Xaa is any amino acid
MAPVPMYEVGQRLLDAGEAFAAMRPEELFAVIAKQAEQGVTFMTVHCGLTRRGAEFATRGDRALGIVSRGGSMLARWMLENGRENPLLEGFDRVVEIALRHNVTLSLGDGLRPGAGVDAGDAAQWEEVIMLGRLARQALDAGVQCMIEGPGHVPLHEVDAQIRTIKRLTHNAPLYVLGPLTIDSSPGYDHIAGAIGGALAVRAGADFLCYITPAEHLTLPDAADVHAGVMASRVAAQSGEVALGAPRALRREKDMNEARKALNWQGMAAAALDPSMLHMRRAGHKDEEVCAMCGKFCAVKMLRETEAAPAGR

SEQ ID NO: 73073 - DNA, 309 bp, Unknown
  Obtained from environmental sample
  misc_feature (1)..(309): n is a, c, g, or t
ttgacggggccgcttgtcacgataggcaccgccaaggctgagggctggctggacaagtcggggagcaaatggaagacgatgccagagcaaatgctgagatacagagcgggcgcgtggttcgtcaacaccgtggctccagaactggcaatggggcttcccaccacggacgagatagaggacttcacggacgcggacgttgtggcggattcagacgcgccaagcgacacacccccgcccgtgtcacgcacggacgcggtgaagaacaagctgaggggaaacgacggcggcaacggagagagcaatggctga

SEQ ID NO: 73074 - protein, 102 aa, Unknown
  Obtained from environmental sample
  misc_feature (1)..(102): Xaa is any amino acid
MTGPLVTIGTAKAEGWLDKSGSKWKTMPEQMLRYRAGAWFVNTVAPELAMGLPTTDEIEDFTDADVVADSDAPSDTPPPVSRTDAVKNKLRGNDGGNGESNG

SEQ ID NO: 73075 - DNA, 684 bp, Unknown
  Obtained from environmental sample
  misc_feature (1)..(684): n is a, c, g, or t
ttgtcaaaattagaagatttatgctggaaattacgaagaaagtactttccgccggaagtaaaatacggtcaaaacgacagcgatgaaacactatcggcaaggttaaaaaatccggtttttcttgaaaaatatggttttaaagtattttcacaatatgacgaagacggaataattgaagaaatattcaatagaataggtgaaaaaagcaaagtttttatagagtttggggtcgaaaacggacttgaaagcaatgcgcacttcttactgcataaaggatggtccggtttatggattgaaggaagtaagaaatattgcaaaattatacaaaaactgtttgcaaaacctatttctttacaaaaacttaccgtacaaaattgttttattaccgccgagaatatagacaaaataataagcgaatatttacgctcaaaaaatcttgatattaaatcggatcctgtcgatttattgtcgatagacatagacggaaacgattattgggttttgaaagccgttgaagttattaaacccagagttatcgtgtttgagtataattcacaatttccgccaaatttagagtgngttatgcaatatgacgcaaaacatttatggngaaaagacgacaatatgggagcgtcgttaaaatcgtttgaattgctcggtaggcagaaagttatcaacttgtag

SEQ ID NO: 73076 - protein, 227 aa, Unknown
  Obtained from environmental sample
  misc_feature (1)..(227): Xaa is any amino acid
MSKLEDLCWKLRRKYFPPEVKYGQNDSDETLSARLKNPVFLEKYGFKVFSQYDEDGIIEEIFNRIGEKSKVFIEFGVENGLESNAHFLLHKGWSGLWIEGSKKYCKIIQKLFAKPISLQKLTVQNCFITAENIDKIISEYLRSKNLDIKSDPVDLLSIDIDGNDYWVLKAVEVIKPRVIVFEYNSQFPPNLEXVMQYDAKHLWXKDDNMGASLKSFELLGRQKVINL

SEQ ID NO: 73077 - DNA, 549 bp, Unknown
  Obtained from environmental sample
  misc_feature (1)..(549): n is a, c, g, or t
ttgagtttggtgaacgatatatttgaagaagcagacgagatgaaagacgtttattatcaccaatacaagatagtgaacattgagaatactgaaaagcagataaaaggtttggagtttgtgtttatcgaattgccgaagttcaagccgataagtcaaaaagagcaggattactttgatttgtggcttcgttttttgacggagataaacgagaatatcgaaaatgtttcaagcgaccttttgaggaataaagagataggcgaggcgattaaatgtgtcgaagagagcgccttgtcgagaaaagaattggatatttacgacagggttcgagatgccgtaaaagtaaaaaggacgcttattagcggcgcgattcgcaggggcgaagcaaaaggacttgcgaaaggacttgcgaaaggacttgcaaaaggacttgcggaaggggaactaaaaggtaaagcggaagtagccagaaacttaaaaggactcggattgccgacggcgcaaattttacaagcgacaggattaacgcaggcggaaatagagaagttataa

SEQ ID NO: 73078 - protein, 182 aa, Unknown
  Obtained from environmental sample
  misc_feature (1)..(182): Xaa is any amino acid
MSLVNDIFEEADEMKDVYYHQYKIVNIENTEKQIKGLEFVFIELPKFKPISQKEQDYFDLWLRFLTEINENIENVSSDLLRNKEIGEAIKCVEESALSRKELDIYDRVRDAVKVKRTLISGAIRRGEAKGLAKGLAKGLAKGLAEGELKGKAEVARNLKGLGLPTAQILQATGLTQAEIEKL

SEQ ID NO: 73079 - DNA, 507 bp, Unknown
  Obtained from environmental sample
  misc_feature (1)..(507): n is a, c, g, or t
gtggcgggcgagattagccgacatgcgcacgctggtcgaggaagcggtctgggcgattattttgccctggccgacggcacaatgaccgtaatctatattttctttgtcgcggtgatggcgctggttttgtggaatgccgggctaatcagcggcctccgccgttacggcgaaatgggcgtgcgcctggcgatcggcgagagcaagagccatatttacaccagcctgctttgggaagctattctgatcggattttgcgggtcgctgatcggcacggcgtgcgggctgcttttgtcttattggctgcagaaatacggcttgaattatggtgtgatttttaaaaataccacgataatgattgaaaatgtggtccgcgcgcgtgttacaccggcgtgttattttatcggctttgcgccgggcgtgctgtccacgcttaccggcagcgcgctggcgggcttaggtatttttaagcggcagaccgcccagttatttaaggaattggagacgtaa

SEQ ID NO: 73080 - protein, 168 aa, Unknown
  Obtained from environmental sample
  DOMAIN (2)...(159): Predicted permease
  misc_feature (1)..(168): Xaa is any amino acid
MAGEISRHAHAGRGSGLGDYFALADGTMTVIYIFFVAVMALVLWNAGLISGLRRYGEMGVRLAIGESKSHIYTSLLWEAILIGFCGSLIGTACGLLLSYWLQKYGLNYGVIFKNTTIMIENVVRARVTPACYFIGFAPGVLSTLTGSALAGLGIFKRQTAQLFKELET

SEQ ID NO: 73081 - DNA, 825 bp, Unknown
  Obtained from environmental sample
  misc_feature (1)..(825): n is a, c, g, or t
ttgaagcacgggtttaacgtgctctgcgagaagcctgtcgcaagggacgcggaggaatttcaaaccgtccttgatacggcaaaagagaccggcagaaaatactacgcgttccagcagtgccgtttttctcctggtttcacaaaaataaaggaggtcattgcctccggagttttgggacgcatcgtggcaatagatctgaaaatggataattttgcccgccgctgggactggcagaccatccatgagaacaccgccgggatactgctcaacaacggcccccattatgtggactgggccctcgctctcatggggttccctgccaatgtggaaacaaccgcgtattttgaccgggccaactatgccggcaacggagaggactatgtgaaactcattctccgcgctcccggcgctccgatggttgatattgaactctcagcctgcaatgcgtacccggcacagctcctccttgtccagggaactcagggtaccatgaaaggcaatgaaacttcccttaactggaagtacttcaggccggccgatgaagcgcccctcaagctcgatacccgccccctcagaaatgaaaagggtgagccgctctactgccgggaaaatcttaatttccatgaagagagctggactgcggatatggggatcatgtctccctatgagtatgactttatggaaagaggccttcgcttttaccgggccctccatgccaattttagcagcaatacagactttgtcatcaagaacgagcatttattgctgctaatgaaggtaatgggagcggctcatgcccagaaacagggagtatttattgagtaa

SEQ ID NO: 73082 - protein, 274 aa, Unknown
  Obtained from environmental sample
  DOMAIN (50)...(158): Oxidoreductase family, C-terminal alpha/beta domain
  misc_feature (1)..(274): Xaa is any amino acid
MKHGFNVLCEKPVARDAEEFQTVLDTAKETGRKYYAFQQCRFSPGFTKIKEVIASGVLGRIVAIDLKMDNFARRWDWQTIHENTAGILLNNGPHYVDWALALMGFPANVETTAYFDRANYAGNGEDYVKLILRAPGAPMVDIELSACNAYPAQLLLVQGTQGTMKGNETSLNWKYFRPADEAPLKLDTRPLRNEKGEPLYCRENLNFHEESWTADMGIMSPYEYDFMERGLRFYRALHANFSSNTDFVIKNEHLLLLMKVMGAAHAQKQGVFIE

SEQ ID NO: 73083 - DNA, 399 bp, Unknown
  Obtained from environmental sample
  misc_feature (1)..(399): n is a, c, g, or t
ttgatggcgggcggatcccgggcacagcatccgctggtctttctcttcgccggacatgacggacacatttcctgggtcaccccttggatgtgggcctgcggatttctggctttcgcctctctggcgctgctgattccccccgcgctacgcgacaacatgaccattttgccctgggcgttgggcatgctcgtcgccgcctcgtggatagacaagggcctcggcctcatcatcgggggcttttcgcccaacgtgtttgaaaccctgactccttacgcccccaccggcattgaaatcctcatcacgctgggtgtgtacgccgtggggctgttggtgctttcgctgctgtggaaaatcgccatcggcgtgaaacaggaagcgggcacctttgagctgcgctag

SEQ ID NO: 73084 - protein, 132 aa, Unknown
  Obtained from environmental sample
  misc_feature (1)..(132): Xaa is any amino acid
MMAGGSRAQHPLVFLFAGHDGHISWVTPWMWACGFLAFASLALLIPPALRDNMTILPWALGMLVAASWIDKGLGLIIGGFSPNVFETLTPYAPTGIEILITLGVYAVGLLVLSLLWKIAIGVKQEAGTFELR

SEQ ID NO: 73085 - DNA, 468 bp, Unknown
  Obtained from environmental sample
  misc_feature (1)..(468): n is a, c, g, or t
gtgcgcggagcggctttggcggaaggcctcactgcgaaaaacgctcaaggagcttgcatgaccaaggccatcaaagaagccgtcggcatctgcaaaatgctgctacgcaacggctacgacgcacacgtcatcaatgcccaactgcaactgacgcttgcggaaaaacacgatgatcacagcgtggacatcgcctgtgaaacaaactttgaacaccttgcccggctgctgcccaatatcgaacaggatgccgaacacggcgcgctggccgtgctgaagcaagacagcgtcatctttcgtttttacgccatcaacctggaaaacgccagccatccggaattggccctcttgcgcatcacgccgcacatggtgagcctgatgtcgccccaggaacgcctacggctgcgcctcatcggctacggcgacaagcaacgcgaccgcacgcttccggggaacgctttcaggatttag

SEQ ID NO: 73086 - protein, 155 aa, Unknown
  Obtained from environmental sample
  misc_feature (1)..(155): Xaa is any amino acid
MRGAALAEGLTAKNAQGACMTKAIKEAVGICKMLLRNGYDAHVINAQLQLTLAEKHDDHSVDIACETNFEHLARLLPNIEQDAEHGALAVLKQDSVIFRFYAINLENASHPELALLRITPHMVSLMSPQERLRLRLIGYGDKQRDRTLPGNAFRI

SEQ ID NO: 73087 - DNA, 594 bp, Unknown
  Obtained from environmental sample
  misc_feature (1)..(594): n is a, c, g, or t
atgcgctggcgctatatggaggacgcggacggcgttcccctgctgcaacgcctgaacaccttcctggaagacggcaagctgctgctcggaatctgcaacggatttcaactgctcgtcaagctcggagcgcttccggctcttgacggcgcgcgcttcgaacgccgcgtcgctctcggacacaatgaccgcggacgctttgaaaaccgttgggtctacctggtcgccaatcccgacagcccgtgcgtgttcacgaaaaacctggatatcctggccatgccggtacgccacggcgaaggcaaacttattccggacgcgcccgaactcctcgaccgtcttgatcaagaaaatctgatcgccctgcgctacgcggatcccgagagtcttgcgcctacccaggagtatccggccaaccccaacggctcccccctggccatagccggcctgaccgatcccaccggacgcgtcctcgggctcatgccgcacccggaagcctttcatcatgcgacaaaccaccccggctggacgcgcggcgaagtcaacgctccgggaacaatgattttcgccaatgccgtgcgctacctgaagagcctgtga

SEQ ID NO: 73088 - protein, 197 aa, Unknown
  Obtained from environmental sample
  misc_feature (1)..(197): Xaa is any amino acid
MRWRYMEDADGVPLLQRLNTFLEDGKLLLGICNGFQLLVKLGALPALDGARFERRVALGHNDRGRFENRWVYLVANPDSPCVFTKNLDILAMPVRHGEGKLIPDAPELLDRLDQENLIALRYADPESLAPTQEYPANPNGSPLAIAGLTDPTGRVLGLMPHPEAFHHATNHPGWTRGEVNAPGTMIFANAVRYLKSL

SEQ ID NO: 73089 - DNA, 948 bp, Unknown
  Obtained from environmental sample
  misc_feature (1)..(948): n is a, c, g, or t
atgcgcggccgcgagttggagatggttcaaaagtatggcggacaagccgccgaagcacttgcggagcatttagggacaacggttgccgggcttcgtgattttgccaagaacggtcgaataaccgcacaggttataactgacgctctggtcggcagtatggataaatttattaaggcggccgatgaaatgccagcaacggtttccgatgcttttgtccgcttgcgtaatcaaatgctaatgactgcggggcaactgaataaatcttttaaatttgaacaaacaatagtcaagggaattgacacattaaaaaactcattaaacgaattacaagctccgttagaaacagcgattagccttggcacggcgctttttgttggcgttatgggcaaaaaagctatagtggcgattgccgataatgtaagggctcgtgctgcgcttgtcatggctatgaaagatgaagcggccatagaaaaacttggactcaccaccaaaaaagaagttttggctactgagtccaaatttacgagccaaagaactaaggatgccattgaaagacgggctattgccgcaaatactttagcagaatttgaagcccaaacttggtcttatatgcacttaaataaaaccatccaacagaacacggcccttgaaattcaaaagttagaagttgatagaattgcaatcaaaaacctttttgatttgactgttgcaacgaatggttataaccaggcgcaagcccggcaactaaaattgtatagggatttattggccttagatacacaattggcggtattaagggccaagaatgcgcaagccacanaagcatttaccgcctatcaatcggaattggccgccgctacagctagagcgtccggcgcgatgggtgtttttcggtcgggtggcgcttccttgatgtctatgtttacccctgccgccccttgccattag

SEQ ID NO: 73090 - protein, 315 aa, Unknown
  Obtained from environmental sample
  misc_feature (1)..(315): Xaa is any amino acid
MRGRELEMVQKYGGQAAEALAEHLGTTVAGLRDFAKNGRITAQVITDALVGSMDKFIKAADEMPATVSDAFVRLRNQMLMTAGQLNKSFKFEQTIVKGIDTLKNSLNELQAPLETAISLGTALFVGVMGKKAIVAIADNVRARAALVMAMKDEAAIEKLGLTTKKEVLATESKFTSQRTKDAIERRAIAANTLAEFEAQTWSYMHLNKTIQQNTALEIQKLEVDRIAIKNLFDLTVATNGYNQAQARQLKLYRDLLALDTQLAVLRAKNAQATXAFTAYQSELAAATARASGAMGVFRSGGASLMSMFTPAAPCH

SEQ ID NO: 73091 - DNA, 777 bp, Unknown
  Obtained from environmental sample
  misc_feature (1)..(777): n is a, c, g, or t
gtgcctccacagaaaacagatcaagccctttttcctttagatttttccttcgctccctatggcgcatgggtctcttttagtaaaaggctttcctcatctgaacgcttgaggatcaacaatgaagcaatagccctattgtcaaagccgcatgatcaattaagtcccgccgaacttgatacgctccgttcctattccggctggggcggcctctccgcttccgatgagcgtggcgtcctatacgattactataccagccctcctattgcgtcccttgcatggtacttactcaataagctcaagccaatccaaaaaaatgcattaatccttgagccctcttgcggcactggcgtatttttctttacaggcccgcagaatgttttttataacggagtcgagcttgacgagcgcacagcctctattgcttctgtacttcaccccgatgcttttatcactcccaaaagttatgaggcatttaacctgtcaggcgataatgctaaccgtttcgatcatgtcatcggcaatgcgccttttggcgagcgcacattggaaactgccttcatggatatgccggaagaaaaatcccttgaccgttatttcatcactcgatcccttgacaatcttaagccttctggcactatggctcttatcgtccactccggcatattggcgaacaagagcaatgctgaatggcggctatccatcagcaaaaaagcgcaattcatgggagccgtcaaactcaatgacagttcgttcaaccatactcatacaagcatctag

SEQ ID NO: 73092 - protein, 258 aa, Unknown
  Obtained from environmental sample
  misc_feature (1)..(258): Xaa is any amino acid
MPPQKTDQALFPLDFSFAPYGAWVSFSKRLSSSERLRINNEAIALLSKPHDQLSPAELDTLRSYSGWGGLSASDERGVLYDYYTSPPIASLAWYLLNKLKPIQKNALILEPSCGTGVFFFTGPQNVFYNGVELDERTASIASVLHPDAFITPKSYEAFNLSGDNANRFDHVIGNAPFGERTLETAFMDMPEEKSLDRYFITRSLDNLKPSGTMALIVHSGILANKSNAEWRLSISKKAQFMGAVKLNDSSFNHTHTSI

SEQ ID NO: 73093 - DNA, 879 bp, Unknown
  Obtained from environmental sample
  misc_feature (1)..(879): n is a, c, g, or t
atgggacgcggcgttcgttcgaataatgactattgcgtggtagtattgatgggcaacaaacttgcggacgcagtcttcaatcaacacggcactcaattctttggttcggcaacacgcgagcaactcaaactttcgcagcagttgtgggaacaacttatggaaacagacaaaaaacctaaagttgacgaaatattctcgctggcaaaacacgtattagatcgtgaatccgaatggattactgcgagcaaatccattctatctactgttaagtacacaaaaaaagcaaatgtggattcgctagttgtagctattaggaatgcttttgaacaagaatgtctggaacaatacgatgaggcattttcaattattgaggctgaaagaaacaaaacggatgaccggaaagcacaaggactccttatgcaatatatggctgagtataagcattttacaaatcccgcacatgctcaggaattgcttttggcagcaagaaaactaaattctatggttctaaaaccaataaaggggattcaatttgaaaaattgcaatgctccccaaatggtcaagcggcacacgctttaaaatatatggccgacaatgatttaactggaaacggctacattattcgagtgaattcgatacttgatagtttgatattttctaacgattctgcaaaccgtttcgaacaggcactgaaagacacagcatccattattggaatagcttcctcacgccctgaagtagaatatggaaatggcgcaccagataatttgtttgcgctcggtaattctgagtatgccgtcatagaatgcaaaagccgaaccactactgaaataatttcaaagcacgatgcaatcaacttctcggtctcggccatctga

SEQ ID NO: 73094 - protein, 292 aa, Unknown
  Obtained from environmental sample
  misc_feature (1)..(292): Xaa is any amino acid
MGRGVRSNNDYCVVVLMGNKLADAVFNQHGTQFFGSATREQLKLSQQLWEQLMETDKKPKVDEIFSLAKHVLDRESEWITASKSILSTVKYTKKANVDSLVVAIRNAFEQECLEQYDEAFSIIEAERNKTDDRKAQGLLMQYMAEYKHFTNPAHAQELLLAARKLNSMVLKPIKGIQFEKLQCSPNGQAAHALKYMADNDLTGNGYIIRVNSILDSLIFSNDSANRFEQALKDTASIIGIASSRPEVEYGNGAPDNLFALGNSEYAVIECKSRTTTEIISKHDAINFSVSAI

SEQ ID NO: 73095 - DNA, 360 bp, Unknown
  Obtained from environmental sample
  misc_feature (1)..(360): n is a, c, g, or t
atggccgggctgccgagtttacgcgccgttttcgataaacaggagaaaacgcgctacggctcgtcggcgggtcgaaactggaatttgggtctaatgctcaacggcgagaacaaaatcaccgtcgggcataagcgaaaaaaggaattcaaagcaatgctcgacaactacatccgcgacaggaaagccggaaacggctgggatttgcacgacattcaggtgctcggcgggctaatcagctactaccgaatggtagaaaaggaatacattgactatttaataggtcaatgcggtcaaaaacacggcgcggatattgaaaaatgtattaaggaggatttgcgccaagttccggttcaacattag

SEQ ID NO: 73096 - protein, 119 aa, Unknown
  Obtained from environmental sample
  misc_feature (1)..(119): Xaa is any amino acid
MAGLPSLRAVFDKQEKTRYGSSAGRNWNLGLMLNGENKITVGHKRKKEFKAMLDNYIRDRKAGNGWDLHDIQVLGGLISYYRMVEKEYIDYLIGQCGQKHGADIEKCIKEDLRQVPVQH

SEQ ID NO: 73097 - DNA, 582 bp, Unknown
  Obtained from environmental sample
  misc_feature (1)..(582): n is a, c, g, or t
gtgtttagaattgtcgtcaatgtgctgggcgaatccgagaaattggatcacatgctgggcattttgctagacctcactaggctggaagatacatttatgcggctgaacaaagattggcagtcactcgaagagatcataggcgcagtccttacccgcttggagaatcaaaaaggcaagctgcccattgcggtctcattcgctccagaattgccgctggtccaagtggacgctgtcttgattgagcaactaatttcaaacctcttggaaaacgccattcgatatgccccgaataagcctgtggagattttggcggagcagcaatctggacaaataagggtggagataaaagacaatggcccaggagtgccaaaagacctgcacgggagagtgttcgacaagttttatcggtcaccagactcaggcgatggggggacaggactcggactcgcaatctgcaaggccatagccgaggcacatggcggcaagatttgggtggaagacgcgccaaatggcggtgccattttcattttcacgcttcccgacaaatgggggcagccgcctatagaggattcgactacatga

SEQ ID NO: 73098 - protein, 193 aa, Unknown
  Obtained from environmental sample
  DOMAIN (75)...(182): Histidine kinase-, DNA gyrase B-, and HSP90-like ATPase
  misc_feature (1)..(193): Xaa is any amino acid
MFRIVVNVLGESEKLDHMLGILLDLTRLEDTFMRLNKDWQSLEEIIGAVLTRLENQKGKLPIAVSFAPELPLVQVDAVLIEQLISNLLENAIRYAPNKPVEILAEQQSGQIRVEIKDNGPGVPKDLHGRVFDKFYRSPDSGDGGTGLGLAICKAIAEAHGGKIWVEDAPNGGAIFIFTLPDKWGQPPIEDSTT

SEQ ID NO: 73099 - DNA, 822 bp, Unknown
  Obtained from environmental sample
  misc_feature (1)..(822): n is a, c, g, or t
gtggtgcccgaaacgtttgctttttttaagacctttaatcagagtaccctgcagggggcagttaaaatccccacgccccctgatttttacgaaaagaccattgccgaacggcgggcctggtttatcaaaaaagccatgacggactatgtgccgcaggagatcctgcccggagacctgctctgcggggcggtgttcaacctgatggcaagccattgcctttcggaggaagaaagcaggcgcaaggacgccgtggtctgcgggaaaaagggcctgacccgccggactgttgagtttcatgaccgtggttttggcaattgcggccctacgagcggtcatattattcccggttacgacatccccattaggtatggttttaagcacatatatgaagaaatcaaagccaaatacgattccctttcagaaacggagaaaaaaggcgccaagggaggccagcttagggcgatgatggaagcggcagccatgccgcgggaccttgcggcaaaatacggatcattgtgcgatgccttggccgcgaaagaaagtgatcctgcccgcaaggccgagcttgagcgcatggcggccaatatgcggcgcgtcccctgggagccggcggaagatttctggcaggcggtgcangctctgtggtttacccatatgctggtcatgtcagacgaaaactatcccggtccgggcgtttcattcggccgggtggatcagtatctgtacccgtactatcaaaaatctgtagaggcaggagaaggactgggaattcatgaaagacatactcaagtgcttctgggtacactgcaataccgtctatga

SEQ ID NO: 73100 - protein, 273 aa, Unknown
  Obtained from environmental sample
  misc_feature (1)..(273): Xaa is any amino acid
MVPETFAFFKTFNQSTLQGAVKIPTPPDFYEKTIAERRAWFIKKAMTDYVPQEILPGDLLCGAVFNLMASHCLSEEESRRKDAVVCGKKGLTRRTVEFHDRGFGNCGPTSGHIIPGYDIPIRYGFKHIYEEIKAKYDSLSETEKKGAKGGQLRAMMEAAAMPRDLAAKYGSLCDALAAKESDPARKAELERMAANMRRVPWEPAEDFWQAVXALWFTHMLVMSDENYPGPGVSFGRVDQYLYPYYQKSVEAGEGLGIHERHTQVLLGTLQYRL

SEQ ID NO: 73101 - DNA, 381 bp, Unknown
  Obtained from environmental sample
  misc_feature (1)..(381): n is a, c, g, or t
atgaccagaccgaagctatacttgattgacggccactcgctggcttaccgtgcttattttgctctgccgctgacgatgatgacgacggacggtcagctgaccaatgcggtgtacggtttcagcaaaatgctgttcggcatcatcgaggagaaaaaaccggacgctctggccgtggcttttgatttgccccagccgactttccgccacgaaaaatacaaagaatacaaggcccaccgtccgccctcgccggaggaattctgctcgcagatgttgttgataaaagaagtcttgcggacagcctctattcctatttacgaagccccccgctatgaggccgatgatgtgcttggcagctggcccgcaagccgtggaacccggtaa

SEQ ID NO: 73102 - protein, 126 aa, Unknown
  Obtained from environmental sample
  DOMAIN (4)...(125): 5'-3' exonuclease, N-terminal resolvase-like domain
  misc_feature (1)..(126): Xaa is any amino acid
MTRPKLYLIDGHSLAYRAYFALPLTMMTTDGQLTNAVYGFSKMLFGIIEEKKPDALAVAFDLPQPTFRHEKYKEYKAHRPPSPEEFCSQMLLIKEVLRTASIPIYEAPRYEADDVLGSWPASRGTR

SEQ ID NO: 73103 - DNA, 765 bp, Unknown
  Obtained from environmental sample
  misc_feature (1)..(765): n is a, c, g, or t
ttgcagaatattcccgtgcgcagcgaggcggggcggaaaatccgtcaggcttttattccggaaaaagagggcaatattttgctttccgcggattattcgcaaattgagcttaggatactggcgcattatgcggatgaaaaaaatctccacgaggcttttgctcaagggctggatattcatcagtccacggcggccaaggtgttcggcgtgcctctggacagcgtaacgcccgaacagcgttcgcaggccaaagccgtgaatttcggcatagcctacggtatgtccgcgcggcgtctggcgcaggatgtcggcatcccgcaagatgaagcgcaaaattttattgataattattttgccacctatccgggcatcaaaaattatatcgacacgactatcgccctggctcataagcaaggttatgttacgacgctttttggccggcgcaggtatttcaaggaaatcaatatgaaaaacaaacggcttgcggctatgtccgagcgcgcggccatcaatatgccgatacagggtacttccgcagattttataaaaattgcaatgatccgtattgcgcaggctttgcaggaacagaaattaaaagccaaaatgattttgcaggtacacgacgagctggtttttgatttgccggaagccgaagcttatgatctggaatgcttggtcaaaaaaataatgacttcggtgtatgaactcaaagtgccgctggtcgtcaatacggcggtcgggaaaaattggttagaggcgaaataa

SEQ ID NO: 73104 - protein, 254 aa, Unknown
  Obtained from environmental sample
  DOMAIN (1)...(253): DNA polymerase family A
  misc_feature (1)..(254): Xaa is any amino acid
MQNIPVRSEAGRKIRQAFIPEKEGNILLSADYSQIELRILAHYADEKNLHEAFAQGLDIHQSTAAKVFGVPLDSVTPEQRSQAKAVNFGIAYGMSARRLAQDVGIPQDEAQNFIDNYFATYPGIKNYIDTTIALAHKQGYVTTLFGRRRYFKEINMKNKRLAAMSERAAINMPIQGTSADFIKIAMIRIAQALQEQKLKAKMILQVHDELVFDLPEAEAYDLECLVKKIMTSVYELKVPLVVNTAVGKNWLEAK

SEQ ID NO: 73105 - DNA, 465 bp, Unknown
  Obtained from environmental sample
  misc_feature (1)..(465): n is a, c, g, or t
ttgcttatgagccagggcgatagtcgtgtcgatataatttttgatgcccggataggtggcaaaataattatcaataaaattttgcgcttcatcttgcgggatgccgacatcctgcgccagacgccgcgcggacataccgtaggctatgccgaaattcacggctttggcctgcgaacgctgttcgggcgttacgctgtccagaggcacgccgaacaccttggccgccgtggactgatgaatatccagcccttgagcaaaagcctcgtggagatttttttcatccgcataatgcgccagtatcctaagctcaatttgcgaataatccgcggaaagcaaaatattgccctctttttccggaataaaagcctgacggattttccgccccgcctcgctgcgcacgggaatattctgcaaattcggctcggagctggaccgacgtccggttgcggtaacggtctgatttga

SEQ ID NO: 73106 - protein, 154 aa, Unknown
  Obtained from environmental sample
  misc_feature (1)..(154): Xaa is any amino acid
MLMSQGDSRVDIIFDARIGGKIIINKILRFILRDADILRQTPRGHTVGYAEIHGFGLRTLFGRYAVQRHAEHLGRRGLMNIQPLSKSLVEIFFIRIMRQYPKLNLRIIRGKQNIALFFRNKSLTDFPPRLAAHGNILQIRLGAGPTSGCGNGLI

SEQ ID NO: 73107 - DNA, 447 bp, Unknown
  Obtained from environmental sample
  misc_feature (1)..(447): n is a, c, g, or t
ttggcgtttcttatgagcttgtgcgccgtacagcgcgcggacaagccaacaataagcgtgttctccgatttttccttgctcttgggattgatccggatgtcttggacttgccggagattttgcgggcagaagccaaaaacacgagggcggtgcgtgaatatgcttaaagatgcgtattctacacgtgaggcggcacggcttttaggtcttgctccaaaaaatgtccttattcgcgcanaacgcgaggggtggtctccgatagagcgggcaaaaaagcttggtggaacaatatggcctgtatcanacatgccgcaagaaacccggctggccattgagacggcggtcgtgcgtcaggccgtcgaacaggaaaaggctctggccccggcccccgtgcttgccccgctggctacgcccaccccgataccggcagctgatactcgaagataa

SEQ ID NO: 73108 - protein, 148 aa, Unknown
  Obtained from environmental sample
  misc_feature (1)..(148): Xaa is any amino acid
MAFLMSLCAVQRADKPTISVFSDFSLLLGLIRMSWTCRRFCGQKPKTRGRCVNMLKDAYSTREAARLLGLAPKNVLIRAXREGWSPIERAKKLGGTIWPVSXMPQETRLAIETAVVRQAVEQEKALAPAPVLAPLATPTPIPAADTRR

SEQ ID NO: 73109 - DNA, 711 bp, Unknown
  Obtained from environmental sample
  misc_feature (1)..(711): n is a, c, g, or t
atgatggccgaatactcgaaagttgacgcgaaacttgtcgagcattccggaaacatggctgcggcgaggcagtccgaagccgtagggattatcaagggaatgggattaacgcaggccgagacgctgattttcggcgacagcggtaagcccgaggaattcgacgggttgtatgtaaggcgtatcagcctgggcgatcctaacgtaattgacgcggggggaaccagtaccgatctggacatgacaagcatattccttgtcgcggtaggccccgatctgtttcatctgatttatccgaagggctcgaaaagcgtcggcgttacgcgcagggacatcgggcttaaggacatgccggacgaagaagacccgaaaaaaatgctgccgatgtatgtcgaatatttcgaggcgcagtacgggcttactatcaaagagcccgcggccgtgaaacgcatctgcaatatcccgaaggatatgaagcccgccgagcttgtagacctgattatcgactcaagctacgaactgccgcagggagcgtcaacttacgtcctttactgcaacaaaaccatactcgctaaaatcgacaaggcggcaagggataaggacaacgtcgcttacaccgcggcggatccgtggggcagacctatcacccatatacgcgacataagatgccgccgcatggatgtaatcacgtgcaacgaagaacaggtagcgtaa

SEQ ID NO: 73110 - protein, 236 aa, Unknown
  Obtained from environmental sample
  misc_feature (1)..(236): Xaa is any amino acid
MMAEYSKVDAKLVEHSGNMAAARQSEAVGIIKGMGLTQAETLIFGDSGKPEEFDGLYVRRISLGDPNVIDAGGTSTDLDMTSIFLVAVGPDLFHLIYPKGSKSVGVTRRDIGLKDMPDEEDPKKMLPMYVEYFEAQYGLTIKEPAAVKRICNIPKDMKPAELVDLIIDSSYELPQGASTYVLYCNKTILAKIDKAARDKDNVAYTAADPWGRPITHIRDIRCRRMDVITCNEEQVA

SEQ ID NO: 73111 - DNA, 495 bp, Unknown
  Obtained from environmental sample
  misc_feature (1)..(495): n is a, c, g, or t
atgacaagaataatcagaggtaaggaagtagcagcagaagaagaagaatcaaaaaatgattcaaggtttactaaagggctctattccccccggggcataggttgggaatcatatacaaaggaaaggctggaatcagaattgcaccgttgcgccgcgtcggaagaggatctggtttttgtagtaatgaagacaaggaatggtcaatttggagaagagacttttatcaagctggccggagagggagttaatttttttactgaacgggacatggtttttgaaaaaggcgaacaaggcttgagctttataatccccagcctcaaccttgatcaggggcttgtcaaatcagaacaattccgcagacgtattcaaaactccatgaaagacgcttcaggggcagcgccggatctctgcatcggcctgtcttccagggcaggaaggctggttgaagcagatcggctcatgattgaagcctccgaggccctttcaaggccctga

SEQ ID NO: 73112 - protein, 164 aa, Unknown
  Obtained from environmental sample
  misc_feature (1)..(164): Xaa is any amino acid
MTRIIRGKEVAAEEEESKNDSRFTKGLYSPRGIGWESYTKERLESELHRCAASEEDLVFVVMKTRNGQFGEETFIKLAGEGVNFFTERDMVFEKGEQGLSFIIPSLNLDQGLVKSEQFRRRIQNSMKDASGAAPDLCIGLSSRAGRLVEADRLMIEASEALSRP

SEQ ID NO: 73113 - DNA, 465 bp, Unknown
  Obtained from environmental sample
  misc_feature (1)..(465): n is a, c, g, or t
atgcagctgcttagcggcaacaaccgtatgaccgatatacacgcggctctgggtatgagtcaattatccagactggatttcttcaaacaacggcgcagaacaatagtcaatttatacaataaggcgtttcgggatagaccacacattacgattccctatgaaaaagaaaaccttgacagttgttttcatttatatgtattacaaattgattttgaaaagattggaaaaaccagagcgcaaattatggaagaattaacgcgaaaagggataggaacccaggtacactatattccggtaaacagccagccctactatgaaacacgatacggtaaatatcgtcctgatgaataccctgtcaccgacgcatactacaatagatgtttaactattcccttatatccaaaaatgtctgatgaagacgttgaatatgtgatacatgaaatttctgatatagcagttgcttaa

SEQ ID NO: 73114 - protein, 154 aa, Unknown
  Obtained from environmental sample
  DOMAIN (1)...(149): DegT/DnrJ/EryC1/StrS aminotransferase family
  misc_feature (1)..(154): Xaa is any amino acid
MQLLSGNNRMTDIHAALGMSQLSRLDFFKQRRRTIVNLYNKAFRDRPHITIPYEKENLDSCFHLYVLQIDFEKIGKTRAQIMEELTRKGIGTQVHYIPVNSQPYYETRYGKYRPDEYPVTDAYYNRCLTIPLYPKMSDEDVEYVIHEISDIAVA

SEQ ID NO: 73115 - DNA, 369 bp, Unknown
  Obtained from environmental sample
  misc_feature (1)..(369): n is a, c, g, or t
ttggccccagacagcaagggtgataacattcaaaaggaacaagagcctgcacggcctgagaactcactgaattccgtagccggtgggtctgatgttgctaatgaggtggaaaacaataaagtgcatatttgtgaaaatacacaagatgaagtcaagaagttctcagaacattttgataatatactgacaatggacagtgaaaaggaaggagctacaactatccttgaaataggttgtggagttggaaatactgtttttccaatacttcagtacaatgcaaacccagacttgtttgtattctgttgtgatttctcatccacagccatacagatacttcaggacaacgctgagtatgatcgaaaaaggtag

SEQ ID NO: 73116 - protein, 122 aa, Unknown
  Obtained from environmental sample
  misc_feature (1)..(122): Xaa is any amino acid
MAPDSKGDNIQKEQEPARPENSLNSVAGGSDVANEVENNKVHICENTQDEVKKFSEHFDNILTMDSEKEGATTILEIGCGVGNTVFPILQYNANPDLFVFCCDFSSTAIQILQDNAEYDRKR

SEQ ID NO: 73117 - DNA, 474 bp, Unknown
  Obtained from environmental sample
  misc_feature (1)..(474): n is a, c, g, or t
atgctgcgcctcatgctgccagagatcagggacatgcacctgcccgcagcgggggccttccacaacctagccatcatcagcatgaaaaaagagtacccaggccactgccaaaaagtgatgaacgcgatatggggcatgggacagatgatgctcacaaagtgcatagccatcgtagatgaggacatagacccccacaacgcgcaggatgtcctattccgcatcacgtccaacgttgacccagaaagggacttgctattcacaaaggggccactggacgcgctggatcacgccagcggcttcaattcattcggcagcaaggtgggcatagacgccacgcgcaaaaacaagccattcgacgactatgggaaaagtgggggaagcaacgggcgcgcctggcccaaagacttggcgcacacaagggaagtgttggaaaagatagagtctaggtgggaagaatacggtttgggcgtctag

SEQ ID NO: 73118 - protein, 157 aa, Unknown
  Obtained from environmental sample
  misc_feature (1)..(157): Xaa is any amino acid
MLRLMLPEIRDMHLPAAGAFHNLAIISMKKEYPGHCQKVMNAIWGMGQMMLTKCIAIVDEDIDPHNAQDVLFRITSNVDPERDLLFTKGPLDALDHASGFNSFGSKVGIDATRKNKPFDDYGKSGGSNGRAWPKDLAHTREVLEKIESRWEEYGLGV

SEQ ID NO: 73119 - DNA, 474 bp, Unknown
  Obtained from environmental sample
  misc_feature (1)..(474): n is a, c, g, or t
gtggctaattttggtatttataaattaaaagtaatagtcgaatacaataaaatgaaggaatatgcccgttcatttggtacgctaattagatatttagggtttaactcatgcataattgatgtcaaacatgcagaacgttttgaagggaaaagttcatatacatttgcaaagttgttccgattaggaattgatacaattctttctactaccgataagcctctaaaattaactgtaaaattgggatttattatatcaatatgttcgtttatattagcgttgtataatgtaattgctaaactgataggaattattcaaatcactggctttaccacaaccgttttttctatatggtttgttggtggggtaattctttttgtattgggaattttgggcttatatattgagcgaatttttacccaggttaagggacgtcagttgtttattgtgaaagataaggttaatgttaatgaataa

SEQ ID NO: 73120 - protein, 157 aa, Unknown
  Obtained from environmental sample
  misc_feature (1)..(157): Xaa is any amino acid
MANFGIYKLKVIVEYNKMKEYARSFGTLIRYLGFNSCIIDVKHAERFEGKSSYTFAKLFRLGIDTILSTTDKPLKLTVKLGFIISICSFILALYNVIAKLIGIIQITGFTTTVFSIWFVGGVILFVLGILGLYIERIFTQVKGRQLFIVKDKVNVNE

SEQ ID NO: 73121 - DNA, 645 bp, Unknown
  Obtained from environmental sample
  misc_feature (1)..(645): n is a, c, g, or t
ttgtctcttgcgaaaggactgatacttggaaatatagcaaaaaatgttcttttgcttaccgcagaaacgtacaccaaaaggctacatatgagggataaaggcaaccggacgatttttggtgatggcgctgccgccgcactaataagcgccgaagggtttgcagaaatcggagttttttgtttgggtactgacggttccggcgctgaacatctgataatgaagaccggggcggctcgcaatcctgaaaaagccaacaaggttgaatttgatgagaataataatccggtatcacctgattatatttatatgaatggaagtgagatattttcgtttacactggaagctgttcctgaattggtaaaaaaaacactgaaaaaaaacgacatacaaaaagacgctattgatttattcatttttcatcaagctaataaatatatgcttgatttcttaaagaagaaactaaaaatagaagaaaaaaagttttatatctatttatcggaagtaggtaataccgtgtcttcaacaattcctattgcaatatgcgaggcattaaaggatggaagtatgcaaaataatatggacattcttttggcaggttttggtgttggcctttcttgggctggatgtgtattaaagtttttatag

SEQ ID NO: 73122 - protein, 214 aa, Unknown
  Obtained from environmental sample
  DOMAIN (1)...(65): 3-Oxoacyl-[acyl-carrier-protein (ACP)] synthase III
  misc_feature (1)..(214): Xaa is any amino acid
MSLAKGLILGNIAKNVLLLTAETYTKRLHMRDKGNRTIFGDGAAAALISAEGFAEIGVFCLGTDGSGAEHLIMKTGAARNPEKANKVEFDENNNPVSPDYIYMNGSEIFSFTLEAVPELVKKTLKKNDIQKDAIDLFIFHQANKYMLDFLKKKLKIEEKKFYIYLSEVGNTVSSTIPIAICEALKDGSMQNNMDILLAGFGVGLSWAGCVLKFL

SEQ ID NO: 73123 - DNA, 348 bp, Unknown
  Obtained from environmental sample
  misc_feature (1)..(348): n is a, c, g, or t
atggatattatcaagaaaatcgaacgggaacagatgcgtttcgacattccggcctttcgttcgggcgataccgtcaaggtacacctgcgcatcgtggaaggagaaaaagagcgcgtgcaggtttttcagggcaacgtcatccgcatcaagcgcggcgcgaccaacgccacctttaccgtgcgcaagatgtccgacggcgtgggcgttgaacgtatttttcccctgcattccccctttatcgaacgcgtggaactggtgagcgaaggccatgtgcgccgcagccgtctgtattacctgcgtgaccgtaagggcaagtccgcgagaatcaagcccaaaaaccgctattga

SEQ ID NO: 73124 - protein, 115 aa, Unknown
  Obtained from environmental sample
  DOMAIN (1)...(113): Ribosomal protein L19
  misc_feature (1)..(115): Xaa is any amino acid
MDIIKKIEREQMRFDIPAFRSGDTVKVHLRIVEGEKERVQVFQGNVIRIKRGATNATFTVRKMSDGVGVERIFPLHSPFIERVELVSEGHVRRSRLYYLRDRKGKSARIKPKNRY

SEQ ID NO: 73125 - DNA, 444 bp, Unknown
  Obtained from environmental sample
  misc_feature (1)..(444): n is a, c, g, or t
ttgggaattacccacacagtaaaagagcgggaattggagcaacgtttagttgaaaaaatcaaactgtttttgctcgaattgggcgacggttttacatttatcggcaatcaacatcgcttaaccctcaatcaaaaggaatattttgtagatctattattcttcaaccgcaaaatcaaatcccttatagcaatagacttaaaaattggtgcttttcaacccgaatttgtaggaaaaatgaatcattatttgggacttttagacgatcaaatgaaaatgccagacgaaaacccctctatcggcattattctatgtgccgataaagatcggattgatgtagaggtagccttgcgtgattttttcaaaccaatcggtgttgccgaatataaaaccgtatttcccgaaaaagaaataaagtctttaatcaacagagaattgagcgaataa

SEQ ID NO: 73126 - protein, 147 aa, Unknown
  Obtained from environmental sample
  DOMAIN (2)...(144): Protein of unknown function (DUF1016)
  misc_feature (1)..(147): Xaa is any amino acid
MGITHTVKERELEQRLVEKIKLFLLELGDGFTFIGNQHRLTLNQKEYFVDLLFFNRKIKSLIAIDLKIGAFQPEFVGKMNHYLGLLDDQMKMPDENPSIGIILCADKDRIDVEVALRDFFKPIGVAEYKTVFPEKEIKSLINRELSE

SEQ ID NO: 73127 - DNA, 804 bp, Unknown
  Obtained from environmental sample
  misc_feature (1)..(804): n is a, c, g, or t
ttgaccatgctacgccgggcgngtttttatgccagcgacacatcgcgcaacaactactatgccattgcttcacaaatggcggctaccggttttgaattcttttccggcagcggattcctgaaacccgacgcacagcagcctaccgtcttcgagcaattggcaaaagcgggttacagtattgttcgcggcgccgaaggagcggcgcaagtgaacacatccgctactaaaaccgtcctcctgcaagccgaaggcaagccggcagacgccttgccttatgccattgaccgcaagagcgacgatctgacattagcacagattacgcaagctgctatcagtgcgctgcaaaacaagaagggattttttgccatgattgaaggcgggaaaattgactgggctgcacatagcaacgacggcgccaccgtgattcacgaagtgattgacttttcggacgccattaaaatagcattggaattttacaaaaaataccctgccgaaacgttaattgtagtaacagccgaccacgaaacaggcggcctgtcgattggcgcacaaggcaagtatgcgttttacccgctgacgttcgacgagcaaacacattcattgccggattattcaaacaaagaggagcgcgacctgattcgcagcctcaacgaaaaagcgctctgtggctggacgtcgaaatctcatacaggagtgatggtgccagtgttcgccattggagcaggcagcgaacggtttagcggcaaaatggacaacaccgatattcccaaacgcattgcatcgttgatgggagttgatctgtaa

SEQ ID NO: 73128 - protein, 267 aa, Unknown
  Obtained from environmental sample
  DOMAIN (5)...(200): Alkaline phosphatase
  misc_feature (1)..(267): Xaa is any amino acid
MTMLRRAXFYASDTSRNNYYAIASQMAATGFEFFSGSGFLKPDAQQPTVFEQLAKAGYSIVRGAEGAAQVNTSATKTVLLQAEGKPADALPYAIDRKSDDLTLAQITQAAISALQNKKGFFAMIEGGKIDWAAHSNDGATVIHEVIDFSDAIKIALEFYKKYPAETLIVVTADHETGGLSIGAQGKYAFYPLTFDEQTHSLPDYSNKEERDLIRSLNEKALCGWTSKSHTGVMVPVFAIGAGSERFSGKMDNTDIPKRIASLMGVDL

SEQ ID NO: 73129 - DNA, 765 bp, Unknown
  Obtained from environmental sample
  misc_feature (1)..(765): n is a, c, g, or t
atgtccaaaaagactatagtttntgcggtgcattctgtcgggctggggcatgcggcgcgctgtattccttacataaaagtttgtctggagcgcggccatgaagtgcatgttatcgggcatggccgttccctggctctcttgcgcaacactttgaccggccaggttaagcatttttttgatttgccggattatagttttacgcgggcttatgcgcgccgctcttttagtgtgtggcggtttttgctgctggttttgtcgccgcggatttaccgggaatttgcggctgagcgccgcgcttttctggcgctggataagcaatatcattatgacctcgttttttcggatacccgttatggcatctataaagagacggttccgtcttttttgtttctttatatggcttatgttcccttgccgggacgctggttagatttctttaatcgtttattcagtgcgctttacaataaaatgattttgcgcaattatcaaaaatatttttttaacgactatgcagcggaagcccaatcgttgaccgggaaaatcttgcatgatttgaccgtgctggagcggcacaaaatagtttatttaggtccgatttcccggtttcgtcccgcagccccagcccgtaagccggatattgcccagttgattatgatctccggaccggaaatgcagcgcactgtttttgaagaagtaatccggcggcagctcgatggtctgccgggaaagacagtggggtttaggaaaaccgagagctgtcgataa

SEQ ID NO: 73130 - protein, 254 aa, Unknown
  Obtained from environmental sample
  misc_feature (1)..(254): Xaa is any amino acid
MSKKTIVXAVHSVGLGHAARCIPYIKVCLERGHEVHVIGHGRSLALLRNTLTGQVKHFFDLPDYSFTRAYARRSFSVWRFLLLVLSPRIYREFAAERRAFLALDKQYHYDLVFSDTRYGIYKETVPSFLFLYMAYVPLPGRWLDFFNRLFSALYNKMILRNYQKYFFNDYAAEAQSLTGKILHDLTVLERHKIVYLGPISRFRPAAPARKPDIAQLIMISGPEMQRTVFEEVIRRQLDGLPGKTVGFRKTESCR

SEQ ID NO: 73131 - DNA, 573 bp, Unknown
  Obtained from environmental sample
  misc_feature (1)..(573): n is a, c, g, or t
atggctttcggaccggtaactgtaggcccgatgggacatcggcagctcaagaactattccgtaatcggcgatatagtaaatctagcctcccgtttagaaaagctgaccagagtttatcatgcttccattctccttaatgcggatttgtatgcccgggttgatccgggtaaattttatttgcgccgccttgaccgcatttatcctaaaggtatgaatgattggacggaaatttacgaagagtttagctccaataatccgaaagtccgcgagataaaatcagccttattagacaccatatgtgaatttcaagaaatgtatttttatccgggcggcatctatttcccggaggctttaaagctgtataattccatagaagaaagcttaaccgtcatggctgaccaatatgaagtgagcacaattagacctgtggataagctgccgcggccgattgatcatctgccgcggttattaaaaagaaggatgatttatcttaccagcactccggagttaaaagaacaatggaatggtatctggcgctatacggatgaagcagcggagactcgccagccttaa

SEQ ID NO: 73132 - protein, 190 aa, Unknown
  Obtained from environmental sample
  misc_feature (1)..(190): Xaa is any amino acid
MAFGPVTVGPMGHRQLKNYSVIGDIVNLASRLEKLTRVYHASILLNADLYARVDPGKFYLRRLDRIYPKGMNDWTEIYEEFSSNNPKVREIKSALLDTICEFQEMYFYPGGIYFPEALKLYNSIEESLTVMADQYEVSTIRPVDKLPRPIDHLPRLLKRRMIYLTSTPELKEQWNGIWRYTDEAAETRQP

SEQ ID NO: 73133 - DNA, 630 bp, Unknown
  Obtained from environmental sample
  misc_feature (1)..(630): n is a, c, g, or t
ttgctgagagcggcgaatcccgcctgtctgctgctgctggaaaaggacggctattgggctgcggaacgccaaaaagcgggtgacgggcaagtggtgctgatggacgcgatgcgtttcgcctggagccggatcacgcctgaacggccatggaaaattatcggcaacctgccgtacaatgtggcctcccccctgctgtgggacgtcgcgtcgcaggctacgggcctgcaacgcgcggtgtgcatggtgcaaaaggaggtggccctgcggatcgtcgcctctcccgatacgaaaaattacggcgcgctttcggtatggctacagagtttcctgcagccgcgactcgtctttaccgtgggcgcgggagcttttaccccggcacccaaggtggattcggcggttgtggcctttgtgccgcttcccccggcggagcgcgcgcgacagcccgagtcgctcgcggctctgctgaaaatatgttttcaaaaccggcgcaaacaactgcggagcatattccggatgcataacaaagacgccgcattgcccgtcctgcggacactcgacatagacccgcgccaacgccccgaacatcttgcgccgaaactttttcaggaactttccgcatgtctgtattga

SEQ ID NO: 73134 - protein, 209 aa, Unknown
  Obtained from environmental sample
  DOMAIN (2)...(206): Ribosomal RNA adenine dimethylase
  misc_feature (1)..(209): Xaa is any amino acid
MLRAANPACLLLLEKDGYWAAERQKAGDGQVVLMDAMRFAWSRITPERPWKIIGNLPYNVASPLLWDVASQATGLQRAVCMVQKEVALRIVASPDTKNYGALSVWLQSFLQPRLVFTVGAGAFTPAPKVDSAVVAFVPLPPAERARQPESLAALLKICFQNRRKQLRSIFRMHNKDAALPVLRTLDIDPRQRPEHLAPKLFQELSACLY

SEQ ID NO: 73135 - DNA, 630 bp, Unknown
  Obtained from environmental sample
  misc_feature (1)..(630): n is a, c, g, or t
atggacgttgtgaggcagaattacaaccacccgtcgatcatcacctggacgcccttcaacgaatcctggggcgtgccgaagatcaagacggataaggcgcagcagagttttaccgaatcaatttacaatcttaccaaatcatacgataaataccggcccgtagtttgcaatgacggctgggagcataccgtttccgatataatcaccctccacgattatgaggagaagggggaggatttcagtgagcgctacggagagaagcttcaggatatactggataacctgctctatcataatcttttcaaatccgctttcgctgacggttatggttatcagggccagccgataattctcagcgaattcgggggcatagcgtttaacaaccgcggtgaaggctggggttacggaaacaaggtgggcaacagggaagattacatcaaacgattcgattccattaccacggcgattaaaaaaatcggcgatatccgcgggttctgctatacccaggttacggacgttcagcaggagataaacggcatcatggatatggatcggaatttcaaggtggagcctgagattctgaaagaaataaacgaacggaaagtcggcaatttatcccgtcagaagtga

SEQ ID NO: 73136 - protein, 209 aa, Unknown
  Obtained from environmental sample
  misc_feature (1)..(209): Xaa is any amino acid
MDVVRQNYNHPSIITWTPFNESWGVPKIKTDKAQQSFTESIYNLTKSYDKYRPVVCNDGWEHTVSDIITLHDYEEKGEDFSERYGEKLQDILDNLLYHNLFKSAFADGYGYQGQPIILSEFGGIAFNNRGEGWGYGNKVGNREDYIKRFDSITTAIKKIGDIRGFCYTQVTDVQQEINGIMDMDRNFKVEPEILKEINERKVGNLSRQK

SEQ ID NO: 73137 - DNA, 612 bp, Unknown
  Obtained from environmental sample
  misc_feature (1)..(612): n is a, c, g, or t
gtgccggtgccggtggtacccctaccgcaaccgccagttgtactgctaccgcagccgccagttgtactcctaccgcaaccgtcagtgccaccaccgccaatacagaatagcagatatatcattgcagacggtgtattgtcttcagaaagtatagttaggtacattcaatccaaaaattttggtgttttaactccatacaggatagaaaccattgtcaacacctacattgttgaagctcggaaggaaggtgtaaaccatgatatagccatagcccagatgtgcgaaggaacaaattttctgaccaaccggaacagtttaaatacaaataattatggtgatcttcataatattaagcggccaaaagagaaggccgctttcccgtcaatggagctcggaatcagggttcatatacagcaattaaaatactatgcgagcccaacgggtctaaggtatccaccggttgatcaggcgcgtttaaaaagagttgaaaagaatcgcggaaaatatcgaactctggatcaattatttcctgtttgggtaacgaaagatcttaataagtacagaaataccatcaacaatattctaaacgaaatgtatggttttcagggttaa

SEQ ID NO: 73138 - protein, 203 aa, Unknown
  Obtained from environmental sample
  misc_feature (1)..(203): Xaa is any amino acid
MPVPVVPLPQPPVVLLPQPPVVLLPQPSVPPPPIQNSRYIIADGVLSSESIVRYIQSKNFGVLTPYRIETIVNTYIVEARKEGVNHDIAIAQMCEGTNFLTNRNSLNTNNYGDLHNIKRPKEKAAFPSMELGIRVHIQQLKYYASPTGLRYPPVDQARLKRVEKNRGKYRTLDQLFPVWVTKDLNKYRNTINNILNEMYGFQG

SEQ ID NO: 73139 - DNA, 831 bp, Unknown
  Obtained from environmental sample
  misc_feature (1)..(831): n is a, c, g, or t
atgactaatgccgcttccggttctcagatgctaacggtgcatgaggcccaacggcaggcagccgagactgtcaaacaagctctaatgggtgcccctaatccgatttgtgaaattacaaatcatttagcgggtgctcaaggcaaaggcgtacgaactttattactgctttataccgcaatggactctgaaggtcttgtaccggctgacgctgtaaaggcggcagccgccgttgaactgttccacatggcgactttagtacatgatgatgtgattgataacgctccgttacgccggggaatacctacagtacagtacaagttcggcagaaagcacgctgtaatttgcggcgactatctgctgtgccttgcggcttcacttgcagtaccgctgcacaacgattatcaggaacataccggtattcttcaggcttttacttccgctctcagccgtatctgcatgggtgaactgcgccaattatgcaataaccgtaatatagagcttgagattcccggttatctgcgtattattgcggaaaaaacggcggcgcttttttatgtcgctgctttcgcgggcgctttaatagcccgttataaccgtgatgaaacgatgcgtcttgccagatttggccggtattttggaatggtctttcaaattgtagatgactgcaaagattatgagattagcgaggatgaggcgctgaaaactgtcggaaaggatatttccgaaggtgtggttacactgcctctgatttacgccttcagaagttcaccggaattgcgtaaaatggcaaaagaagctttcgatgacgctgccctggctcggccgatctga

SEQ ID NO: 73140 - protein, 276 aa, Unknown
  Obtained from environmental sample
  DOMAIN (34)...(274): Polyprenyl synthetase
  misc_feature (1)..(276): Xaa is any amino acid
MTNAASGSQMLTVHEAQRQAAETVKQALMGAPNPICEITNHLAGAQGKGVRTLLLLYTAMDSEGLVPADAVKAAAAVELFHMATLVHDDVIDNAPLRRGIPTVQYKFGRKHAVICGDYLLCLAASLAVPLHNDYQEHTGILQAFTSALSRICMGELRQLCNNRNIELEIPGYLRIIAEKTAALFYVAAFAGALIARYNRDETMRLARFGRYFGMVFQIVDDCKDYEISEDEALKTVGKDISEGVVTLPLIYAFRSSPELRKMAKEAFDDAALARPI

SEQ ID NO: 73141 - DNA, 360 bp, Unknown
  Obtained from environmental sample
  misc_feature (1)..(360): n is a, c, g, or t
atgaggtatttgattgatacgaatatatttctttttgctatgcgagaaagagataaacttcataaagatgttttggatataattaccgattatgagaataaaatttacattagttccgaaagcataaaggaaattattttgttgttgcgagcagggaaaattgaaaaacctacgtggaaggcaacagaggatatttttgcacttgggagaatagagcctattccaggccataaagatccatttgaccacgcgataattgcacatgcaatagctaataagataaccctgataagttccgataccaagatgcagaattacggtaatcagggattgagattcatttggaataaatataagtag

SEQ ID NO: 73142 - protein, 119 aa, Unknown
  Obtained from environmental sample
  DOMAIN (3)...(114): PIN domain
  misc_feature (1)..(119): Xaa is any amino acid
MRYLIDTNIFLFAMRERDKLHKDVLDIITDYENKIYISSESIKEIILLLRAGKIEKPTWKATEDIFALGRIEPIPGHKDPFDHAIIAHAIANKITLISSDTKMQNYGNQGLRFIWNKYK

SEQ ID NO: 73143 - DNA, 597 bp, Unknown
  Obtained from environmental sample
  misc_feature (1)..(597): n is a, c, g, or t
atggaagcaattaccgaacatcctccgtgttcgtgtcaggcaaggatgtttatgtgtctggcactgaatatgctgaaaaagaatcagccatactctggaaaaacggccaaaagactatccttggcaaaggacgggccaactccgtattcgtcaagtaagccacatccacaaggaaaccctcaaatgaaactcattacccagatacccccacctctagcaataatgcttctcttgacggcctgcggcccgaaagtcgaaagcgtggccttggacaagtccgccctcacgcttgcagtcggcgacagtgaaaccctgatggcaataatccagccccacaacgcccacgaccaagccgtgacatggaagattgacaatcccgacatagcaaaaatatcccctgatggcactgtcgccgccaagtcgctgggcagggccacagtcacagtcaccacgagggacggcggcaagactgccacctgcgctatcacaacaatagccaatgtgtcattagaccaaaagacattttctatgcacgtaggcggcacccaaacgcttcttgcttcaccaaccccgcaaacgccatcgaggacgggctaa

SEQ ID NO: 73144 - protein, 198 aa, Unknown
  Obtained from environmental sample
  DOMAIN (84)...(162): Bacterial Ig-like domain (group 2)
  misc_feature (1)..(198): Xaa is any amino acid
MEAITEHPPCSCQARMFMCLALNMLKKNQPYSGKTAKRLSLAKDGPTPYSSSKPHPQGNPQMKLITQIPPPLAIMLLLTACGPKVESVALDKSALTLAVGDSETLMAIIQPHNAHDQAVTWKIDNPDIAKISPDGTVAAKSLGRATVTVTTRDGGKTATCAITTIANVSLDQKTFSMHVGGTQTLLASPTPQTPSRTG

SEQ ID NO: 73145 - DNA, 348 bp, Unknown
  Obtained from environmental sample
  misc_feature (1)..(348): n is a, c, g, or t
gtgcgcgcgccgcttgcgccgaattcgttcgccccgcgcgtcttattccgctcatatatgagcgaaatttgcatatatttgttgattatggcgcatatattagcgattaagaaagacctgtcccggcgtgtccggcttcggcggcgcgagggcaaaatggcgcaggcggaattggccaggcgctccggcgtgtctctgtcatccgtacggcggtttgaaagcacgggggagatatcgctggccagccttttgcgtattgccgcggtgctgggctgcgaaacggatttcaatttgctgttcgcgcgcaggaattatcaatcgctggacgagataatcaatgcaaaataa

SEQ ID NO: 73146 - protein, 115 aa, Unknown
  Obtained from environmental sample
  DOMAIN (44)...(97): Helix-turn-helix
  misc_feature (1)..(115): Xaa is any amino acid
MRAPLAPNSFAPRVLFRSYMSEICIYLLIMAHILAIKKDLSRRVRLRRREGKMAQAELARRSGVSLSSVRRFESTGEISLASLLRIAAVLGCETDFNLLFARRNYQSLDEIINAK

SEQ ID NO: 73147 - DNA, 729 bp, Unknown
  Obtained from environmental sample
  misc_feature (1)..(729): n is a, c, g, or t
ttgattctgattgccgccgccgcaggacggaatgcggcaaacgcactgaaccgtgtgatagacgcggatatcgacggaaaaaatccgcgaaccgcgaatcgccatttgcctaaaggactgctttccaaaaaaaccctgctccttttcagcttgattatgatcatcattttgatcgtcgcggcggctatgcttaatccgctgtgcgtactactcctgccccttgccggtattttgatcggcggatattcctacagtaaacgttttacatggctctgccattactggctgggaatcgcctgcgccattgcccccatgggcgcgtttatcggtttatctgggcacttcgctttccgttactttgttttagcggcggcgcacacgctttgggtagccggttttgacatcatctacgctcaactggacattgaatttgatctcagcgaagacctttattcaattccttctagttttggttatggcataagccgtgtctttgcggcgctttcacatctgggaactttgctggcatggttcttaataccgctgttctggtctctttctatctggtactatgcttttgcaggtctcgccgccgcgcttctcattgcggagcatattgtcgcactgggaaacagcgaacggcatatcaaaattgccagctattcgataaatgaaatagtacccattgtgatccttgcaggaacagcggtgggcgtatatattaaatga

SEQ ID NO: 73148 - protein, 242 aa, Unknown
  Obtained from environmental sample
  DOMAIN (1)...(240): UbiA prenyltransferase family
  misc_feature (1)..(242): Xaa is any amino acid
MILIAAAAGRNAANALNRVIDADIDGKNPRTANRHLPKGLLSKKTLLLFSLIMIIILIVAAAMLNPLCVLLLPLAGILIGGYSYSKRFTWLCHYWLGIACAIAPMGAFIGLSGHFAFRYFVLAAAHTLWVAGFDIIYAQLDIEFDLSEDLYSIPSSFGYGISRVFAALSHLGTLLAWFLIPLFWSLSIWYYAFAGLAAALLIAEHIVALGNSERHIKIASYSINEIVPIVILAGTAVGVYIK

SEQ ID NO: 73149 - DNA, 525 bp, Unknown
  Obtained from environmental sample
  misc_feature (1)..(525): n is a, c, g, or t
ttggccgagcggcggattcgcgacgacggtgctcatcgacacctcgcacctcgcccgcttccgcgaagccatcgacaccgtccgctcagacgtgcgcattcgcttccagggcgtgcccaccggcctgcactccacgtcggccctcgaccctggcactctgcccggacgcctcgactacgcgaacggcccgttcgagggatggttgcgcgaacatctcgccgaacaattcgcctacgtgtgcgtcgaccaggccgcgtcgttaagccagtactccaaggcgctcacccgcagcgggcaactgtcctccggggcgcgcggagcccacggcgggcatgggcgagccaatgtcctcggcttcaccaacgaccgacgcctcaaagatctcgaccggcagatcgacgtcgcccgcgaacgcctccgtctcgccagcgaagccctgcgcggggccgaactcgcccagcaggctgcgcaagagcaggccgccgccgcgcgcgtcatcaccgagatgacctggaccgacgttga

SEQ ID NO: 73150 - protein, 174 aa, Unknown
  Obtained from environmental sample
  misc_feature (1)..(174): Xaa is any amino acid
MAERRIRDDGAHRHLAPRPLPRSHRHRPLRRAHSLPGRAHRPALHVGPRPWHSARTPRLRERPVRGMVARTSRRTIRLRVRRPGRVVKPVLQGAHPQRATVLRGARSPRRAWASQCPRLHQRPTPQRSRPADRRRPRTPPSRQRSPARGRTRPAGCARAGRRRARHHRDDLDRR

SEQ ID NO: 73151 - DNA, 318 bp, Unknown
  Obtained from environmental sample
  misc_feature (1)..(318): n is a, c, g, or t
ttgattttggcagagggccgtttgctcaatttgggttgcgcaacagggcatcccagctttgttatgagcgcgagcttcaccaatcagacaatagctcaaatagatttgtggctaaatgctcagggcaaaaaaaccgtcagcggtttaaaataccaaaacggttctgtttataccctgccaaaaatcttggacgaaaaggttgcccgcctgcacttggataaactcggcgttgagcttaccaagctgaccaaagagcaagcgagctacataggcgttgacgtaaacgggccttacaagacggatatttataggtactag

SEQ ID NO: 73152 - protein, 105 aa, Unknown
  Obtained from environmental sample
  SIGNAL (1)...(23)
  DOMAIN (1)...(104): S-adenosyl-L-homocysteine hydrolase
  misc_feature (1)..(105): Xaa is any amino acid
MILAEGRLLNLGCATGHPSFVMSASFTNQTIAQIDLWLNAQGKKTVSGLKYQNGSVYTLPKILDEKVARLHLDKLGVELTKLTKEQASYIGVDVNGPYKTDIYRY

SEQ ID NO: 73153 - DNA, 402 bp, Unknown
  Obtained from environmental sample
  misc_feature (1)..(402): n is a, c, g, or t
ttgttcgctttaggcggaatatctcgcttaggggtattcaataaactttcccctctggaactcatttccgtgccaataaaccccgaatttgcaagccatgcagatagcgcctctctagactccatagcaaacgacagcgtatcaaccgataacggcgattttgcaagcaataaaaaagaaaagaaacccaaaaagaaagctccggcctttcctctttccataaacaccgccagcaaggaggatttgtgctttataaagggcgttggtccttcgctcgctcaaaagatagtggagcatagagagacaaaaggctccttccgctctggaaaagacttggaaaaagtttctggcattggagccaaaaagagaatggctatagaggaatttgtgaaattcgactag

SEQ ID NO: 73154 - protein, 133 aa, Unknown
  Obtained from environmental sample
  DOMAIN (70)...(99): Helix-hairpin-helix motif
  misc_feature (1)..(133): Xaa is any amino acid
MFALGGISRLGVFNKLSPLELISVPINPEFASHADSASLDSIANDSVSTDNGDFASNKKEKKPKKKAPAFPLSINTASKEDLCFIKGVGPSLAQKIVEHRETKGSFRSGKDLEKVSGIGAKKRMAIEEFVKFD

SEQ ID NO: 73155 - DNA, 717 bp, Unknown
  Obtained from environmental sample
  misc_feature (1)..(717): n is a, c, g, or t
ttggtaggtggtcgtctgcgaggcgatggtcccggccatggcgtggaaggaggcgatgctgaagctccacatgccggtggtcttgtactgcaagaaggctatggccaggatgcccaccagcatcaggacgccgccggtcagggtgtacaggaacagctttatggcggcgtacatcttctgcgggccgccccagatggctatcaggaagtacatcgggaccagcattatttcccagaacaggtagaacaggaacatgtcctggcagatgaacacgccaagcatggtgaactgcatgaccaagagccagatgtagaactccttgaagcgctcggctatggccgtgaacgagcaccagaccactatcacgcctatcagggtggtcaaaaggaacagaaccaggcttatgccgtccatgcctatgctgaacctgacgcccagcgagggtatccagtccagccacgtaacccactgcacggccgccgtgctgcggtcgtactggaaccacaatgggacgctgaggccgaagtcaatgagcgccaccacaagcgcgcccagctcgaacacgcggcgcttggtgccgggcacgaaaagcaacagcagggcgccgacaagcggcacggccgtgacccagagggggaggttgttgaaccaggggatactggggggcatcagggactccaatggacgtcttgggaggggtgctacgtaactaaatga

SEQ ID NO: 73156 - protein, 238 aa, Unknown
  Obtained from environmental sample
  misc_feature (1)..(238): Xaa is any amino acid
MVGGRLRGDGPGHGVEGGDAEAPHAGGLVLQEGYGQDAHQHQDAAGQGVQEQLYGGVHLLRAAPDGYQEVHRDQHYFPEQVEQEHVLADEHAKHGELHDQEPDVELLEALGYGRERAPDHYHAYQGGQKEQNQAYAVHAYAEPDAQRGYPVQPRNPLHGRRAAVVLEPQWDAEAEVNERHHKRAQLEHAALGAGHEKQQQGADKRHGRDPEGEVVEPGDTGGHQGLQWTSWEGCYVTK

SEQ ID NO: 73157 - DNA, 399 bp, Unknown
  Obtained from environmental sample
  misc_feature (1)..(399): n is a, c, g, or t
gtgatgcctgggatgccagcggccgggtgtaggggaccagcaccagccgccggaccccgagctgctgcgccagcacggccacgcgcggcaggcagtcgtgggtcttgccgccgtagtgatagccatcggccgcgaacagcaccgcaggctggatctgcccgaagcgctccagcaccgccggtgtgccgaagtccggcgagcaggaggaccagatcgccccgaggctggcgcaggccagcatcgcgatcaccgcctctggcacattgggcaggtagcctgcgacccggtccccggcccccacgccgcaggcccgcaaccccgccgccacgcgtgccacctcggatcgcagcgccccgtacgagcactcgcgctgctcaccgcgctcgttgcggaagatga

SEQ ID NO: 73158 - protein, 132 aa, Unknown
  Obtained from environmental sample
  SIGNAL (1)...(22)
  misc_feature (1)..(132): Xaa is any amino acid
MMPGMPAAGCRGPAPAAGPRAAAPARPRAAGSRGSCRRSDSHRPRTAPQAGSARSAPAPPVCRSPASRRTRSPRGWRRPASRSPPLAHWAGSLRPGPRPPRRRPATPPPRVPPRIAAPRTSTRAAHRARCGR

SEQ ID NO: 73159 - DNA, 585 bp, Unknown
  Obtained from environmental sample
  misc_feature (1)..(585): n is a, c, g, or t
atggaaacaagtctgggagttggaattgggagacctcgtaagtatggtgacccctgtgttgttcaaggatgcagaggagtttacggaagagcgcaagggcacggaatgtgcgccaaacactaccagcggttcagaaagtatggaactaccgatgaactcccccacggtaaccgtagatacattcagggtaaagacttctgcgctacctacgggtgtccctccgtgccctcgtgtaggaacctgtgccagtcgtgctatgctaaatggcttcgagacacaggtagggttaaaaaacttacccctgaacaagaaagagacagacagctttggtctaggtacagaatcagactggaagactacaataacttacttgctcaacaacaaggagtttgtgcagtatgccgagaagcgcctgaaagaattggaaatggcgcaggatgggacgggaaactcatcgttgaccacgaccataatactggaagagtcagaggacttctctgtaactcctgcaatctcatggtcgggtacgggaaacgccccgaattacttgccgaagctgcccggtatttggcagagaggtcttga

SEQ ID NO: 73160 - protein, 194 aa, Unknown
  Obtained from environmental sample
  DOMAIN (106)...(192): Recombination endonuclease VII
  misc_feature (1)..(194): Xaa is any amino acid
METSLGVGIGRPRKYGDPCVVQGCRGVYGRAQGHGMCAKHYQRFRKYGTTDELPHGNRRYIQGKDFCATYGCPSVPSCRNLCQSCYAKWLRDTGRVKKLTPEQERDRQLWSRYRIRLEDYNNLLAQQQGVCAVCREAPERIGNGAGWDGKLIVDHDHNTGRVRGLLCNSCNLMVGYGKRPELLAEAARYLAERS

SEQ ID NO: 73161 - DNA, 408 bp, Unknown
  Obtained from environmental sample
  misc_feature (1)..(408): n is a, c, g, or t
gtgaagtttctgagcgagcacaaggaaataacggtgattcctgtgaatggctcaatgaaagcgatcaaccagcgcaaatatcacaaccgccgttcagaagcttacggcaggctttccgaacattttgacaagttgcgctttcttacgggtggagtcaaacaaaacgacttggaggatatttgcagacaactggagagcataaaaatcagttacgacagggatatgcgaataactgttttgcccaaatcggagataaaggaagaaataggcgaaagcccggacttggctgatgcgctcgcatacagctttatggtatcgcacgagcacggccaaacgccggaggctcataaagcaaagatgctggagatacggagaatacaaatgagctcaaacccttacaggcggtaa

SEQ ID NO: 73162 - protein, 135 aa, Unknown
  Obtained from environmental sample
  misc_feature (1)..(135): Xaa is any amino acid
MKFLSEHKEITVIPVNGSMKAINQRKYHNRRSEAYGRLSEHFDKLRFLTGGVKQNDLEDICRQLESIKISYDRDMRITVLPKSEIKEEIGESPDLADALAYSFMVSHEHGQTPEAHKAKMLEIRRIQMSSNPYRR

SEQ ID NO: 73163 - DNA, 372 bp, Unknown
  Obtained from environmental sample
  misc_feature (1)..(372): n is a, c, g, or t
atggactgcttcggcatccaaagggcgggaattgatctgatgcggcgcggggatatataccttgttgaccttgatccaactgaagggcacgaacagcggggcacgcgtcctgttctggtggtttcgcccgatgaattcaatgcagtgacccaagtgccgattgtcgtgcctgtgaccaccggcggcaattttgcccgtacagcgggttttgccgtgtcccttgaagacgcgggcatccgcacacgcggcgttgtgcgttgtgatcagcctcgtgccctggacgtgaaggccaggaacggaaaatatctggagcgcgtcccccccgccatcgtggaggaagtttttgccaggttggcgcctatttttttgtag

SEQ ID NO: 73164 - protein, 123 aa, Unknown
  Obtained from environmental sample
  DOMAIN (15)...(123): PemK-like protein
  misc_feature (1)..(123): Xaa is any amino acid
MDCFGIQRAGIDLMRRGDIYLVDLDPTEGHEQRGTRPVLVVSPDEFNAVTQVPIVVPVTTGGNFARTAGFAVSLEDAGIRTRGVVRCDQPRALDVKARNGKYLERVPPAIVEEVFARLAPIFL

SEQ ID NO: 73165 - DNA, 621 bp, Unknown
  Obtained from environmental sample
  misc_feature (1)..(621): n is a, c, g, or t
ttgcggctgtggaaccatgcggccaacttcgtcacaaaggccgccagcgagggcaagacgttcatgttcgtcggcaccaagccccaggcgcaggacctgatggccgagcaggcgcagcgctgcggagccttctacgtcaacaaccggtggctgggcggcatgttgaccaacttctccaccatcaaaaagagtctcgacaagctcaaggaaatcgaggccatactggccgaccccgcgcgcacatcgcagttggcaaaaaaagagatactctcgctaaaccgcgccaagtcgaagctggaggcttccttcgtcggcatacgcgacatgcgccaggtcccggacgtcctgttcgtgatagaccccaaccacgaggacatcgccgtatctgaggcgcacaagctgggcatcaagatagtggcggtggtcgacaccaactgcaaccccgacaagatcgactacgtggtgccgggcaacgacgacgccatcaagtccatcctgctgttctccgagcgcttcgccgactctgtcctggagggccgccagtccttcgctgaccagagggagaacgaacagatgaaggcgatgatggccgaaaaggtcaacgagggcgcacaaaactag

SEQ ID NO: 73166 - protein, 206 aa, Unknown
  Obtained from environmental sample
  DOMAIN (1)...(180): Ribosomal protein S2
  misc_feature (1)..(206): Xaa is any amino acid
MRLWNHAANFVTKAASEGKTFMFVGTKPQAQDLMAEQAQRCGAFYVNNRWLGGMLTNFSTIKKSLDKLKEIEAILADPARTSQLAKKEILSLNRAKSKLEASFVGIRDMRQVPDVLFVIDPNHEDIAVSEAHKLGIKIVAVVDTNCNPDKIDYVVPGNDDAIKSILLFSERFADSVLEGRQSFADQRENEQMKAMMAEKVNEGAQN

SEQ ID NO: 73167 - DNA, 486 bp, Unknown
  Obtained from environmental sample
  misc_feature (1)..(486): n is a, c, g, or t
atgtctttaaaagagaaaactggacaatctatccagttgaaaaataaatcgttgaaaaattttattttgacgacgtttctttcaattggaattgctataatattgtccaaattatcggatttaattgtttttgtctttccaacactcaaaccggattacgcctacgcttcgcaatattcggttatcgttaccttggtatgctttgcgttgttgccggcaatctacgaagagcttattttcagaaagcttattttgcaatttttgcggaatcgaatccatgatgtggcggcgatactgctgacatcgctcctatttgcggtatttcacttgaatattctgcaagggatcacggcgtttgttttcggaatctttttagcctctgttgcgataaggacaggttcgatatttttatgcatatacgcccattttcttaataatttgttctttcttctgtgcttgcggtcggccttaaatacagacaattaa

SEQ ID NO: 73168 - protein, 161 aa, Unknown
  Obtained from environmental sample
  DOMAIN (63)...(153): CAAX amino terminal protease family
  misc_feature (1)..(161): Xaa is any amino acid
MSLKEKTGQSIQLKNKSLKNFILTTFLSIGIAIILSKLSDLIVFVFPTLKPDYAYASQYSVIVTLVCFALLPAIYEELIFRKLILQFLRNRIHDVAAILLTSLLFAVFHLNILQGITAFVFGIFLASVAIRTGSIFLCIYAHFLNNLFFLLCLRSALNTDN

SEQ ID NO: 73169 - DNA, 507 bp, Unknown
  Obtained from environmental sample
  misc_feature (1)..(507): n is a, c, g, or t
gtgccctacatagtcggcgtcggtcgggccgcggaactggccctggccaacctggccgatgaaaacacccgggtgcgggctctccgggacaagctggaaaaagggctgacctcggccatcagccacacccgcttaaacggcggcggggcggaacgggtgcccaacaccaccaacatcagttttgaatatgtggaaggcgaggccatacttttgcatctggccggtcagggcctctgtgcctcttcgggctcggcctgcacttccggctccctggagccctcccatgtacttcgggccatgggcgtccccttcaccgcggcccatggctccatccgcctgtccctctccgtccacaacacggaagcggaggtggaccgggcgcttcgtattttcccgcccatcatcgccaagctccgggccatgtcgcccttctggaagggcgacggcccggcccccggaagcctactgacctgtgacaccggggcctgccaagtctgcgatgcctaa

SEQ ID NO: 73170 - protein, 168 aa, Unknown
  Obtained from environmental sample
  misc_feature (1)..(168): Xaa is any amino acid
MPYIVGVGRAAELALANLADENTRVRALRDKLEKGLTSAISHTRLNGGGAERVPNTTNISFEYVEGEAILLHLAGQGLCASSGSACTSGSLEPSHVLRAMGVPFTAAHGSIRLSLSVHNTEAEVDRALRIFPPIIAKLRAMSPFWKGDGPAPGSLLTCDTGACQVCDA

SEQ ID NO: 73171 - DNA, 819 bp, Unknown
  Obtained from environmental sample
  misc_feature (1)..(819): n is a, c, g, or t
gtgttcatcggccgggcggtcgaacgtggaggcgataacctccccatccacggaacgcgaaatatccgttacctcctcagggcgctcgtcgatcaggagcgccatcagaatgacgtcggggcagttggcggagatggcgccagcgatgcgcttcaaaagcgtcgttttgccggccttgggcggggagacgatcagggcgcgctgtcccaacccaatgggagcgaacatatccaccagtctcgtcgccagttctttggtctctgtctcaaggttcattttcatgttggggaaaatgggcgtgagttgcccgaattgagcgcgccgacgggaatgctcggggtcggagaagttgaccgtctccacacgcagcaaagcttcgtaatgctcctgatcgcgcggcgggcgaatgagtccccagatgacgtccccgttgcgcaggccgaaacgccgaatctgcgatacggagagatagacgtcgctgtccgtgggcaacatccccttggggcgcaaaaagccaaatccctcgggcagtatttcgagcgtaccgcccccgaatttgtagttcatgctctcggcctgggccttcagaacggcaaaaatgaggtcgtccttgcgaagggccgccgcgccggaaacacccagctcttttcctatcttacaaagttccatccgggtctgagccgcaagatatccataggagtgtttgggaattggaggagagtaaatttcctgctggggaacggtttccgttacctggacgggtggcgtgggttcttccgcggagatgggttctttttccggagaaggcggtttcaatag

SEQ ID NO: 73172 - protein, 272 aa, Unknown
  Obtained from environmental sample
  misc_feature (1)..(272): Xaa is any amino acid
MFIGRAVERGGDNLPIHGTRNIRYLLRALVDQERHQNDVGAVGGDGASDALQKRRFAGLGRGDDQGALSQPNGSEHIHQSRRQFFGLCLKVHFHVGENGRELPELSAPTGMLGVGEVDRLHTQQSFVMLLIARRANESPDDVPVAQAETPNLRYGEIDVAVRGQHPLGAQKAKSLGQYFERTAPEFVVHALGLGLQNGKNEVVLAKGRRAGNTQLFSYLTKFHPGLSRKISIGVFGNWRRVNFLLGNGFRYLDGWRGFFRGDGFFFRRRRFQ

SEQ ID NO: 73173 - DNA, 882 bp, Unknown
  Obtained from environmental sample
  misc_feature (1)..(882): n is a, c, g, or t
ttgaaaccgccttctccggaaaaagaacccatctccgcggaagaacccacgccacccgtccaggtaacggaaaccgttccccagcaggaaatttactctcctccaattcccaaacactcctatggatatcttgcggctcagacccggatggaactttgtaagataggaaaagagctgggtgtttccggcgcggcggcccttcgcaaggacgacctcatttttgccgttctgaaggcccaggccgagagcatgaactacaaattcgggggcggtacgctcgaaatactgcccgagggatttggctttttgcgccccaaggggatgttgcccacggacagcgacgtctatctctccgtatcgcagattcggcgtttcggcctgcgcaacggggacgtcatctggggactcattcgcccgccgcgcgatcaggagcattacgaagctttgctgcgtgtggagacggtcaacttctccgaccccgagcattcccgtcggcgcgctcaattcgggcaactcacgcccattttccccaacatgaaaatgaaccttgagacagagaccaaagaactggcgacgagactggtggatatgttcgctcccattgggttgggacagcgcgccctgatcgtctccccgcccaaggccggcaaaacgacgcttttgaagcgcatcgctggcgccatctccgccaactgccccgacgtcattctgatggcgctcctgatcgacgagcgccctgaggaggtaacggatatttcgcgttccgtggatggggaggttatcgcctccacgttcgaccgcccggccgatgaacacatccgcgttgccagcctggctttggaaaggccaaacgtttggcggaagccaagcgcgacgtcgtga

SEQ ID NO: 73174 - protein, 293 aa, Unknown
  Obtained from environmental sample
  DOMAIN (190)...(292): ATP synthase alpha/beta family, nucleotide-binding domain
  misc_feature (1)..(293): Xaa is any amino acid
MKPPSPEKEPISAEEPTPPVQVTETVPQQEIYSPPIPKHSYGYLAAQTRMELCKIGKELGVSGAAALRKDDLIFAVLKAQAESMNYKFGGGTLEILPEGFGFLRPKGMLPTDSDVYLSVSQIRRFGLRNGDVIWGLIRPPRDQEHYEALLRVETVNFSDPEHSRRRAQFGQLTPIFPNMKMNLETETKELATRLVDMFAPIGLGQRALIVSPPKAGKTTLLKRIAGAISANCPDVILMALLIDERPEEVTDISRSVDGEVIASTFDRPADEHIRVASLALERPNVWRKPSATS

SEQ ID NO: 73175 - DNA, 840 bp, Unknown
  Obtained from environmental sample
  misc_feature (1)..(840): n is a, c, g, or t
gtgcttcctgcgctgttgctcatggtgttcgcgcccgccctcatgggtcagtcgaatggcgtgggcggcgaggcacaggcacaacccgcgcaggtttcccaaccgtctgtttcgctggcttcggtggcccgcctcgcccaactgcccgtgcagcacgatgggcgtgccatgccgtttgacacctacgccagggaaatggtcaaaaccataaccggcgcgagatgttggcagggcgaagacgcagtggccaccgtcctgcggtggataaacaaccccgaagaagccgaaaacgccgccctcatcaaaatcggctccacggatttggccgtttcgatgggctatcccgcctccacaaaacacgcgccctatgcccagttgggccagaaccccctgtttttgcagcagttcctcaattgccagcaactccaaatgaacggaatgccaatcggcaaggttggaaaggccgtgcttggtcttggggagcgcctgaatgcgatgaagggcatactccacggggacaccattcgccccataccggtccctggggagccaaacgccacttggaacgcgccagaagtcatctcggaggcgtcgctctcaaggttgatggacggcccgcgcctgcaggggtggccaagcccgcagaaaatcagcagcgagattctatacaacaacctcaacccggtgcgcttctcttggataatcatgctctgctcgctcgccctttcggtattggcttggataaagaagcggcgctggatggacatggcggcgtttgcgacgctgctctgcggtttctgtatgatgagttggggcatcattctctcgtgccgattctga

SEQ ID NO: 73176 - protein, 279 aa, Unknown
  Obtained from environmental sample
  SIGNAL (1)...(27)
  misc_feature (1)..(279): Xaa is any amino acid
MLPALLLMVFAPALMGQSNGVGGEAQAQPAQVSQPSVSLASVARLAQLPVQHDGRAMPFDTYAREMVKTITGARCWQGEDAVATVLRWINNPEEAENAALIKIGSTDLAVSMGYPASTKHAPYAQLGQNPLFLQQFLNCQQLQMNGMPIGKVGKAVLGLGERLNAMKGILHGDTIRPIPVPGEPNATWNAPEVISEASLSRLMDGPRLQGWPSPQKISSEILYNNLNPVRFSWIIMLCSLALSVLAWIKKRRWMDMAAFATLLCGFCMMSWGIILSCRF

SEQ ID NO: 73177 - DNA, 681 bp, Unknown
  Obtained from environmental sample
  misc_feature (1)..(681): n is a, c, g, or t
ttggtcagaattcggcacgagaccatggaagaactcatggaaaagttttccccggagccggaattctatctcaattccgtgtatcccaagatgcaggagttgcagcgttcgatcgacaacgccgatgcgcacagggaaaagggcgaaaccttcgccgccgaatacgaatacggtacggcgctgaaggtggatgaggaaaatgtgcgcgccaacttcggcatcggcctcacctatctgcagcgcggggaaaacaacaaggccgacgatatttttgaacgtctcgtcaagcttgacgccgccttcgaacccgagcacaagcacatgttcaatgatttcggcatcaacctgcgcaaggcgaaaatgtacgatcaagccgtcacctattacagccgggccttggagatgaccacggacgacgagaatttgcacgtcaatgtcgcccgcgccatgctcgaaatcaagaatattgacggttgcgtggaacatctgctcaaggccctggaactcgcccccgggcaggagcaggcggtaaaattcctgaattggcttatggaaaaacggctcgttccggggcctgccgtggaccaggtgcgccaagcgcttgcgcaggctcctgccccggcggcccgggcagccccggcgccgagtccgtccgaaggacagacatccgccggcgcgtag

SEQ ID NO: 73178 - protein, 226 aa, Unknown
  Obtained from environmental sample
  misc_feature (1)..(226): Xaa is any amino acid
MVRIRHETMEELMEKFSPEPEFYLNSVYPKMQELQRSIDNADAHREKGETFAAEYEYGTALKVDEENVRANFGIGLTYLQRGENNKADDIFERLVKLDAAFEPEHKHMFNDFGINLRKAKMYDQAVTYYSRALEMTTDDENLHVNVARAMLEIKNIDGCVEHLLKALELAPGQEQAVKFLNWLMEKRLVPGPAVDQVRQALAQAPAPAARAAPAPSPSEGQTSAGA

SEQ ID NO: 73179 - DNA, 483 bp, Unknown
  Obtained from environmental sample
  misc_feature (1)..(483): n is a, c, g, or t
ttgcgtggaacatctgctcaaggccctggaactcgcccccgggcaggagcaggcggtaaaattcctgaattggcttatggaaaaacggctcgttccggggcctgccgtggaccaggtgcgccaagcgcttgcgcaggctcctgccccggcggcccgggcagccccggcgccgagtccgtccgaaggacagacatccgccggcgcgtagcgggattgtcgatgaaaatctggcgttcccgtcctcttccccttggcgtctccccattgccaagctgggctgaacgcctcaatatttcgccgtttttgctggatattctcgtcaggcgcggactcggcagtccggaagagatagatgcctttctctctcccggcctgcgccggctcgcgccgccggaagactgggccggcgtggaacacagcgcccgggacgctgcgggaaggactcctcgccggcnagcaattcgcggtgtggggcgactatga

SEQ ID NO: 73180 - protein, 160 aa, Unknown
  Obtained from environmental sample
  misc_feature (1)..(160): Xaa is any amino acid
MRGTSAQGPGTRPRAGAGGKIPELAYGKTARSGACRGPGAPSACAGSCPGGPGSPGAESVRRTDIRRRVAGLSMKIWRSRPLPLGVSPLPSWAERLNISPFLLDILVRRGLGSPEEIDAFLSPGLRRLAPPEDWAGVEHSARDAAGRTPRRXAIRGVGRL

SEQ ID NO: 73181 - DNA, 459 bp, Unknown
  Obtained from environmental sample
  misc_feature (1)..(459): n is a, c, g, or t
gtgggtcgctattgcaggtatggccagcgccgcgatagccgaccaaccgatactgtcgtcgatcctcggcggcgtatacgtcatcgtcgagggcatagtcgatgccgtcagccgcaaggccacgagcaaatgactctgcgcgaaaagcaaagcctgttcatcaggatggtcgggcaactcatagccttcgcctacgcaaacggctacgaactcaccggcggcgacctatggtcgtcgccggactaccggactaaaagcggcgccacgccgcacaaggccaacagcctgcactacgatcgcctcgcaatcgacctaaacctctacaaaaacggactctatttagcgaatacggaagaccacaaacccctcggcgaatactgggagagcataggcggcgcctggggcggcaggttcaaagacggaaaccactactccctggcccacgacgggcgcaaataa

SEQ ID NO: 73182 - protein, 152 aa, Unknown
  Obtained from environmental sample
  misc_feature (1)..(152): Xaa is any amino acid
MGRYCRYGQRRDSRPTDTVVDPRRRIRHRRGHSRCRQPQGHEQMTLREKQSLFIRMVGQLIAFAYANGYELTGGDLWSSPDYRTKSGATPHKANSLHYDRLAIDLNLYKNGLYLANTEDHKPLGEYWESIGGAWGGRFKDGNHYSLAHDGRK

SEQ ID NO: 73183 - DNA, 600 bp, Unknown
  Obtained from environmental sample
  misc_feature (1)..(600): n is a, c, g, or t
gtgggtcatcgcgcgcagcaaacggcctgctgccagtgtagctattgcaccgagttatgcccgcggcatcttctggggcacgcgatcgagccgcataagatcatgcgccagatcaacctgggattgaacgttccgcctgagatcatcaagggtgcgctgctctgcagtgagtgcggggcgtgcgaggctgtgtcctgcaccatggggctttcgccgcggttgatgaaccgctatatcaaacagagcctgcgcgaagcggggtataaaggcgattttaccgggcagaaagccgttgccgacgagatgtgggcataccgcaagatcccgacggaaagggtgatcaaccggcttgggctctccaaatacgatacgcacccctcgcggctggtggaggatctcacttcgaaacgggtggagatcgcgctccggcagcatatcggcgcgcccgcccaggcgcgtgtccgtgtgggggacgcggttaaacgcggagaggtcgtgggcgatattccggcgggcgctatgggggcgcgtgttcatgccagtatcgacggagaggtagcgtttgtggatgcggagcgcgtcatcatccaggcaaaatag

SEQ ID NO: 73184 - protein, 199 aa, Unknown
  Obtained from environmental sample
  misc_feature (1)..(199): Xaa is any amino acid
MGHRAQQTACCQCSYCTELCPRHLLGHAIEPHKIMRQINLGLNVPPEIIKGALLCSECGACEAVSCTMGLSPRLMNRYIKQSLREAGYKGDFTGQKAVADEMWAYRKIPTERVINRLGLSKYDTHPSRLVEDLTSKRVEIALRQHIGAPAQARVRVGDAVKRGEVVGDIPAGAMGARVHASIDGEVAFVDAERVIIQAK

SEQ ID NO: 73185 - DNA, 876 bp, Unknown
  Obtained from environmental sample
  misc_feature (1)..(876): n is a, c, g, or t
gtggttttgactccgcattttgctatatctacggttcaaagcgtttcatataggattgtaacggggtctgcacttgccgatgtcagcgggaggactttgacggttcgttcaaatgcgagtatcgggggaactattgttgttgaggcggcggctgacggggtgcgctcctttaataccttgacttttgcggttgttgaaacggctgttgaatcggttagggttcttaatacacagacctctattaatcaaggggggtctttgaagttggagacccttgttttgcctgataatgctacttttaagagtttgaattttaggattgttgaggggttggagtatgcaactgtaactcctgacggaactgttagggttaacggcaatttgccggcgggggatttaagtataaccgttcgggcaacaagtttgggcgacagtgctaagttcgatgttaagaagtttatgctccatgttcctgcgcgaagtcttaccttgacggcaagcactctttcgccttgtctgggcgactttgttacgtttactaatgctgtggattctgcggcctcggcggcggttgtgcagtatgttgttataagcggctcggcttttgttgagagtatcaacgggaatgtccttaaggtctgcggcaatataaccgcggcaaaccctcagattgttttgcgcagcagccgcgacaatattcagtctaatacggtcacattgaatgtttatgtgccgacaaaaactattcgggttgcggcagagaaacaaattataaagcagggcgaaacattgaaacttgccgccgttacaatccnngcgatgcagcgaggacgagccttnaatggattgttgaaacgaaacctatgcaacccttga

SEQ ID NO: 73186 - protein, 291 aa, Unknown
  Obtained from environmental sample
  DOMAIN (68)...(150): Bacterial Ig-like domain (group 2)
  misc_feature (1)..(291): Xaa is any amino acid
MVLTPHFAISTVQSVSYRIVTGSALADVSGRTLTVRSNASIGGTIVVEAAADGVRSFNTLTFAVVETAVESVRVLNTQTSINQGGSLKLETLVLPDNATFKSLNFRIVEGLEYATVTPDGTVRVNGNLPAGDLSITVRATSLGDSAKFDVKKFMLHVPARSLTLTASTLSPCLGDFVTFTNAVDSAASAAVVQYVVISGSAFVESINGNVLKVCGNITAANPQIVLRSSRDNIQSNTVTLNVYVPTKTIRVAAEKQIIKQGETLKLAAVTIXAMQRGRAXNGLLKRNLCNP

SEQ ID NO: 73187 - DNA, 552 bp, Unknown
  Obtained from environmental sample
  misc_feature (1)..(552): n is a, c, g, or t
gtgcagaacgcgctgtgcgccatcgggctgtgccttcnctgcgggctggaactggatgccattgcccgcgccctgtgccaactgccnccggtcaagggacgcatggagcgggttcccgtcccggccgagtttaccgtcctcatcgactacgcccacactcccgacgcgctggaaaatgccctctcgaccgccaaacaggcttgccgaggccggttgattgccgtcttcggctgcgggggcgaccgtgaccgcaccaagcggcccctcatggggagagccgtctccggcatcgccgacatcgccgtcgtgaccagcgacaacccgcgcaccgaacggcccgagcgcatcatcgaggacaccctgtccggcatggagggcaacccgttggtgaccgtcgaccgcaaggaggccattttccgggccctgggcctggccaaaccgggggatgtggttgtcctgtgcggcaagggccacgaggactacatcgaagccaacggcgaaaaacgccactttgacgaacgggaagcggtggcggagtattttttcaactga

SEQ ID NO: 73188 - protein, 183 aa, Unknown
  Obtained from environmental sample
  DOMAIN (31)...(117): Mur ligase family, glutamate ligase domain
  misc_feature (1)..(183): Xaa is any amino acid
MQNALCAIGLCLXCGLELDAIARALCQLPPVKGRMERVPVPAEFTVLIDYAHTPDALENALSTAKQACRGRLIAVFGCGGDRDRTKRPLMGRAVSGIADIAVVTSDNPRTERPERIIEDTLSGMEGNPLVTVDRKEAIFRALGLAKPGDVVVLCGKGHEDYIEANGEKRHFDEREAVAEYFFN

SEQ ID NO: 73189 - DNA, 873 bp, Unknown
  Obtained from environmental sample
  misc_feature (1)..(873): n is a, c, g, or t
atggtcagaatggccgaggtcgccgaggtgcgcgacagcgaaaagcgcgtggtcaggagccacgagcctacgaccgtgcggcaggtcatttccgaggataccagccgcaaaatgcgggaatacctggaatcgtgcgtcaacctgggtaccggctccaacgcctacgtcaagggttacagggtggccggaaaaacaggcacctcccagaagcgggacatccccgaagccaacgacaacggctggtatgtggtgagctttatgggcttcgccccggccgatgacccgcagatcgccgttttggtgacgctggatcagcccggcggcccccgcatgttccgcaccggggggttcatggccgccccggtggccgggcgcatcttcgccgatgccctgccctacctgggcataaaaccccagtacaccgagggggagacggccgatgtgagtgtccccttcgtgagcaaggacaaacccctttccgaagccaaaagcgaagccgagaaggccgggatggccgtccgggtggaggggaacggggacacggtcaaagaccagatcccgctggccgggagcctggttcccaagggaaccgagctggtgctgtacaccgaggggcgcaggcccgaggaggacgtttccgtccccgacgtggccgggatgaccccgacccaggcccatgaggccattgccgccgccgggctggtcatacggcccatcggcgcacaggcggcctccggcgaaacgctgacctccacctggcaggagtacgagccggggatgcaggtgccttacggtcaggtgatccangtggaattccgcaaccagaacgtgggcgatgactcggtgcaggtccgaaaccccaacagcgcgtag

SEQ ID NO: 73190 - protein, 290 aa, Unknown
  Obtained from environmental sample
  DOMAIN (148)...(205): PASTA domain
  misc_feature (1)..(290): Xaa is any amino acid
MVRMAEVAEVRDSEKRVVRSHEPTTVRQVISEDTSRKMREYLESCVNLGTGSNAYVKGYRVAGKTGTSQKRDIPEANDNGWYVVSFMGFAPADDPQIAVLVTLDQPGGPRMFRTGGFMAAPVAGRIFADALPYLGIKPQYTEGETADVSVPFVSKDKPLSEAKSEAEKAGMAVRVEGNGDTVKDQIPLAGSLVPKGTELVLYTEGRRPEEDVSVPDVAGMTPTQAHEAIAAAGLVIRPIGAQAASGETLTSTWQEYEPGMQVPYGQVIXVEFRNQNVGDDSVQVRNPNSA

SEQ ID NO: 73191 - DNA, 672 bp, Unknown
  Obtained from environmental sample
  misc_feature (1)..(672): n is a, c, g, or t
ttgcttacgaaaactgtaaaattccagccagactttgactctttaaaaacctatgaatgtccctcctggtttcgggatgcaaaacttggtttttggagccattggggcccccagtgcgttcccatggccggggactggtatgccaggaatatgtatattcagggacaacctcaatatttgtaccacctgcggcattacggtcacccttcaaaattcgggtataaggacattgtgaaactctggaaagcggaaaaatttgatcctgaagggcttatggagctttttgtcaaagcgggcgcaaggtactttgtagcccaggccatgcatcacgatcatttctttaattatccttcaacattaaaccgttttaattcggttcaagtaggcccccaaaaggatattatcgggctctggaaaagagcagcggacaggcacggtctgccgtttggtttttcagaacatttaggagcgactttttcctggtgggccgtgaacaaggnggcagatacttatggcccgtatgccggcgttccctatgacggcaatgatcctgcgtaccgggatttttacatggataattacgaagatatggccaaggatggcgatcgcacccgcttaacctgctggtatacgggcaattctgaccaccataaatattgggctttcggttaa

SEQ ID NO: 73192 - protein, 223 aa, Unknown
  Obtained from environmental sample
  misc_feature (1)..(223): Xaa is any amino acid
MLTKTVKFQPDFDSLKTYECPSWFRDAKLGFWSHWGPQCVPMAGDWYARNMYIQGQPQYLYHLRHYGHPSKFGYKDIVKLWKAEKFDPEGLMELFVKAGARYFVAQAMHHDHFFNYPSTLNRFNSVQVGPQKDIIGLWKRAADRHGLPFGFSEHLGATFSWWAVNKXADTYGPYAGVPYDGNDPAYRDFYMDNYEDMAKDGDRTRLTCWYTGNSDHHKYWAFG

SEQ ID NO: 73193 - DNA, 387 bp, Unknown
  Obtained from environmental sample
  misc_feature (1)..(387): n is a, c, g, or t
atggataaaaatcaaaaaaaaattctaattgtagatgatcaagaagaaaatttattttttttagatagttattttaaggataaagttggttttattactgaaaaagcaataaacgctgtcgaagcactaaaaaaacttgatacttttattcctgatattattttacttgataatatcatgccccacatgtcagggcacgaactagtcaagttattaaaggataatgaaaaacatagaaaaattcctattattatgttctcagccaatagtaatatcgaagaacaagtagcatgtttgagccttggtattgaagattacattgttaaaccgattaatttatctaatcttcgggaacgagtaatggccgttgtgaatagaggagtttaa

SEQ ID NO: 73194 - protein, 128 aa, Unknown
  Obtained from environmental sample
  DOMAIN (6)...(121): Response regulator receiver domain
  misc_feature (1)..(128): Xaa is any amino acid
MDKNQKKILIVDDQEENLFFLDSYFKDKVGFITEKAINAVEALKKLDTFIPDIILLDNIMPHMSGHELVKLLKDNEKHRKIPIIMFSANSNIEEQVACLSLGIEDYIVKPINLSNLRERVMAVVNRGV

SEQ ID NO: 73195 - DNA, 705 bp, Unknown
  Obtained from environmental sample
  misc_feature (1)..(705): n is a, c, g, or t
ttgtattttaaatacctgaaagtgaaggcggatgagcccgcctggcctgaacgcgacaggttcatcctttccaaagggcacgcggcggcgggtttcataccggtattggcgaaaaaggggtactttccggaagaagaattaaaatcgtttaaccatttcggctccccgtttgccatgcacccggacagcaataaggttctaggctgcgacgcttcggcgggttcccttggccatggccttgcgatggctgtaggcatggggcttggtgcgcgttaccaaaaaaagggctttaagaccgtttgccttcttggggacggcgaatgttgcgaaggcagcgtgtgggaagccgcaatggcaatggcgcattttaagctgggcaatgtaattacgattgttgacaggaaccggcttatgatagacggcccgaccgaggatataatgcgtttggaaccattcgccgacaagtggcgttcgtttggttttgaggtggttgaggttgatggccatagctttgccgggcttgcgggagcatttgaccgcgcttgggcggcaaccgacagacccgtgctggttttagccaacaccgtcaaaggcaagggcgttgattttatggaaaataacgtgaaatggcattacggcagcggggactctgagttatgcgaaaaggcgaaggcttcaattatgaagggggcgcagaatggctaa

SEQ ID NO: 73196 - protein, 234 aa, Unknown
  Obtained from environmental sample
  DOMAIN (49)...(193): Thiamine pyrophosphate enzyme, C-terminal TPP binding domain
  misc_feature (1)..(234): Xaa is any amino acid
MYFKYLKVKADEPAWPERDRFILSKGHAAAGFIPVLAKKGYFPEEELKSFNHFGSPFAMHPDSNKVLGCDASAGSLGHGLAMAVGMGLGARYQKKGFKTVCLLGDGECCEGSVWEAAMAMAHFKLGNVITIVDRNRLMIDGPTEDIMRLEPFADKWRSFGFEVVEVDGHSFAGLAGAFDRAWAATDRPVLVLANTVKGKGVDFMENNVKWHYGSGDSELCEKAKASIMKGAQNG

SEQ ID NO: 73197 - DNA, 447 bp, Unknown
  Obtained from environmental sample
  misc_feature (1)..(447): n is a, c, g, or t
ttgcctattttccttgactatgtaaaatatttcccagatggctcaaccgcgccaaatatgttgtttcaggcatcatttattttggaagccaaaggcgagttgaaacaagctcttgagcttcgccaaactttggtaaaaaaatatccaaatcacaccttggcttctggcgcatggcttcgcataggcgaatattattacaagaattcaaattgggtggatgccataaaatcttacgaaaaaatcacgaatatttccacggacaatgacagaggaaagaaagaagccgcttatgctcaataccatttggcggaatgttattacaatctgggagattacaaaaaagccactaaagaattccgagcatatatagatggcgcaaacaacggcaaatacataaaagatatgataaatgaagctaaagctgctatagctagcatgggaaattaa

SEQ ID NO: 73198 - protein, 148 aa, Unknown
  Obtained from environmental sample
  misc_feature (1)..(148): Xaa is any amino acid
MPIFLDYVKYFPDGSTAPNMLFQASFILEAKGELKQALELRQTLVKKYPNHTLASGAWLRIGEYYYKNSNWVDAIKSYEKITNISTDNDRGKKEAAYAQYHLAECYYNLGDYKKATKEFRAYIDGANNGKYIKDMINEAKAAIASMGN

SEQ ID NO: 73199 - DNA, 750 bp, Unknown
  Obtained from environmental sample
  misc_feature (1)..(750): n is a, c, g, or t
gtggagattgacaaacatgggcggcatattgcgtaccatgtggaagaatgggatggcgaaaaattatcattttcaagaattccagtaactggcaaacattcagggcggcaaatttcgtggatgatttacggcggcgaaaaactgttaaatgaagtccgcggcataccattactcgcaagtgttttatatatgttaaaagaccttgacagatataaaaacgccgaaatccgcgccgcggttataaattctttgttaccgttatttataaaaaagaatgtacccggagcgcccggttctaatcctgtttggaatatgggcaagtccgcgcctatggaggtattacaaggccctagcaatacaaccgcaaaagttgcgccgccgcaagaaaatgaaattaaccaaaaggtcgcgcaaatactacccggctcggttcttgaccgccttgcgccgggcgaggagcctgtaagttttaacacgcaacgccccaacgttaatttcggaaaatttgaagatataatcgtttcggcaatatgctggtcaaacgaaataccgcccgaaatggttttgttaaggtttggtacaagttttaacgccgcccgtcaagcggataatgaattcaaaataacgctaaaatacaggactttcaaaaatgcaaaagacatggggcaacttattttacaagaatttataatacaatccgttttattatgcgagctttctttaccgcgttttaagcctgttattttttga

SEQ ID NO: 73200 - protein, 249 aa, Unknown
  Obtained from environmental sample
  misc_feature (1)..(249): Xaa is any amino acid
MEIDKHGRHIAYHVEEWDGEKLSFSRIPVTGKHSGRQISWMIYGGEKLLNEVRGIPLLASVLYMLKDLDRYKNAEIRAAVINSLLPLFIKKNVPGAPGSNPVWNMGKSAPMEVLQGPSNTTAKVAPPQENEINQKVAQILPGSVLDRLAPGEEPVSFNTQRPNVNFGKFEDIIVSAICWSNEIPPEMVLLRFGTSFNAARQADNEFKITLKYRTFKNAKDMGQLILQEFIIQSVLLCELSLPRFKPVIF

SEQ ID NO: 73201 - DNA, 387 bp, Unknown
  Obtained from environmental sample
  misc_feature (1)..(387): n is a, c, g, or t
gtgacaagggcgaccccggggttcccggcgcaaagggtgacaagggcgaccccggtgatcccggggcaaaaggtgacaagggcgaccccggtgatcccggcgcaaaaggtgacaagggcgaccccggtgatcccggcgcaaaaggtgacaagggcgaccccggtgatcccggcgcaaaaggtgacaagggcgaccccggtgatcccggcgcgaaaggtgacaagggcgaccccggtgatcccggcgcgaaaggtgacaagggcgaccccggtgatcccggcgcaaaaggtgacaagggcgaccccggtgatcccggcgcgaaaggtgacaagggcgaccccggtgatcccggcgcaaaaggtgacaagggcgatactccaactatag

SEQ ID NO: 73202 - protein, 128 aa, Unknown
  Obtained from environmental sample
  misc_feature (1)..(128): Xaa is any amino acid
MTRATPGFPAQRVTRATPVIPGQKVTRATPVIPAQKVTRATPVIPAQKVTRATPVIPAQKVTRATPVIPARKVTRATPVIPARKVTRATPVIPAQKVTRATPVIPARKVTRATPVIPAQKVTRAILQL

SEQ ID NO: 73203 - DNA, 864 bp, Unknown
  Obtained from environmental sample
  misc_feature (1)..(864): n is a, c, g, or t
atgctgattcgtctgtggttagataaagtgcaggataaagcgaatttccgctccatgctgaccagtcaacaggatgaaaacgacaatccggttcctgatgccttgcaggtcacagatgaagaatatgaacgctggcagaaagagattggtgaaattacgctgcccgatcatgtatttgagctgatttttatgctgcgccagcaactggataaattaccggatgcgccttatgtctcggatcgtcgctggaaaaaagcgatccgattattgcaggccagcgccttttttagcggtcgcagtgctgttgccccggtagatctcattttgctgaaagattgcctgtggtatgacgcgcaaagcctgaatttgatacaacaacaaattgatgtattgatgaccggtcacgcctggcaacagcaagggatgttgactcgccttggcgcgattgtgcaacgtcacctgcaactccagcagcaacaaagcgataaaacagccttaacggtaattcgtctgggcggcattttcagccgtcgtcagcagtatcaacttcctgttaacgttactgcttccactctgactctactgctgcaaaaaccgttaaaactgcatgatatggaagtggttcatatctcctttgagcgtagcgcgctggaacagtggctgagcaaaggtggtgaaattcgcggtaaactgaacggtatcggctttgcccagaaactgaatctggaagttgatagcgcccaacatcttgtcgttcgcgatgtaagtttacaaggcagtacgctggcacttcccggttcatcggctgaaggtctgcctggtgaaataaaacaacaactggaagagcttctcggccgattctga

SEQ ID NO: 73204 - protein, 287 aa, Unknown
  Obtained from environmental sample
  misc_feature (1)..(287): Xaa is any amino acid
MLIRLWLDKVQDKANFRSMLTSQQDENDNPVPDALQVTDEEYERWQKEIGEITLPDHVFELIFMLRQQLDKLPDAPYVSDRRWKKAIRLLQASAFFSGRSAVAPVDLILLKDCLWYDAQSLNLIQQQIDVLMTGHAWQQQGMLTRLGAIVQRHLQLQQQQSDKTALTVIRLGGIFSRRQQYQLPVNVTASTLTLLLQKPLKLHDMEVVHISFERSALEQWLSKGGEIRGKLNGIGFAQKLNLEVDSAQHLVVRDVSLQGSTLALPGSSAEGLPGEIKQQLEELLGRF

SEQ ID NO: 73205 - DNA, 765 bp, Unknown
  Obtained from environmental sample
  misc_feature (1)..(765): n is a, c, g, or t
atgctgaaagcggcaaaggatgatcctaaagaattcgtgaagaatttgtccggtgaaaagacaatgatcatcgatgaaattcagaaagccccctcccttatatcagaaattaaactggcagttgataataacaaccgccccggccagtatttaatcaccggctcggcaaacatacagacatcggcaataatcagcgatagcctggcagggcggattaagcatattcgccttcgcccgctgactgccggggaaattttgggggtaaagcctacatttttacaatgcgcgttttcgggcaaatttcccatgcagataaaaggatatgacaaaagcgcaatttttgaaatggcctttaagggcgggtatcctgaagcgctgcgtataaaaaatgaaaaagaacgcagagaatggcatatagattatcttaacaaccttattaccaaagatttaaaagaaatagaaaatgtacggcggcttgattcggtcagaaatttgttgaaaataatcgccggctggtccagcaagtatattgataaaaacaagataaccagttcgttggaagtatccaggccaactctggaaacatacctgaacactttggaggctatgtttattcttgagcgggttgccccatgggtaaggacagactatgaactggttgggaaaaaatcaaaaatttacatgaccgataccggtttaatgacatctttgttgaaatggaagaaagaaggcctttcgctggattctgaccggagcggaaaatga

SEQ ID NO: 73206 - protein, 254 aa, Unknown
  Obtained from environmental sample
  misc_feature (1)..(254): Xaa is any amino acid
MLKAAKDDPKEFVKNLSGEKTMIIDEIQKAPSLISEIKLAVDNNNRPGQYLITGSANIQTSAIISDSLAGRIKHIRLRPLTAGEILGVKPTFLQCAFSGKFPMQIKGYDKSAIFEMAFKGGYPEALRIKNEKERREWHIDYLNNLITKDLKEIENVRRLDSVRNLLKIIAGWSSKYIDKNKITSSLEVSRPTLETYLNTLEAMFILERVAPWVRTDYELVGKKSKIYMTDTGLMTSLLKWKKEGLSLDSDRSGK

SEQ ID NO: 73207 - DNA, 594 bp, Unknown
  Obtained from environmental sample
  misc_feature (1)..(594): n is a, c, g, or t
atgcccgcatccttgggagacataatcatcggttcctttcgttccggccggggatatgacctgcggtttcttcttgaaccttgcgcggatatttttctggactggggcggccatgactatgccgcgggttttagccttgaaagagccaattggcccgtttttcttgaacgcctcaaaacagccgcaaagaatatggaactcggggaaatggaagacgaggatcttatcaccgtggatgccgagcttcccttgactttcatgaatcccgatatcctcaatgtagtggatcgctttgaaccctacggagagggcaacaagccccttaattttatggtcaagaacgcccgggtcgaagctatcaacctcatgggaaagtcagaagtcaaacacgtgaaacttacgctggatatgggaaagcacaaatggcccggtatttactggcaggccgcggataaagtgaagcgggactttgatttggaggaccgggtggacctgtgcttcaggatcaacaggaattggtttaacggcaacgaaacgccccagcttattattagtgatctgaaacgaagcgctccaccacaaacgggcttctaa

SEQ ID NO: 73208 - protein, 197 aa, Unknown
  Obtained from environmental sample
  DOMAIN (3)...(60): DHHA1 domain
  misc_feature (1)..(197): Xaa is any amino acid
MPASLGDIIIGSFRSGRGYDLRFLLEPCADIFLDWGGHDYAAGFSLERANWPVFLERLKTAAKNMELGEMEDEDLITVDAELPLTFMNPDILNVVDRFEPYGEGNKPLNFMVKNARVEAINLMGKSEVKHVKLTLDMGKHKWPGIYWQAADKVKRDFDLEDRVDLCFRINRNWFNGNETPQLIISDLKRSAPPQTGF

SEQ ID NO: 73209 - DNA, 480 bp, Unknown
  Obtained from environmental sample
  misc_feature (1)..(480): n is a, c, g, or t
ttgtcttcaaacacttcaaaaattgtcgaacataaaaccacaagtacattaagccatgattttattattgaacaggtagataaatgcgaagaaaaacttgctactggcgactatgacggagcaataacaaatgcaagatcattgattgaatcggtatccatagaaataataaaaatccaaaacaatcaagattataaaagcgaagggaatttgataaatatttttaaagatttaaaaaaatgtcttaatatgactattgatgagaatcaaagtccacaattcctaatagaaataatacaagggatgacaacaactattcaaggaatagcagctcttactaatagagcaagcgatagacacaatagaatctataaacctcaaaaacaccatgcgaaacttgctgttaattgcgctttttctttttgtgattttattcttgaatcttttcattatcagcaagataaaaggaaggtttcttaa

SEQ ID NO: 73210 - protein, 159 aa, Unknown
  Obtained from environmental sample
  misc_feature (1)..(159): Xaa is any amino acid
MSSNTSKIVEHKTTSTLSHDFIIEQVDKCEEKLATGDYDGAITNARSLIESVSIEIIKIQNNQDYKSEGNLINIFKDLKKCLNMTIDENQSPQFLIEIIQGMTTTIQGIAALTNRASDRHNRIYKPQKHHAKLAVNCAFSFCDFILESFHYQQDKRKVS

SEQ ID NO: 73211 - DNA, 399 bp, Unknown
  Obtained from environmental sample
  misc_feature (1)..(399): n is a, c, g, or t
atgttgttattgggtttgtttttgtttgccatggtatattttttaatcgcctattttatttacggaaagtttcaaaagaacgtgtatgaacttaacgataacgatccaactccggcccatgctttaaaagacgaaattgattattgtccgacgcatccgctcattctcctcggacaccatttttcatctattgccggcgcaggccctgttgtcggcccgattgccgccgcggctattttcggctggctgcccgcttatatttgggtgctggtcggcgcggtactttttggcggagttcatgatgtaggcgcaattatcgcttcgatccgccacaaaggtttgtccataggcgaagttgtttttcagtgggttggcgcgcgcgggaaagtttgttcttag

SEQ ID NO: 73212 - protein, 132 aa, Unknown
  Obtained from environmental sample
  DOMAIN (1)...(132): Carbon starvation protein CstA
  misc_feature (1)..(132): Xaa is any amino acid
MLLLGLFLFAMVYFLIAYFIYGKFQKNVYELNDNDPTPAHALKDEIDYCPTHPLILLGHHFSSIAGAGPVVGPIAAAAIFGWLPAYIWVLVGAVLFGGVHDVGAIIASIRHKGLSIGEVVFQWVGARGKVCS

SEQ ID NO: 73213 - DNA, 504 bp, Unknown
  Obtained from environmental sample
  misc_feature (1)..(504): n is a, c, g, or t
atgacggcggcggaagcggccatgccgggcaaagcaagcggagttgcccttgtcctgaccctgcttggatcccggcacaaagcagcccttgcggtacaaatccagacgtttcagttcgtctgtttcattgccgcgagacacgcctccactgcctgcaccacggcgtccgccgtgatgccgaagtgctcgaacagaacatcccccggcgcggacacgccgaagccgcgcatgccgacgatccgtccgtccaggcccacacgcttgtgccagccgtcgcatgcggccgcttccaccgccacccgcgcccggactgaagccggcagcacgctctcgcgccacgccgcatcctgctcgtcaaaacgctccatgcagggcatggacacgagccgcacccggcgcccggatgcctgtaaccgctccacagcggccagaccaacgtgcacttcggatcccgcggcaatgacaatggcttccggcaatcctccgcagtcccgcagaatatag

SEQ ID NO: 73214 - protein, 167 aa, Unknown
  Obtained from environmental sample
  misc_feature (1)..(167): Xaa is any amino acid
MTAAEAAMPGKASGVALVLTLLGSRHKAALAVQIQTFQFVCFIAARHASTACTTASAVMPKCSNRTSPGADTPKPRMPTIRPSRPTRLCQPSHAAASTATRARTEAGSTLSRHAASCSSKRSMQGMDTSRTRRPDACNRSTAARPTCTSDPAAMTMASGNPPQSRRI

SEQ ID NO: 73215 - DNA, 690 bp, Unknown
  Obtained from environmental sample
  misc_feature (1)..(690): n is a, c, g, or t
atgtggccggccttgcgcctgtgcgccatgatgcgtctgcgcgtgatccacgtgctgacgcacgactccatcggcgtgggcgaggatggccctacgcaccagcctgtggaacaggcgccgggcttgcgcntgattcccggcctggatgtctggcgcccggccgatgccgtggagacggcagtggcctggaagtgcgctgtggagcgcaaggggccgagcgcgcttgtcctgtcccgccaggctctgccgcaagcgccgcgccgggcggaacagtggccggaaattgaacggggcggctatattctgcgggactgcggaggattgccggaagccattgtcattgccgcgggatccgaagtgcacgttggtctggccgctgtggagcggttacaggcatccgggcgccgggtgcggctcgtgtccatgccctgcatggagcgttttgacgagcaggatgcggcgtggcgcgagagcgtgctgccggcttcagtccgggcgcgggtggcggtggaagcggccgcatgcgacggctggcacaagcgtgtgggcctggacggacggatcgtcggcatgcgcggcttcggcgtgtccgcgccgggggatgttctgttcgagcacttcggcatcacggcggacgccgtggtgcaggcagtggaggcgtgtctcgcggcaatgaaacagacgaactga

SEQ ID NO: 73216 - protein, 229 aa, Unknown
  Obtained from environmental sample
  DOMAIN (1)...(84): Transketolase, pyridine binding domain
  misc_feature (1)..(229): Xaa is any amino acid
MWPALRLCAMMRLRVIHVLTHDSIGVGEDGPTHQPVEQAPGLRXIPGLDVWRPADAVETAVAWKCAVERKGPSALVLSRQALPQAPRRAEQWPEIERGGYILRDCGGLPEAIVIAAGSEVHVGLAAVERLQASGRRVRLVSMPCMERFDEQDAAWRESVLPASVRARVAVEAAACDGWHKRVGLDGRIVGMRGFGVSAPGDVLFEHFGITADAVVQAVEACLAAMKQTN

SEQ ID NO: 73217 - DNA, 453 bp, Unknown
  Obtained from environmental sample
  misc_feature (1)..(453): n is a, c, g, or t
ttggccggaacggaacgcggcgtttccgaacctgttccaacgttttcaccggcgttcggtgaggcttttctgatgctgcatccaacggtttacgcatcgcaattagcgaaaaagatggaggatcatcacgccaaagcctatttggttaacaccggctggaacgggacgggcaagcgcatttcgctcaaagatacgcgagcaattattgatgcaattattgacggaagcattgaaaaagcggagcgcagacacattcctattctcaatctgaccattcctacagccttaaacaacatgagcgaaggcatcttagacccgcgcgatacgtataaaacgcccaacgaatgggagatcaaagcgaaagatttggccgcacgctatatccataattttgcgcaatactgcgacaatgctgtggcgaaagcgttaattcctgcgggaccacagttgtag

SEQ ID NO: 73218 - protein, 150 aa, Unknown
  Obtained from environmental sample
  DOMAIN (1)...(103): Phosphoenolpyruvate carboxykinase
  misc_feature (1)..(150): Xaa is any amino acid
MAGTERGVSEPVPTFSPAFGEAFLMLHPTVYASQLAKKMEDHHAKAYLVNTGWNGTGKRISLKDTRAIIDAIIDGSIEKAERRHIPILNLTIPTALNNMSEGILDPRDTYKTPNEWEIKAKDLAARYIHNFAQYCDNAVAKALIPAGPQL

SEQ ID NO: 73219 - DNA, 702 bp, Unknown
  Obtained from environmental sample
  misc_feature (1)..(702): n is a, c, g, or t
atgcaatgcttgccgcaagaaattaccctgatgaatgaaatcgccaatatttgcgaaaaagtcggcgccgatgtcaataaaatcaggatgggtatcggcagcgacgcaagaatcgggtacagcttcttgttatccggctgcgggtttggcggcagttgtttccccaaggacgtaagggccctgatcagcatgtccaaagagcagggctatacgccgaagatgctggaaagtattgaagaagtaaataattaccagaaaagggttattgttgaaaaaattgttaaaagatttggcagcaatttgaacggcatgacttttgcagtttgggggctttccttcaaaccaggtaccgatgacatgagggaagcgccttccataacgatcatccgcacattgaccgaaaggggggcaaaaataaacgcctacgatcccaaagcgatggacgaggcaaaaaagcactatttttgcgataacggcggcataaaatacgccgattgtaaatattccgttctttccggcgcggatgccctcattttaattacggaatggaaagaattccacaaccccgattttgaggaaattgaggcaagaatgaaaaataaaataatttttgacggacggaatcagtataacgccgtccatttggaaaaaatgggttttgaatatcaccaaattggtttaaggagcggcaaaaaattatga

SEQ ID NO: 73220 - protein, 233 aa, Unknown
  Obtained from environmental sample
  DOMAIN (4)...(85): UDP-glucose/GDP-mannose dehydrogenase family, central domain
  misc_feature (1)..(233): Xaa is any amino acid
MQCLPQEITLMNEIANICEKVGADVNKIRMGIGSDARIGYSFLLSGCGFGGSCFPKDVRALISMSKEQGYTPKMLESIEEVNNYQKRVIVEKIVKRFGSNLNGMTFAVWGLSFKPGTDDMREAPSITIIRTLTERGAKINAYDPKAMDEAKKHYFCDNGGIKYADCKYSVLSGADALILITEWKEFHNPDFEEIEARMKNKIIFDGRNQYNAVHLEKMGFEYHQIGLRSGKKL

SEQ ID NO: 73221 - DNA, 384 bp, Unknown
  Obtained from environmental sample
  misc_feature (1)..(384): n is a, c, g, or t
gtggaagagagaattcagatttaccgtgctcacgaaaagcagttcagagagcaggttttgcgttgcacaaaggtacacaaaaatctgggcattttggatttaagacacgaagaaactatctgggctggaaaccgctttatgatctatgccttgtttccagaaatcaatataagcattcatattctgtggggacttaggatgcagaatacggtttttgcaacgggaaaatctatttttgatcgttcttctaaaaccgatattggagcacttatgcttaaatatggcggtggtgggcatgctgcggctggaacttgccaagtgccaaacgaccaaactgaaaaagtattatctgagcttatagaaaccataaattcagacggataa

SEQ ID NO: 73222 - protein, 127 aa, Unknown
  Obtained from environmental sample
  misc_feature (1)..(127): Xaa is any amino acid
MEERIQIYRAHEKQFREQVLRCTKVHKNLGILDLRHEETIWAGNRFMIYALFPEINISIHILWGLRMQNTVFATGKSIFDRSSKTDIGALMLKYGGGGHAAAGTCQVPNDQTEKVLSELIETINSDG

SEQ ID NO: 73223 - DNA, 774 bp, Unknown
  Obtained from environmental sample
  misc_feature (1)..(774): n is a, c, g, or t
atggtcagggttaccaatggtgaagtggaagtaattgtttttcataacggaacagccggcggcgaagtggaagttttaaggaaactgaaaattaaccaaattcaagcggctgtttttaccagtatgggagtaagccagataatgccggaggtaatggctttaagttacccgttcttaataaggaatgacgaggaattggcctatgtaatgcagaaaatcaaaccgcagttggacataaagatacagcagaacggttatgctacaatggcgtgggcatgcgccggatggattaaaattttttccaaaacgcccgtttttgcgccggatgatttaagaaaaataagactttcggctccgcctgatgagcagcagatgatgcaggcgttcaggctcatggggtatcagatagttccggtaaaccttgttgattctcttgtctctctcagaagcggaatgattgactcggtctacttaagccctatttatgccgccgggaatcagcttttcggagtcgccggaaatatgacaaatgtcaatattgccccttttatgggcggtattttcatgaacaataacgcatggcgcagaataccggacaagtataagccccagcttttggaagtatgcaagaaactggaaaaagaaattgaatcgtcaatttccggttttgaaacggaagcgatttctaccatggctaagtacggtcttaaaataaacaccccctcccctcacaactgcaaacatggtacgatgataccgcgaagtttgaaataa

SEQ ID NO: 73224 - protein, 257 aa, Unknown
  Obtained from environmental sample
  DOMAIN (1)...(255): Bacterial extracellular solute-binding protein, family 7
  misc_feature (1)..(257): Xaa is any amino acid
MVRVTNGEVEVIVFHNGTAGGEVEVLRKLKINQIQAAVFTSMGVSQIMPEVMALSYPFLIRNDEELAYVMQKIKPQLDIKIQQNGYATMAWACAGWIKIFSKTPVFAPDDLRKIRLSAPPDEQQMMQAFRLMGYQIVPVNLVDSLVSLRSGMIDSVYLSPIYAAGNQLFGVAGNMTNVNIAPFMGGIFMNNNAWRRIPDKYKPQLLEVCKKLEKEIESSISGFETEAISTMAKYGLKINTPSPHNCKHGTMIPRSLK

SEQ ID NO: 73225 - DNA, 849 bp, Unknown
  Obtained from environmental sample
  misc_feature (1)..(849): n is a, c, g, or t
ttgatggccgagaattccctggtatccacaaccgcatatttgacccctgcatttagaaatttagaccgtatacttgatacggacttagttttagtcggtcgtccaaaagaaatctataaatcggcccttattattttggacactatccatagaaacatggaagcccctcacagcgttctaatggagattatccgcgttctgttgataattaagatggaagatgaattaagaatgaaacagttactttctgatcttcatacggacgatgtacaccctctttcttccgaggatattgttgttttgttatcacaacatctacattgtaaacattccagtaggttaccggtcttaatcgttgcctcagcctaccaagcggttagagaccgtatcggtgaacttaataaacaactcgaagcgcataatgccgccgataaacaaaccggaagtataggggatgttgaaatcatactagaaaatgatgataaaattgttacttgctatgaaatgaaagataaacgggttacaaaaggtgatattgatgtggcgatacaaaagatttccacaatagcagataaagccgataattacatcttcattactaccgatgtaatagaacatgaagtttctgaatatgctaaaagcatatacgaaaaaatcggcgttgagttcgcaatattcgactgtataggatttattaaacactttcttcacttttttcataggcgaagaatagactttttgaatatttatcaagaaatggtgctgaatgaaccgaccagttctgtctcccaaccgctgaaagaagcctttttagcgttgagacggtcattagaagcggatagacggtaa

SEQ ID NO: 73226 - protein, 282 aa, Unknown
  Obtained from environmental sample
  misc_feature (1)..(282): Xaa is any amino acid
MMAENSLVSTTAYLTPAFRNLDRILDTDLVLVGRPKEIYKSALIILDTIHRNMEAPHSVLMEIIRVLLIIKMEDELRMKQLLSDLHTDDVHPLSSEDIVVLLSQHLHCKHSSRLPVLIVASAYQAVRDRIGELNKQLEAHNAADKQTGSIGDVEIILENDDKIVTCYEMKDKRVTKGDIDVAIQKISTIADKADNYIFITTDVIEHEVSEYAKSIYEKIGVEFAIFDCIGFIKHFLHFFHRRRIDFLNIYQEMVLNEPTSSVSQPLKEAFLALRRSLEADRR

SEQ ID NO: 73227 - DNA, 888 bp, Unknown
  Obtained from environmental sample
  misc_feature (1)..(888): n is a, c, g, or t
ttgcccaaagcacggaggaggccggacagggcgttcttgcccccgtcgtccgcttccggcggaaggaggggacggcatgagcgcttcctttttgcccgaactgcccgactatcgctttgtggacgacgacccggccgccgtggaaaaaggcgttttcgacgcatacgaacgcatgtgcggtcaaaagctgtaccccggccggccggagcgcatgttctgcgagttcatggtttacctgctggcgcacgaacgcttcaacctgaacaaaaccgcccgctcgcagcttctggcctatgcttcgggcgctcttttggaccacctgggcgcccgcgcgctctgcgagcgtttgcccgcctccccggcccgcgcggaaatggaaataagcgcccgggacccggccgaaaggccccgccttgtgccggccggaacccgcatgaccggcgattctcgcgtgtttttcgccctcgcggaaaacctgatccttccggccggagaaagaagcgcccgcgcctttgcggtttgccttacgcccggagaggccggcaacggctacaagcccggacagatgaatgttttggccgatccgccgccctttgccgcttcggtcgccaatgtttcggaaagcgccggcggcgcggacagggaagacgacgaacacttccgcgagcgcatccaccttgccccggcccgcatgagcgcggccggcccggccgacgcctaccgctacttcgccctttccgtccacgccgacataatggatgtggcggtgcattctccggcccccgtggaggaggacatatacgtgctgctttccggcggccgcctgcccgaacacgccatgctggcggaggtggaaaaagccgtttcaggcgcgaccgcgtgccctga

SEQ ID NO: 73228 - protein, 295 aa, Unknown
  Obtained from environmental sample
  misc_feature (1)..(295): Xaa is any amino acid
MPKARRRPDRAFLPPSSASGGRRGRHERFLFARTARLSLCGRRPGRRGKRRFRRIRTHVRSKAVPRPAGAHVLRVHGLPAGARTLQPEQNRPLAASGLCFGRSFGPPGRPRALRAFARLPGPRGNGNKRPGPGRKAPPCAGRNPHDRRFSRVFRPRGKPDPSGRRKKRPRLCGLPYARRGRQRLQARTDECFGRSAALCRFGRQCFGKRRRRGQGRRRTLPRAHPPCPGPHERGRPGRRLPLLRPFRPRRHNGCGGAFSGPRGGGHIRAAFRRPPARTRHAGGGGKSRFRRDRVP

SEQ ID NO: 73229 - DNA, 897 bp, Unknown
  Obtained from environmental sample
  misc_feature (1)..(897): n is a, c, g, or t
atggacaaagaaaaatttgagtgcgataatatccgtatgaagattctgcccgcgccgatggccggctacacggattatccgttccggaaactgctttccgaactgggcgcgcgggaggtttggacagagatgatttccgcaacggcacttaccaaaaacaacccaaagacggtcggtatgctgaaaaccgttcccggcgtgcggaatgttgtgcagttgttcggcacaacgccggcgcactttgcggccgcgatttccgggggattgctgtctggttatgacgaaataaacataaatatgggctgccccgcgccgaaaattgccaaggacggcggcgggtgcgccctgatgcggaacttggcgttggcgaaaaaaatcattatcgccgcgcggggggcggttccacggggggtggtgctgtccgtaaagttccggttggggtggaacaaaaatattggggtccacttcgcccaaatgtgtcaggactgcggcgcggaccggataatcgttcacggccgattgggcgtggacgggtattccggcacggcggattgggcggcaatcgcggcgattgtgtcggccgttaaaatcccggtcatcgcaaacggcgatgttaccgaccgggcgacagcggaaaagtgtttggcaacgaccggcgcgaacggggtgatgttgggccgtgcgctgctgggccacccgtggcggataactttgcctgcgtgtgccccggagccggccgaaattaaaagaatcgtcgcgcggcatattgaactgttcacagaggattccggccatttcccggaattcaaaaagcacgcgctgttttattgcaacgcgctgcggaccgggaagcccacaaagcaggcggggcggggcggccgacactcggccatctga

SEQ ID NO: 73230 - protein, 298 aa, Unknown
  Obtained from environmental sample
  DOMAIN (16)...(298): Dihydrouridine synthase (Dus)
  misc_feature (1)..(298): Xaa is any amino acid
MDKEKFECDNIRMKILPAPMAGYTDYPFRKLLSELGAREVWTEMISATALTKNNPKTVGMLKTVPGVRNVVQLFGTTPAHFAAAISGGLLSGYDEININMGCPAPKIAKDGGGCALMRNLALAKKIIIAARGAVPRGVVLSVKFRLGWNKNIGVHFAQMCQDCGADRIIVHGRLGVDGYSGTADWAAIAAIVSAVKIPVIANGDVTDRATAEKCLATTGANGVMLGRALLGHPWRITLPACAPEPAEIKRIVARHIELFTEDSGHFPEFKKHALFYCNALRTGKPTKQAGRGGRHSAI

SEQ ID NO: 73231 - DNA, 693 bp, Unknown
  Obtained from environmental sample
  misc_feature (1)..(693): n is a, c, g, or t
gtggacgtgatttttgacgattccactgataatatgacgacgtttacgatgcccgcccgtgatgtggtcgttacggcagtgttcgtggatgtcgagcacaagattagcttcttcctcaactacggcacatccaccactccttatgatagcactaaaacatggggtaatgtgacgaaacccgagggagtcgtaacgggaaccctcaagtcatttccgacgcctccggagagaaccggttggacgtttgccggctggtattctgctgcggttgacggaaatgcggtaacggcaactacgacgttcagcgaaccaacagcgctctttgcccattggaacgaagacgaatacactataacatgggacacggacggcggcactcccgcgcctacgcagacgaccgtcacttatgccgatactatagccgcgccggaagtgacgaaaactgggcacacattaaaaggttggtataccaacctcgacgattctacgacgaaacagagtttccctataagcggtgtaattggtgatatcgagctttacgcgaaatgggagcgtgacagatacaccgttatttggcacttcaatgacggacggctcccgatagatggggatgtagtcgagtacgagggcaacatatataagaagataggggatgacccggtggtggatcctacaaggactgggttgcgttga

SEQ ID NO: 73232 - protein, 230 aa, Unknown
  Obtained from environmental sample
  misc_feature (1)..(230): Xaa is any amino acid
MDVIFDDSTDNMTTFTMPARDVVVTAVFVDVEHKISFFLNYGTSTTPYDSTKTWGNVTKPEGVVTGTLKSFPTPPERTGWTFAGWYSAAVDGNAVTATTTFSEPTALFAHWNEDEYTITWDTDGGTPAPTQTTVTYADTIAAPEVTKTGHTLKGWYTNLDDSTTKQSFPISGVIGDIELYAKWERDRYTVIWHFNDGRLPIDGDVVEYEGNIYKKIGDDPVVDPTRTGLR

SEQ ID NO: 73233 - DNA, 348 bp, Unknown
  Obtained from environmental sample
  misc_feature (1)..(348): n is a, c, g, or t
ttgctcttaagaaggaaaaggagatttattatgggcaatatggtagtgtcgatactgcggcctggcgataaaccgaccccggctcaaataaaaagaatccgcgcggcggccaaacgtccgatagtttatgacgaggattgcccggaattgacagacgagcagctagcagagtttgtgagcgtggccaaaagacgcgaggagtccagaaaaaaacaggtcttgtctctgcgggtggccagtgacacgatacgcatcggcaagtctttcggcaggggttggacgggcatcatggcgcgtttgctggatctggcggtgcgggacgccgctctcttgcggagagccttgtaa

SEQ ID NO: 73234 - protein, 115 aa, Unknown
  Obtained from environmental sample
  misc_feature (1)..(115): Xaa is any amino acid
MLLRRKRRFIMGNMVVSILRPGDKPTPAQIKRIRAAAKRPIVYDEDCPELTDEQLAEFVSVAKRREESRKKQVLSLRVASDTIRIGKSFGRGWTGIMARLLDLAVRDAALLRRAL

SEQ ID NO: 73235 - DNA, 873 bp, Unknown
  Obtained from environmental sample
  misc_feature (1)..(873): n is a, c, g, or t
ttgaggacggaatgcaaatntaccgcttttgccgaaattaaggtttatcaagcgggcggctactaccaattggatattcacagattttttgaaagcggaatcggcgcgaattttacaaagattgaggaattaaaacaaaaactttcggcgcaagggttgttcgacgacgaaagaaaacgaaaattgccgcaaaacatccgcaaaataggggttatcaccgcaaaaaacggagccgctttttacgatattcttaaaattataggagaatacgcgccgcaaatagacgtagttttggtttcaagttctgttcaaggcaaagacgcggctaaatcgcttgtcgaagcgatggaaaatatcaacgaaatagacgatatagacgtcgttataatcggtcgcggcggcggctcggcggaggacttgtcggcgtttaacgacgaaaatcttgtgctaacggtcgcaaattccaaaatccctgtaataagcgccgtcggacacgaaatcgacaaatcgctatgcgatttcgccgccgacatttacgcgcctactccgaccgccgccgccgaaattgtttgccgtacaagttttgaaatacgcaattcgtttgaagaattaaatatgcggtttgaaagggcttttagaagaaaattttcgactattcgcaattacgaacaggttttagacgaattattacaaggtctgcgcagcggtttcaggaatttttttgaacgcaaagaggaaaaaatagtaagttacgagcggattttgaacgcgttaaatccaaaactcccgttaaaaaaaggtttcgcgctgattaaagacaatgaaggaaaaatattaaagagcgcnaaaaattgtcgcttggacaaaaaataa

SEQ ID NO: 73236 - protein, 290 aa, Unknown
  Obtained from environmental sample
  DOMAIN (125)...(260): Exonuclease VII, large subunit
  misc_feature (1)..(290): Xaa is any amino acid
MRTECKXTAFAEIKVYQAGGYYQLDIHRFFESGIGANFTKIEELKQKLSAQGLFDDERKRKLPQNIRKIGVITAKNGAAFYDILKIIGEYAPQIDVVLVSSSVQGKDAAKSLVEAMENINEIDDIDVVIIGRGGGSAEDLSAFNDENLVLTVANSKIPVISAVGHEIDKSLCDFAADIYAPTPTAAAEIVCRTSFEIRNSFEELNMRFERAFRRKFSTIRNYEQVLDELLQGLRSGFRNFFERKEEKIVSYERILNALNPKLPLKKGFALIKDNEGKILKSAKNCRLDKK

SEQ ID NO: 73237 - DNA, 651 bp, Unknown
  Obtained from environmental sample
  misc_feature (1)..(651): n is a, c, g, or t
gtgcgggatgtcatgagcggcgcaaacggcctctacgcgaaaatgaaaagcggcagcatccatgtcgaactctccaccattgatcccaaaaccgccgaagaactcgccgccgaagccaaaagcaaaagcatcgcctatatccagtgtacgctcggcaaaacccccgcccatgccgaaaaagccgaagagcccatgtttataggcggcgatcaagaagccgtcaaaaaactggaaggcatcttcaaaatcatcggtctaccgtactatgtcggcagcattgcctcttcctgcgctgtcaagttgatctccaacatggtcggcatgaccaatctcgccgttttagccgaaggcctccgcgtcggcgaaaaggccggactcgacaaaaaactgctgctggaactgctgaccgacaccggcgcgcgcagtttccagatggatgtgcgcggtccttggcttgcggccggcgacttcagcccccgtttcggccttgacctcgccctcaaggatgtgcgcctcggccttgaaatggcgcgcgattggaagcttgacatgaaggccatggaagccgccctgacctattaccaggaagcgtccggtgcgggctacggcaaggaagactgtaacgccgtctataaaatcatcggcgggtga

SEQ ID NO: 73238 - protein, 216 aa, Unknown
  Obtained from environmental sample
  misc_feature (1)..(216): Xaa is any amino acid
MRDVMSGANGLYAKMKSGSIHVELSTIDPKTAEELAAEAKSKSIAYIQCTLGKTPAHAEKAEEPMFIGGDQEAVKKLEGIFKIIGLPYYVGSIASSCAVKLISNMVGMTNLAVLAEGLRVGEKAGLDKKLLLELLTDTGARSFQMDVRGPWLAAGDFSPRFGLDLALKDVRLGLEMARDWKLDMKAMEAALTYYQEASGAGYGKEDCNAVYKIIGG

SEQ ID NO: 73239 - DNA, 558 bp, Unknown
  Obtained from environmental sample
  misc_feature (1)..(558): n is a, c, g, or t
ttgctcccccagtccgggttcttcaggcggcaaaatcccggagtatggcctatgctcaacgtcataaaaaaaatttatgaaaatttcgaagaaattttctgtgttatctgcatggcagctatggtggcatgtctggcgcttcaggtgggcatccgcatcgttgccggctccgccctggcctggacggaagaactcagccgctacgctttcctctggacagtctataccgccgccgcctttatcgccaaacgcaacgcccacgtacgcatcaccgcccagtttctgcccatgcccctccgggcgcgtttgattttccgcctcattgccgatgccgtctgggtattcttccttctatatatggcccggcaaagcatgatctcccttgaaaccagcctggagtttccggaagtgtcgcctaccttgcacgttgtgaaagcctacgtggaaatgatcattcccatcggcttcgtgctgatgtcgtggcgggtagtggaagattatatcaaacgcctgcgcaacggcaccctttatgaactcgtgcgggaagtaggggtatag

SEQ ID NO: 73240 - protein, 185 aa, Unknown
  Obtained from environmental sample
  DOMAIN (41)...(173): Tripartite ATP-independent periplasmic transporters, DctQ component
  misc_feature (1)..(185): Xaa is any amino acid
MLPQSGFFRRQNPGVWPMLNVIKKIYENFEEIFCVICMAAMVACLALQVGIRIVAGSALAWTEELSRYAFLWTVYTAAAFIAKRNAHVRITAQFLPMPLRARLIFRLIADAVWVFFLLYMARQSMISLETSLEFPEVSPTLHVVKAYVEMIIPIGFVLMSWRVVEDYIKRLRNGTLYELVREVGV

SEQ ID NO: 73241 - DNA, 912 bp, Unknown
  Obtained from environmental sample
  misc_feature (1)..(912): n is a, c, g, or t
ttgtttgaaaaaaattttattttaatgttaaaaggtatttntaagatagtctgttcaggcatgttacttttaggattaattctttgttcgtgtagcaatgaggaatttgatatcggcagagatttggttgattctcatgtaacttttggtatgcttgatactattactatcaaggtttccaatcttgtagcctatgattctgttatcacttccggcagaatgattggttattcaggaagatattatgaccatcaaattggtaatctgaaaacaaagatgtttatcgaatttaaccgcactaccgacagcgaagactatcctgaggcgacattcgattctattactttagtattacgacctaatggcaattattacggcgacacggtaaaatattcgtcattcaaagtatttcaaataaaagaacaaatagacaatggcgataaaggacatttctattcgacggataccgtacaggttggcgctatgcttaccgatacaactttacgaattaaagtaaaagaaaaggataataaaattgaaataaaattgccctattcgtttggaaaaagattgtttgaaggcatattgaaaaacgaagatgaatataaatcaactatagatggatcacaaaacagtactatttcgccttttttgaaaacctttccgggacttgctgtttcacccggcgcagacagcgaatgtgttcacggtttttttcttagtgacactacttgtatgcttcgtctctattatcatacaagtactacatttatcgaagacaagataatgacgttcaaagtaaattcgtctaatagtttttattatatgaatagcgataaagcaaaattttcagaaacagtcaatacaatcaaagatttaacgcaaaaagcgaacctctctcggccgatctga

SEQ ID NO: 73242 - protein, 303 aa, Unknown
  Obtained from environmental sample
  misc_feature (1)..(303): Xaa is any amino acid
MFEKNFILMLKGIXKIVCSGMLLLGLILCSCSNEEFDIGRDLVDSHVTFGMLDTITIKVSNLVAYDSVITSGRMIGYSGRYYDHQIGNLKTKMFIEFNRTTDSEDYPEATFDSITLVLRPNGNYYGDTVKYSSFKVFQIKEQIDNGDKGHFYSTDTVQVGAMLTDTTLRIKVKEKDNKIEIKLPYSFGKRLFEGILKNEDEYKSTIDGSQNSTISPFLKTFPGLAVSPGADSECVHGFFLSDTTCMLRLYYHTSTTFIEDKIMTFKVNSSNSFYYMNSDKAKFSETVNTIKDLTQKANLSRPI

SEQ ID NO: 73243 - DNA, 624 bp, Unknown
  Obtained from environmental sample
  misc_feature (1)..(624): n is a, c, g, or t
ttgaatctatttagactttatggcaaagacaatgataaagaaggtacaggactatcacttatttttcacgaagactttttctgtagaggattaaaaatgcctactgaaaaagatggtaaaaaaagacaacctaataatattctttttgatattaaagatgaaaaatatacgcttttccgttgtatttatattgatcaaaaagaacgacaagtaaagaccgtgggacagagagaaacaacagatgaaaactataaagaatatataaatgatgtttttgatattgtaaatgaaaaaatgaaagaattaaggagcttagtaaatggtttagacgaaaatgtaattgggcagttacttatcaatttacgttatcttaccaagcataccgctttcaaggaggaacaggaatgtagaattgttaggatatgtagtattaatgaagaaggtaaaattcattttaatgaagaaaaaatgtatattgaatatgaatctgacgttattcctcgcataaaagaagtttattttggacctaaagcaacaaatataaaatcatttcaagatcgtttaaagattaataagttatatgataaaattaaatgtaaagaatcagaaaatcctttggcgtaa

SEQ ID NO: 73244 - protein, 207 aa, Unknown
  Obtained from environmental sample
  misc_feature (1)..(207): Xaa is any amino acid
MNLFRLYGKDNDKEGTGLSLIFHEDFFCRGLKMPTEKDGKKRQPNNILFDIKDEKYTLFRCIYIDQKERQVKTVGQRETTDENYKEYINDVFDIVNEKMKELRSLVNGLDENVIGQLLINLRYLTKHTAFKEEQECRIVRICSINEEGKIHFNEEKMYIEYESDVIPRIKEVYFGPKATNIKSFQDRLKINKLYDKIKCKESENPLA

SEQ ID NO: 73245 - DNA, 816 bp, Unknown
  Obtained from environmental sample
  misc_feature (1)..(816): n is a, c, g, or t
gtgtggacggctgcggctgcgactcccgcagttgtaaagtttaacgctaacggcggaaccggcacggctccgccgaatatgacgtcaaccgtaggcggatctatagtattgcccgcgaagggtgatctggctaaagccggtaatgtttttggcggctggagtaccgctgcaactggtacagaccttaaagccgctggtagcagtttttccgttaccgcagccgatgtcactctgtacgcggtgtgggacgccgtatggactgttacgtttaaaccaggcacaggtgccaccggcacacctgaacctgcggggccgctgacacagacagccaagggcgctggtataacactgcccgcgaaaggtaatatggcaggtcctactactcctaccgcaaaaccgaatttcgccggttgggctaccgctgataacgcggaagttaatgccactactcgtgttacctctccctataccccgaccgccaacatcgacctgtacgcggtgtggtctgcgacagaggtcaaattcaaagtatcatttgacgctaacggcggaaccggcaatattgcggaaattgagcagtctgcagcagaagccgttataacgctgcccacgacaggcgttaccagggtcaactatactcttgacggttggagtgaaaccgcgactggcgctaaaattgcaggtaccacatataaaccgacccaagacaccaaactctacgcggtgtgggtaggagtcgccgcaaccgtaacctttgatggaaacggtagtaccggtggtgcggttcctacggtatctggtaaaaaattttggtga

SEQ ID NO: 73246 - protein, 271 aa, Unknown
  Obtained from environmental sample
  misc_feature (1)..(271): Xaa is any amino acid
MWTAAAATPAVVKFNANGGTGTAPPNMTSTVGGSIVLPAKGDLAKAGNVFGGWSTAATGTDLKAAGSSFSVTAADVTLYAVWDAVWTVTFKPGTGATGTPEPAGPLTQTAKGAGITLPAKGNMAGPTTPTAKPNFAGWATADNAEVNATTRVTSPYTPTANIDLYAVWSATEVKFKVSFDANGGTGNIAEIEQSAAEAVITLPTTGVTRVNYTLDGWSETATGAKIAGTTYKPTQDTKLYAVWVGVAATVTFDGNGSTGGAVPTVSGKKFW

SEQ ID NO: 73247 - DNA, 867 bp, Unknown
  Obtained from environmental sample
  misc_feature (1)..(867): n is a, c, g, or t
atgaatttgcgtaccaaagaatattcggaattttcagatattctaaacaatgtagtaaaatttccctctaccgaaatggttattaattcagccttaaacattgtaaacgggtttcgttcacttcaccgaaaaggattaagctatcaagaccttaatgacggtaatttctttatcaatgtaaaaacaggcgatgtgttgatctgtgacaatgataatgtcactcctgacggcaaaaagaactccggcaatattggcggcaaacccggctacatggctcctgaaattgttacaggcaagtcttatcccaattccttaacagattgccattctttagcggttatcctctttaaactgttctgccgccacgatccattgatgggcgagcaatatgtaaaaagcgtatgtataaccgagaagctggaaattgagttatatggttcgtcccctgtttttatttttgaccctgataacgacagcaaccgtccggtaaagggaatacaccccaatccgataaagttatggcctttataccccgattttctacatgaggcttttataaagtcttttgccgaaggtatgaaaaatcctaatgcgcgacttcctgaaaatgaatggcaaaaagttcttgtccgccttcgaagcgaattgcttcaaagtccctcttgcaaagacgatatttttcttaatcagcataataagggcaataaaataaaatgttcctgtaatcattctttcagctatcctcttcatcttgtattgggtaattataaaattccgttattccccaatgtaaaattatacgcgtgccacaccagagcctacaatgacgattatagtgccattacaggagaggtagtaatgaaatag

SEQ ID NO: 73248 - protein, 288 aa, Unknown
  Obtained from environmental sample
  misc_feature (1)..(288): Xaa is any amino acid
MNLRTKEYSEFSDILNNVVKFPSTEMVINSALNIVNGFRSLHRKGLSYQDLNDGNFFINVKTGDVLICDNDNVTPDGKKNSGNIGGKPGYMAPEIVTGKSYPNSLTDCHSLAVILFKLFCRHDPLMGEQYVKSVCITEKLEIELYGSSPVFIFDPDNDSNRPVKGIHPNPIKLWPLYPDFLHEAFIKSFAEGMKNPNARLPENEWQKVLVRLRSELLQSPSCKDDIFLNQHNKGNKIKCSCNHSFSYPLHLVLGNYKIPLFPNVKLYACHTRAYNDDYSAITGEVVMK

SEQ ID NO: 73249 - DNA, 540 bp, Unknown
  Obtained from environmental sample
  misc_feature (1)..(540): n is a, c, g, or t
atgggagtttctacatatttttttccctcagacatttttttgatttttttgtgggtgcaaatatacaaaaagaatttttgttacctttgtgcattcacacataaaaatcgcattgttatgaaaaaaattatttttgcagcagcccttgccatttgtgccgcttttgcgcaggcacaggcaggtgaaaaaaactttattgaccagccctacattgaggtgagcggaaaagccgaaaaggaaattacgcccgacaaaatttacctcagaattaccattaaggaaagggataccaaaggcaagcagtcgctcgaccagcaggaaaaggatatgaaacaggcgttgtcgaatttaggcattgatattgctaaaaatttgactgtcaaagatatggagagcaactttatgatgtattggttcaaaaaagacgacatttttacgagccgcgagtacaggttgctgataaacagcgcatcgttggcaggtagggctattcaggagctgaaaagaattacgtgtctaacgtttcgctcgaaaggttga

SEQ ID NO: 73250 - protein, 179 aa, Unknown
  Obtained from environmental sample
  misc_feature (1)..(179): Xaa is any amino acid
MGVSTYFFPSDIFLIFLWVQIYKKNFCYLCAFTHKNRIVMKKIIFAAALAICAAFAQAQAGEKNFIDQPYIEVSGKAEKEITPDKIYLRITIKERDTKGKQSLDQQEKDMKQALSNLGIDIAKNLTVKDMESNFMMYWFKKDDIFTSREYRLLINSASLAGRAIQELKRITCLTFRSKG

SEQ ID NO: 73251 - DNA, 687 bp, Unknown
  Obtained from environmental sample
  misc_feature (1)..(687): n is a, c, g, or t
atgtctttgggcaataaaataatgaaagcgcaacttgtatttgtagcactggtaaccattgcaattttaggctgcggcaacagcgatagtgctgtatgcataatctgcgaagagccagaccaattcagcagttctaatttccgttctagcagttcctcacgccctagcagttcttccctagttcgttctagcagttcttcgcaccctagcagttcttccctagttcgttctagcagttcctcacgccctagcagttcttccctagttcgttctagcagttcctcgcaacttagcagttcatctctcgttcaattgagcagttcctcgcaacttagcagttcatctctcgttcagttgagtagttcctcgcaacttagcagttcatctctcgttcagtctagcagttcctcgcagcccagcagttcatctctcgttcaattgagcagttcctcgcagcccagcagttcctcgcaacttagcagttcatctctcgttcagtctagcagttcctcgcagcccagcagttcatctctcgttcagtctagcagttcttcgcaacttagcagttcatctctcgttcagtctagcagttcctcgcagcccagcagttcatctctcgttcaattgagcagttcctcgcagtccagcagctcttctagtcctgtaagttcgtctagtgttgaataa

SEQ ID NO: 73252 - protein, 228 aa, Unknown
  Obtained from environmental sample
  misc_feature (1)..(228): Xaa is any amino acid
MSLGNKIMKAQLVFVALVTIAILGCGNSDSAVCIICEEPDQFSSSNFRSSSSSRPSSSSLVRSSSSSHPSSSSLVRSSSSSRPSSSSLVRSSSSSQLSSSSLVQLSSSSQLSSSSLVQLSSSSQLSSSSLVQSSSSSQPSSSSLVQLSSSSQPSSSSQLSSSSLVQSSSSSQPSSSSLVQSSSSSQLSSSSLVQSSSSSQPSSSSLVQLSSSSQSSSSSSPVSSSSVE

SEQ ID NO: 73253 - DNA, 660 bp, Unknown
  Obtained from environmental sample
  misc_feature (1)..(660): n is a, c, g, or t
gtgaacgaccaggcggaaaaattgcgggagatggttgaggcggcgggcgccggcctgcccgccggcccgtccgcggcgccgccgccggtacgtcgtcagggtaggtgcaagagcatagcggttaccagcggcaagggcggggtggggaagaccacgctggcgctggtgcttggggcgagtttggccaagttggacaagcgggtgctgctcatggacgtcgaccttggcctggccaacatacagatactgctcggtatagcgcctaagttcaacatcgcgcacgtcgttacggggaagtgcgctataggcgacatcgtggtggaggcggcgccgaacatgtttttggctccgggcgcctcggggttcgagcagctgtcaaacatagatatggtgcgtttcgagcgtttgcgcgcggatttcatggggcttgaggagggctacgactttctggtaatggacaccggcgcgggtatcggcaatacggtgacgggtttcgcccgccacgccgacttggttttgctggtcatgacccccgacccgacctcgatggccgacgcttacgcaatggtgaaggtgctctacgaaaagggcaacacgaacgtcgcggtggtggtcaatatggcggctaacgaggcggagggccgggagtccttgagatga

SEQ ID NO: 73254 - protein, 219 aa, Unknown
  Obtained from environmental sample
  DOMAIN (39)...(219): CobQ/CobB/MinD/ParA nucleotide binding domain
  misc_feature (1)..(219): Xaa is any amino acid
MNDQAEKLREMVEAAGAGLPAGPSAAPPPVRRQGRCKSIAVTSGKGGVGKTTLALVLGASLAKLDKRVLLMDVDLGLANIQILLGIAPKFNIAHVVTGKCAIGDIVVEAAPNMFLAPGASGFEQLSNIDMVRFERLRADFMGLEEGYDFLVMDTGAGIGNTVTGFARHADLVLLVMTPDPTSMADAYAMVKVLYEKGNTNVAVVVNMAANEAEGRESLR

SEQ ID NO: 73255 - DNA, 306 bp, Unknown
  Obtained from environmental sample
  misc_feature (1)..(306): n is a, c, g, or t
atggaggaactgcggttgctgatggacgtgtgcgttcccgacgagacgcaccttgttttgagcgccactaccaaagattccgacctgcacgatatggttaaccgctaccgcaacatcaaggtgaaccggttgctctttacgaagttggacgagacgacgcggctcggcaatatcttcaatattgtgagcgacctaggcataccggtgtcgtacttcacggtcggtcagagcgttccggacgacatagagctggcggaggcgggtaaatttgtctcgaggctgcttatggaggggcgcgtcaggtga

SEQ ID NO: 73256 - protein, 101 aa, Unknown
  Obtained from environmental sample
  DOMAIN (1)...(96): SRP54-type protein, GTPase domain
  misc_feature (1)..(101): Xaa is any amino acid
MEELRLLMDVCVPDETHLVLSATTKDSDLHDMVNRYRNIKVNRLLFTKLDETTRLGNIFNIVSDLGIPVSYFTVGQSVPDDIELAEAGKFVSRLLMEGRVR

SEQ ID NO: 73257 - DNA, 303 bp, Unknown
  Obtained from environmental sample
  misc_feature (1)..(303): n is a, c, g, or t
atgacaaagtggttcaaacggaactggatatggatgctggtcctaggcgcggccgtggtctatgcccccttggtgggcggcagccaggacgagaaggccaggaggcacgggcttgagacgctgacggaggtcatggggctgatccagaggcagacagtggagccgcccaagcccctgcaggtggcgcacgcctccatccaggggatgctgcacacgctggacccccactccaacttcatggacgagcaggagttccgccacatgcgcgaggaccagaagggcgtctactcgtgccgattttga

SEQ ID NO: 73258 - protein, 100 aa, Unknown
  Obtained from environmental sample
  SIGNAL (1)...(26)
  misc_feature (1)..(100): Xaa is any amino acid
MTKWFKRNWIWMLVLGAAVVYAPLVGGSQDEKARRHGLETLTEVMGLIQRQTVEPPKPLQVAHASIQGMLHTLDPHSNFMDEQEFRHMREDQKGVYSCRF

SEQ ID NO: 73259 - DNA, 423 bp, Unknown
  Obtained from environmental sample
  misc_feature (1)..(423): n is a, c, g, or t
atgttggtagaaggcggcttcgtggagtgggtgcgcgcctacggcaaccgctatgggaccgggaaggcctggattgaggagcaggtggaggccgggcgggacgccctgctcgacttggagacgcacggggccaagagggtcaaggacctgttcccggacgccgtgctgatcttcctggcgccgccgtcggcggagagcctcgcggcgaggctgacgggcagggggaaggacagcaaggagcagatagccacgcgccttgagcaggcgaagcacgaactggagcagtggccccactacgactacctagtcctgaacgacgacatcgagtccgcctacgcaaccctcaaggcggtgatcattgccacgagggcttccacggcccgcatggccgacctggcgcagagcgttctggaaaagttttag

SEQ ID NO: 73260 - protein, 140 aa, Unknown
  Obtained from environmental sample
  DOMAIN (3)...(81): Guanylate kinase
  misc_feature (1)..(140): Xaa is any amino acid
MLVEGGFVEWVRAYGNRYGTGKAWIEEQVEAGRDALLDLETHGAKRVKDLFPDAVLIFLAPPSAESLAARLTGRGKDSKEQIATRLEQAKHELEQWPHYDYLVLNDDIESAYATLKAVIIATRASTARMADLAQSVLEKF

SEQ ID NO: 73261 - DNA, 828 bp, Unknown
  Obtained from environmental sample
  misc_feature (1)..(828): n is a, c, g, or t
gtggtagagaaggacgcggattctggccggatggaaagccggatgatgaaaatgaaggtgatagtttccagcgtgatgggaagcacggcggggacgataaacagcgaaaacgcgagccggtgttttgtggtgcacgcggacgagagcagggggcagactgagaggatccacgagtaccagcggaagcggcacgggcttgattccctgtcctccggaagcaaggccgcggaggttattaaacgccaccgcgcggcgcagagtcttttacggaacatcccggtggtaaacgacttcgccgcgtcccttaatttccccacgtcgttaatgcgcagccgccgcgaccacgagaggtttttggatttaatcgacgcggtgtgtttcctcaggcagtaccagaagaaagaggagcaaaaggacggcgtacggttcatccgctgcgaccttgccgattacgaggctgcctatacgatcatggtgaacggggtattggggagcacgatggaggagctgccccgaggcgcgcggctattatacgaacagatccgggaatgggcgcggggcgaggcgggcaggcggaagctgaagactgaggaactgcgctttacccaaaggcagatacgggaagcgacgggcttagggcatacctggatacaggcgatgatgaggcttttggttgactatgagtacctggaagcggtctcaggcggcggacaaaggagcaggacatggtataccttgcgaagcgacgaggatatattccgcgccgacctttcgatgataccttccccgcaagcgctcgcgcggctttccaaagcaaaaaccccttga

SEQ ID NO: 73262 - protein, 275 aa, Unknown
  Obtained from environmental sample
  misc_feature (1)..(275): Xaa is any amino acid
MVEKDADSGRMESRMMKMKVIVSSVMGSTAGTINSENASRCFVVHADESRGQTERIHEYQRKRHGLDSLSSGSKAAEVIKRHRAAQSLLRNIPVVNDFAASLNFPTSLMRSRRDHERFLDLIDAVCFLRQYQKKEEQKDGVRFIRCDLADYEAAYTIMVNGVLGSTMEELPRGARLLYEQIREWARGEAGRRKLKTEELRFTQRQIREATGLGHTWIQAMMRLLVDYEYLEAVSGGGQRSRTWYTLRSDEDIFRADLSMIPSPQALARLSKAKTP

SEQ ID NO: 73263 - DNA, 810 bp, Unknown
  Obtained from environmental sample
  misc_feature (1)..(810): n is a, c, g, or t
atggtcgcgtttatggcgcccgccaaactccgcgtttacgatctgctggacgaccaaaaaatcgaagacgaattccttccctatatcgccattccggtcgccggcattgatgtctttatgtttaccaattattttgccattgttgatccccgcgaccgtttggtgaaactgctcaaatccccggacaggctctgcgccgcggctattatcgacggcagcctttcagattcccttccggataaaaacgccgttgtttttgacggcctgtgcgcatcgctggaagcctattgctcaacccgctcaaattttctctccgacgctctgctggaacaggcaatttcgctatactctgcaatactgaagaacggcaccgaaagttctgtcgctgcccaggcgggttttcttgcctctctgggatcggcggcaagctctccgggcataggcaccgccctgtcctacgcgatcagcggccgttatccggtcgcaaaatcccagtgttccgccgtgcttctccccttcattgcggaacggctgattgcggcccgtccggaaaaaatggcccacgccgccgccctgctgggcgaagccggtaaaggcgcttcggtcgccgatgccgccaattccgtggcagagagcatccgccgcaatatgaccgcgcttaaggttccgtcccattttaaggaattcaacctttcgctggaccgcctggccacgattgccgaagctgcccgcaatcttgaatttaccgcttttacgccctggactgtttcggcggaagatgtttttgagattttgaaacaggctttttaa

SEQ ID NO: 73264 - protein, 269 aa, Unknown
  Obtained from environmental sample
  DOMAIN (7)...(261): Iron-containing alcohol dehydrogenase
  misc_feature (1)..(269): Xaa is any amino acid
MVAFMAPAKLRVYDLLDDQKIEDEFLPYIAIPVAGIDVFMFTNYFAIVDPRDRLVKLLKSPDRLCAAAIIDGSLSDSLPDKNAVVFDGLCASLEAYCSTRSNFLSDALLEQAISLYSAILKNGTESSVAAQAGFLASLGSAASSPGIGTALSYAISGRYPVAKSQCSAVLLPFIAERLIAARPEKMAHAAALLGEAGKGASVADAANSVAESIRRNMTALKVPSHFKEFNLSLDRLATIAEAARNLEFTAFTPWTVSAEDVFEILKQAF

SEQ ID NO: 73265 - DNA, 942 bp, Unknown
  Obtained from environmental sample
  misc_feature (1)..(942): n is a, c, g, or t
atgcaggcaagaaaagatgtcccgcttgtggaaaagcataacgaagcccttcttctactccccagaatttttaccgaaaatggctttaaggcaaccgtgacaaacccgccgtatgccaattataagtcacctgcggatttaagtatctttgccgcttatcctgaaattgacgcgaaaaatgtaatcggcaaatacaacgctcagtggatgcaaagggaaaagaatctacagttaagatttatagatactgacggaataataaaatcaaaactgatcaggttttcttttttcaagtgcgctcctttgttatttagaaacattatttatgatcgcggagaatggctggctgttaataatgaaacatccggaacggataggctagcactggacaattatatcgcattggatgtattgccggatataacggcggctagcgacatccagtttaacgcatacaatgtaattacaaatgagttaacccatcaacctttttttttacatgttcctgattataggcccgcaaatgaagtgaccaataaagggaacggccctttttccaatgaatctcattaccacgctaacatggctgcgttcttgttgcttggaaaatggtttggtttcttaaaagaaaatggtgtatataataataccagaataataattgtttcagaccatggcgaggatctgcaacttaaattccccaataacttagttttgctggacggtcgtcatcttgcgaaatacacagcgcttttcttggtaaaggattttgacgcgcacggggttctggcaattgatgactcttttatgactaacgccgacgtgcctcttnnatgctctaatgatnatgttgataaccctgtaaacccatggacagggagattgttaaaagcgacaagcaaacgggattacccctacttcatctccacgatggtcaattga

SEQ ID NO: 73266 - protein, 313 aa, Unknown
  Obtained from environmental sample
  misc_feature (1)..(313): Xaa is any amino acid
MQARKDVPLVEKHNEALLLLPRIFTENGFKATVTNPPYANYKSPADLSIFAAYPEIDAKNVIGKYNAQWMQREKNLQLRFIDTDGIIKSKLIRFSFFKCAPLLFRNIIYDRGEWLAVNNETSGTDRLALDNYIALDVLPDITAASDIQFNAYNVITNELTHQPFFLHVPDYRPANEVTNKGNGPFSNESHYHANMAAFLLLGKWFGFLKENGVYNNTRIIIVSDHGEDLQLKFPNNLVLLDGRHLAKYTALFLVKDFDAHGVLAIDDSFMTNADVPLXCSNDXVDNPVNPWTGRLLKATSKRDYPYFISTMVN

SEQ ID NO: 73267 - DNA, 966 bp, Unknown
  Obtained from environmental sample
  misc_feature (1)..(966): n is a, c, g, or t
atgggtcagnattcggccgagacgaannacgctttctccgggtggattgggattacagctgggctgtatcaaaccagataccagttgctcagaaccgctttctccagatttaacagcgggaactacgatgattacgagcctttccgcttgagcaacgcccagtggcttgatgattatgcgctatttatggctattaagggaattaacgaccacaaaggcctggctgaatggccggcggcacataaacggtatcaggagcagtccgctctgcggcaaaagtatgacagagaaatgcagttttggatttttctgcaatttctgtttttccgtcagtggtatgcgatcaaggaatacgcaaacgccagggggattggcatcatcggcgacaaaccgatatataccgcttacgacagtgtggaactctggtcaaatccgcaatattttcaggttcacgaagaccttacgcccatcaaagttgcgggctgcccccccgacgggtttaccgccgacggccagttatggggcaatcccctttacgattgggaccggctgaaacaggacaactacgagtggctgcttaaaacctatgactccgctacccggatgttcgattttgtacgcatcgatcacttccggggattctctgcctactacagtgtcccacacggagagacaaccgcccgtaacggcgagtgggtaaaaggcccgggcaaggattttatttctttcctgaaatccagatacaggaaagactgcattatcgcggaggatttagggtataaagacgatgatgtaattgaactgctttcgtttagcggatacccggggatgaaggtgctgcaattcgcatttggcgaggaagacagcgatgatttngcaaacaaaaaccctgaaaacagcatagcctatctgggtacgcatgataacacaccngaaggcaatggcttgaggtctctcgatagatga

SEQ ID NO: 73268 - protein, 321 aa, Unknown
  Obtained from environmental sample
  DOMAIN (5)...(320): 4-alpha-glucanotransferase
  misc_feature (1)..(321): Xaa is any amino acid
MGQXSAETXXAFSGWIGITAGLYQTRYQLLRTAFSRFNSGNYDDYEPFRLSNAQWLDDYALFMAIKGINDHKGLAEWPAAHKRYQEQSALRQKYDREMQFWIFLQFLFFRQWYAIKEYANARGIGIIGDKPIYTAYDSVELWSNPQYFQVHEDLTPIKVAGCPPDGFTADGQLWGNPLYDWDRLKQDNYEWLLKTYDSATRMFDFVRIDHFRGFSAYYSVPHGETTARNGEWVKGPGKDFISFLKSRYRKDCIIAEDLGYKDDDVIELLSFSGYPGMKVLQFAFGEEDSDDXANKNPENSIAYLGTHDNTPEGNGLRSLDR

SEQ ID NO: 73269 - DNA, 882 bp, Unknown
  Obtained from environmental sample
  misc_feature (1)..(882): n is a, c, g, or t
atgaaacgtgcatcaaagctaaaaaaaagcggaaaaatcacagatgaacttatgaaatttcttgatattgtcggactaaattatggcacttcacgttatgagatggatttaaaacgagaccctgataagatttatataggttccgaaacatttgttcatcaaattacagagaattggagattggtaaaaaaatataaaaaccttgtcggcgactttgtttggacaggatgggattacataggagaagccggatcctgcggagcatgggattatcctgagtggggtaaatatccgctgcttgatggtgtgggaacatgcgatattaccggatttatcacgcctcaagctgtttatatgcagattgcgtatgggctatataaaaaaccatatatagcagtaagacctgtgcatattgaagggcgaaaatatataaagggctgttggaggatgactaacgcagtacgttcatggagttggcatggttgtgaagggaaaaaagcatctgtggaagtttatgccgatgctgttaaagccgaacttttcattaatggcaggtcatgcggagtaaagaagttaaaaaatatgcggacagaatacaaattgaaatacgagcgcggtgagctttccgtaaaaacctatgatgcacaaggcaaagttataggagaagataagcttgtaagcgccgacaataccagccgcttgcttcttacacctgagaaaaagattcttaaagcanacggacaggacttgtgtttcttgaacattgagattactgatacgcatggaaacatacaacctgcacaagatgtcagcgtcagtgtagaaataaacggcgatactgttacattagcaggacttggctcagcgagaacaagaaactga

SEQ ID NO: 73270 - protein, 293 aa, Unknown
  Obtained from environmental sample
  misc_feature (1)..(293): Xaa is any amino acid
MKRASKLKKSGKITDELMKFLDIVGLNYGTSRYEMDLKRDPDKIYIGSETFVHQITENWRLVKKYKNLVGDFVWTGWDYIGEAGSCGAWDYPEWGKYPLLDGVGTCDITGFITPQAVYMQIAYGLYKKPYIAVRPVHIEGRKYIKGCWRMTNAVRSWSWHGCEGKKASVEVYADAVKAELFINGRSCGVKKLKNMRTEYKLKYERGELSVKTYDAQGKVIGEDKLVSADNTSRLLLTPEKKILKAXGQDLCFLNIEITDTHGNIQPAQDVSVSVEINGDTVTLAGLGSARTRN

SEQ ID NO: 73271 - DNA, 864 bp, Unknown
  Obtained from environmental sample
  misc_feature (1)..(864): n is a, c, g, or t
atgctcgcccatgttcaccaatggggagcgtggacggtgacaactcccgccaccgcaaccacggacggggtagaaaccagaacatgcgcccttgacgcaacgcataaagacacccgccccatacccgcaacgggcgggggaggaggaggcggcaacggtttctattacatcgatctatcgaaggttggcggtaatgcggttcggcgcatacattttcatgggaaagataatgggggcatgaagcttaagaaggtttttgcgagcaataccacgggaacatcgctgccgagcggcgccaaaatctggtatgatttttcgaagggcggtactgtcgaggcttgtaagggagccaacaacacgtactcaggagctagtggcgaaatagcttctactggcggtcagataaccggtggggcgtggtcgtatagcaacggcggcacttatcagtatatgggtaatcttgggtttttgggcgctgacggaaaatatttaggctttgaagttgatgattatgactcttcacacaaatttaccgacctttgggttggatttcatggtgaaagcgggccactatcgttcaccggcgccgggcccgagggagatataaagctcagcgtggttgctgaggggagcagcggcactggaggcggtacccacacccacgtatggggcaattgggtagtaacaactcccgccaccgcaaccacggacggcttagaaaccagaacatgcgcccttgactcaagccataaagaaacccacgtcatacccgcaaccggcggaggcggcggcgctgtatacccatacacggtcccggttgaaatgaaatcacaggcagcaacgacaaaaacattggcagcgtag

SEQ ID NO: 73272 - protein, 287 aa, Unknown
  Obtained from environmental sample
  misc_feature (1)..(287): Xaa is any amino acid
MLAHVHQWGAWTVTTPATATTDGVETRTCALDATHKDTRPIPATGGGGGGGNGFYYIDLSKVGGNAVRRIHFHGKDNGGMKLKKVFASNTTGTSLPSGAKIWYDFSKGGTVEACKGANNTYSGASGEIASTGGQITGGAWSYSNGGTYQYMGNLGFLGADGKYLGFEVDDYDSSHKFTDLWVGFHGESGPLSFTGAGPEGDIKLSVVAEGSSGTGGGTHTHVWGNWVVTTPATATTDGLETRTCALDSSHKETHVIPATGGGGGAVYPYTVPVEMKSQAATTKTLAA

SEQ ID NO: 73273 - DNA, 309 bp, Unknown
  Obtained from environmental sample
  misc_feature (1)..(309): n is a, c, g, or t
atggatccacttctcaacctgaacccactcaacccagtcaagccagccagccaaggcgaggcgcctggaatcccaggcggccaggacgtcccgagcttcaaggacttgttgcaaaaggcgatacacgaagtgaacatggatgaacacgtcgcggcacaagaggcacggaatttgatgacgggtcaggggactgacatgcattcggctattttggctgtccagaaagccgacgtcagtttcaacacgatgatggccgtacgctccaaactcatcgacgcctaccgcgaagtcatgcgaatgcagatgtag

SEQ ID NO: 73274 - protein, 102 aa, Unknown
  Obtained from environmental sample
  DOMAIN (5)...(102): Flagellar hook-basal body complex protein FliE
  misc_feature (1)..(102): Xaa is any amino acid
MDPLLNLNPLNPVKPASQGEAPGIPGGQDVPSFKDLLQKAIHEVNMDEHVAAQEARNLMTGQGTDMHSAILAVQKADVSFNTMMAVRSKLIDAYREVMRMQM

SEQ ID NO: 73275 - DNA, 342 bp, Unknown
  Obtained from environmental sample
  misc_feature (1)..(342): n is a, c, g, or t
ttgccgctgatttctccgcctgtcatgttaaaatcggaagaacgcacaccgccaccgttactggcagtattgccactgatttttccatctgtcatggtaaaagttccagtagaatacacacctgagccaccgttaccactaatttctccacctgtcatggtaaaagttccactagaatacacaccgccagcgctgctgccagtattgccgctgatttttccatctgtaatggtaaaatcggaagaatacacaccgccacctaaaccgccgcgtgcagtattgccgctgatttctccatctgtcatggtaaaatcggaagaatacacaccgccgccactgtag

SEQ ID NO: 73276 - protein, 113 aa, Unknown
  Obtained from environmental sample
  misc_feature (1)..(113): Xaa is any amino acid
MPLISPPVMLKSEERTPPPLLAVLPLIFPSVMVKVPVEYTPEPPLPLISPPVMVKVPLEYTPPALLPVLPLIFPSVMVKSEEYTPPPKPPRAVLPLISPSVMVKSEEYTPPPL

SEQ ID NO: 73277 - DNA, 684 bp, Unknown
  Obtained from environmental sample
  misc_feature (1)..(684): n is a, c, g, or t
ttggcggtgttcccgtcaggaaaatatctagatacagccaaagttctaattgacggtggcgcagatgttaatgcaaaagggaacatcggtgattcgcctcttataccggcaataactaacctagtagttggttcaagggttgaactcatcaaatttctcgtttccaatggggcagatattaacacacgggataaagatgactggacacctctccattggtcggtaaatggggatgttgggacggctaaatgcctcgttgagttgggggcaaatgttaatagcagaaataatgaaggaaacactccgctagctatggcaaggggaatgagaaaaacggcaatagcagaatacctttctagtgtaaatacatcctcgccgccctcgataccgtcaaatccgacgcggcaaaatcagactccgtcttccggtggctgttatattgccacagccgtttatggctcatatgacgcacccgaagtattgtgtttaaggaaatttagggatgaaattctctctgaatccattttcggacgtttatttataagaatatattatcgtttcagcccaactattgcggaaaagttgaaaaagacgcgttatattaatatgtttgttcgaaaggcattagacaaggtagtcgtaaggcttaataagaagtttcacaatcagaataaggaggtttaa

SEQ ID NO: 73278 - protein, 227 aa, Unknown
  Obtained from environmental sample
  DOMAIN (66)...(97): Ankyrin repeat
  misc_feature (1)..(227): Xaa is any amino acid
MAVFPSGKYLDTAKVLIDGGADVNAKGNIGDSPLIPAITNLVVGSRVELIKFLVSNGADINTRDKDDWTPLHWSVNGDVGTAKCLVELGANVNSRNNEGNTPLAMARGMRKTAIAEYLSSVNTSSPPSIPSNPTRQNQTPSSGGCYIATAVYGSYDAPEVLCLRKFRDEILSESIFGRLFIRIYYRFSPTIAEKLKKTRYINMFVRKALDKVVVRLNKKFHNQNKEV

SEQ ID NO: 73279 - DNA, 672 bp, Unknown
  Obtained from environmental sample
  misc_feature (1)..(672): n is a, c, g, or t
ttgcgagaaattgaattcgctatcaatggaaaagaaagaaaaaaaagccttgctgtcgtcaacattacccaatgcaaccagggtatggttgagatgggcttatatgatgcaagttcggggcttttacggcttggtgttattagcggggttgacatgactccggaagccgccgagtgcaaaatgatgttcctgctcgggcaaggatacgatattaatacagttaaagaccagatgcaaaaagacatctgcggcgaacaaaactataacgtattcaacttaatatatgaaagcggaagcacgaaagataactgcctctcgttaaaatcacagcagcttcccgccggatatttaaaagatcaagttgccacggcgagtgtccgttttgacggaataaaagctatagggaatgaaacctctttagagctgcttgtttttgccaactacccttccgtaaataaagaagctgatacaaatatcgcacagtgccttggagttattaaaaaagaacttagtgaagaaaaaggaaccgactgcacattgctgtgtactgaaaaagtgcgccagattatagctgacccaagccgcccggtacaactctcagtcgtttccaaaaaaggagatatacagtgggagaatgtttccttttctgtttacactaatgtcatcaattaa

SEQ ID NO: 73280 - protein, 223 aa, Unknown
  Obtained from environmental sample
  misc_feature (1)..(223): Xaa is any amino acid
MREIEFAINGKERKKSLAVVNITQCNQGMVEMGLYDASSGLLRLGVISGVDMTPEAAECKMMFLLGQGYDINTVKDQMQKDICGEQNYNVFNLIYESGSTKDNCLSLKSQQLPAGYLKDQVATASVRFDGIKAIGNETSLELLVFANYPSVNKEADTNIAQCLGVIKKELSEEKGTDCTLLCTEKVRQIIADPSRPVQLSVVSKKGDIQWENVSFSVYTNVIN

SEQ ID NO: 73281 - DNA, 813 bp, Unknown
  Obtained from environmental sample
  misc_feature (1)..(813): n is a, c, g, or t
atgatgaccgtaaccgcgaccgggcgcctgtcgtcggccgagccaaatctgcaaaacatcccagtcagaaaagagatcggcggcgaactgcgaaaaatgttcgtcgccggggaagggaacgtgctagtcgacgccgattactcgcagatcgaactgcgcctgctggcgcacattgcgggagatcctgtaatgcgctccgcatttgagcgcggcgaggatattcataccgtgacggcatcgcaggtgttcggcgcgccgataggggaagtaacgtccgtgcagcgaagccgcgcaaaggcggtcaattttggcatcgtatacggtatatctccgttttcgctcgcacaggatatcggcgtcgcgccaaaggaggcaaaggcatatatcgacggctacttggaaaagtatgccggcgtacgcggctacatggccgatatcgtcgaaagcgcaaaaaagcttggctatgtttccacgctatttggccggcggcggtatctgccggagcttcgctcgtcgaatttcaacacgcgctcgttcggggagcgtgtcgcgctgaacatgcctattcaaggcacggcggcggacattatgaagatagcgatggtaaatgcggctaacaggcttaaggcagaaggcctggccgggcggctgatactgcaggttcacgacgagcttatcgcggagtgccctgaacatgagactgaggccgtcagcctgattctgcgcgaggaaatggagaacgcggcgaagctctccgtcccgctcgtcgccgaaacccgcgcagggaagagctggttcgaagcgaaattatga

SEQ ID NO: 73282 - protein, 270 aa, Unknown
  Obtained from environmental sample
  DOMAIN (1)...(268): DNA polymerase family A
  misc_feature (1)..(270): Xaa is any amino acid
MMTVTATGRLSSAEPNLQNIPVRKEIGGELRKMFVAGEGNVLVDADYSQIELRLLAHIAGDPVMRSAFERGEDIHTVTASQVFGAPIGEVTSVQRSRAKAVNFGIVYGISPFSLAQDIGVAPKEAKAYIDGYLEKYAGVRGYMADIVESAKKLGYVSTLFGRRRYLPELRSSNFNTRSFGERVALNMPIQGTAADIMKIAMVNAANRLKAEGLAGRLILQVHDELIAECPEHETEAVSLILREEMENAAKLSVPLVAETRAGKSWFEAKL

SEQ ID NO: 73283 - DNA, 717 bp, Unknown
  Obtained from environmental sample
  misc_feature (1)..(717): n is a, c, g, or t
ttggagcttaagtataacatggcatcagtattgatcgataaatccgattattataaagcagaaaagttattaaaaaatgtcataaaaatgtattgtaaacaaagtaagcccgacagaaaaaaattatcagaatgttattggtatatggcaacgactttaagatatataggtgattataaaaacgcccggacaaatattttaaatgcgatgaaaaacatcaaaaataattctaactatcattgtgaatatgcaaaaatattatataagctgggctcaataaaagaagccgaagaaaattttgaaaaggcaatggaaatcagcgcgaagaaaaaaggaaaattgcatcaagcgacagcgacaatactttcccattatggcctcttccttttatcaacaggtaaaaaagatttagcaataaaaatcatgaataacgcatattcaatattaaaggatacacttggagaggaaaatttatataccatcagattgtcatcacatatttgtaatattttttacatggaaaaaaaatatgctggatcattcgaaaaaatgaaggctgtattcttaaaaactaaaaaaatattaggagatgataatagtgaaacgttaatttgcaaaactaattgctcaaagtggcttataaaaatgagaaaatacgcggatgcgctggattatttagaaactccgtttgttattacggacattaaagaaaaatga

SEQ ID NO: 73284 - protein, 238 aa, Unknown
  Obtained from environmental sample
  misc_feature (1)..(238): Xaa is any amino acid
MELKYNMASVLIDKSDYYKAEKLLKNVIKMYCKQSKPDRKKLSECYWYMATTLRYIGDYKNARTNILNAMKNIKNNSNYHCEYAKILYKLGSIKEAEENFEKAMEISAKKKGKLHQATATILSHYGLFLLSTGKKDLAIKIMNNAYSILKDTLGEENLYTIRLSSHICNIFYMEKKYAGSFEKMKAVFLKTKKILGDDNSETLICKTNCSKWLIKMRKYADALDYLETPFVITDIKEK

SEQ ID NO: 73285 - DNA, 735 bp, Unknown
  Obtained from environmental sample
  misc_feature (1)..(735): n is a, c, g, or t
atggccgaggcgaatatggacaaaagaaggagggtgcaggggcgtatggagnctagtttatgggctcaccgctcctttcaaaaagagtacatgaacaacccgatcaccgcgggcgcggtgtttaaaaacgattggatacggtggaaaaaacttcccgacctgcgccgctacgacggcctcattgcctactgcgacccgtcctttaaaggctcgacaaaaaacgattacaaggcaatcaaagtgtggggcaaagtcggcacggaactgcacaacatcaaaaatttcgtgcgccagtgctcaaccgcggaaatggtgtggtggttttacgacctgcacgagtgggtgtcccggtacgacgtgatttgtgactactatatggaggcaaatttcatgcaggacgttattttggacgagttcaccactgagggcaacttgcggggctaccagctgcccatccgcgccgaccgccgcaaaaagcccgacaagttccagcgtatcgaaagtatcagcccgttgtgggagcgcggctttgtatggtacaacgaggacttgcgcaacgaccgcgacaccctcaccgggctggagcagctgctcgcccttgagaagggcagccgtacgcacgacgacgcgcccgacgcggacgagggcgccatttatctgctgcaaaaaagaacacgaatagaaaccttcgcgccccgcatcgggaagcgaccaacacctaaacactcatggtaa

SEQ ID NO: 73286 - protein, 244 aa, Unknown
  Obtained from environmental sample
  misc_feature (1)..(244): Xaa is any amino acid
MAEANMDKRRRVQGRMEXSLWAHRSFQKEYMNNPITAGAVFKNDWIRWKKLPDLRRYDGLIAYCDPSFKGSTKNDYKAIKVWGKVGTELHNIKNFVRQCSTAEMVWWFYDLHEWVSRYDVICDYYMEANFMQDVILDEFTTEGNLRGYQLPIRADRRKKPDKFQRIESISPLWERGFVWYNEDLRNDRDTLTGLEQLLALEKGSRTHDDAPDADEGAIYLLQKRTRIETFAPRIGKRPTPKHSW

SEQ ID NO: 73287 - DNA, 729 bp, Unknown
  Obtained from environmental sample
  misc_feature (1)..(729): n is a, c, g, or t
ttgaccaactccgtattcgtcccttacaaggatgggctcgacagcgtttccctctccgccaactggatgtggccttgccgcaacccgggtgaagacgcgcggctctacaaggccgtggaggcggcgagcggtttcggcaaaaaaatcaaaatcaatatcccgaccggcaaggatagctgctccatgacgcaggtatatcccgacggcaccaaggtcctagcgcccggcactcttataatccaagcttccggccccgtggccaaccttggaaagaaagtgttacccgtgctcgacaccgaaactccttcgagcctctactatataaatatgtcggggaacaagcaggagctcggcggttcggccttcgcgcagacgctaagcctgctgggcgacagggcgcccgacgtcgacgaggctcgtttcaagacggctttcgccgcagtgcaggaaatggttcaggagggaataatcctcgccggccacgacatctcccagggcggcctcgcgacaacgctcgccgagatgacgttcgcaaacatcaaaggcgggctctctgtgtccggcgtaggcgactcaggcttgtgcgaatacttcttcaatgaaaatcccggcgttgtagttcagattgccgacgataaaaaagagaagttccaatcgatacttgccagtccatggtatcggcgatatgacttctttggtcgccacgccgatcgccgagcgcaagtttga

SEQ ID NO: 73288 - protein, 242 aa, Unknown
  Obtained from environmental sample
  DOMAIN (100)...(236): AIR synthase related protein, C-terminal domain
  misc_feature (1)..(242): Xaa is any amino acid
MTNSVFVPYKDGLDSVSLSANWMWPCRNPGEDARLYKAVEAASGFGKKIKINIPTGKDSCSMTQVYPDGTKVLAPGTLIIQASGPVANLGKKVLPVLDTETPSSLYYINMSGNKQELGGSAFAQTLSLLGDRAPDVDEARFKTAFAAVQEMVQEGIILAGHDISQGGLATTLAEMTFANIKGGLSVSGVGDSGLCEYFFNENPGVVVQIADDKKEKFQSILASPWYRRYDFFGRHADRRAQV

SEQ ID NO: 73289 - DNA, 831 bp, Unknown
  Obtained from environmental sample
  misc_feature (1)..(831): n is a, c, g, or t
ttgatatcatttatcacttggaaaaccgaaaaaggatttgatgttcgcgtggcttataccgaccaaatgggcggagctaatcgaacaagcataaaaagttatcttcaaggtatttacgacaatcccgcgacgcgtgccgactatcttttgttagtgggcgaccatgaagaaattccggcacacccatcaactatttccgatagcagctattacgacaacgaccacattaccgacctttattatgccgaatacaccggagataacttaccggacattcaatacggacgactatcggcaagaaataataaccctcaacagctggttaatcagattgaaaaaatcctggccatggaaaaaatggacactatgccgaccactgattttttcaataaatcaatgctgatttccggatacgattcctattggggatatgttggcaatgcaaccgtgaactacggcgctgccaactatttcaattcggcgaacggaattagcgcgacagttcttttgagttcggttttgcattctcaacaggcatccactgttcggacgtttatcaacaatggtaccggttttgttaattatagcgctcactgtgacgaaaacggattttcggcgccgaaaatcaataaaaccgacgtggcgaattttactaaccaggacaaatatcctctaatcattggaaattgttgcttatcaaatagatttgatgttacagaatgtttcggagaagcgctgcttcgtgcgcaacgcaaaggtgcggtgacttacatcggaacaaccattactcgtattggtacgaagattttcaatggtctgtcggcgcggtaa

SEQ ID NO: 73290 - protein, 276 aa, Unknown
  Obtained from environmental sample
  DOMAIN (1)...(275): Peptidase family C25
  misc_feature (1)..(276): Xaa is any amino acid
MISFITWKTEKGFDVRVAYTDQMGGANRTSIKSYLQGIYDNPATRADYLLLVGDHEEIPAHPSTISDSSYYDNDHITDLYYAEYTGDNLPDIQYGRLSARNNNPQQLVNQIEKILAMEKMDTMPTTDFFNKSMLISGYDSYWGYVGNATVNYGAANYFNSANGISATVLLSSVLHSQQASTVRTFINNGTGFVNYSAHCDENGFSAPKINKTDVANFTNQDKYPLIIGNCCLSNRFDVTECFGEALLRAQRKGAVTYIGTTITRIGTKIFNGLSAR

SEQ ID NO: 73291 - DNA, 639 bp, Unknown
  Obtained from environmental sample
  misc_feature (1)..(639): n is a, c, g, or t
atgatcagtaatgattttaacatcgtctccatagatttttacgccgaatggagggtgactgttccagaaaagtttgttttcaaagttgaagaacccatcgtgctgctgaccaatataataaggagcagcgccagggacatcgtaagctcgtatgaggtggacagcgtcctgaccgacggcaaatcggaaattcaaacgaatatccgcgagctggtaaaccgggtgctggatgagtacgacatcggcatcatggtcacaaatgtgataatccaggacgccgagccgcccacagccgaggtgacggcggcttttaaggctgtcgaggacgcgaagcaaaaaaaggatacccttataaacgaagccaaccgttattataatgaaaatatcccgggcgccagagccgaagccgacaggatcacaaagcaggccgaagccgtaaaagaggcgcgtattaacgaggcgaacggccaggtggccagatttaataaaatgtttgaggaatatattatttatccggaaattacaaagaccagaatgtatcttgagacaatcgaagaaataatgcccggaatgaaaatgtatatcaacagcggcgccggaggcggagatattttaaaattgctggatctgagtaaataa

SEQ ID NO: 73292 - protein, 212 aa, Unknown
  Obtained from environmental sample
  DOMAIN (1)...(149): SPFH domain / Band 7 family
  misc_feature (1)..(212): Xaa is any amino acid
MISNDFNIVSIDFYAEWRVTVPEKFVFKVEEPIVLLTNIIRSSARDIVSSYEVDSVLTDGKSEIQTNIRELVNRVLDEYDIGIMVTNVIIQDAEPPTAEVTAAFKAVEDAKQKKDTLINEANRYYNENIPGARAEADRITKQAEAVKEARINEANGQVARFNKMFEEYIIYPEITKTRMYLETIEEIMPGMKMYINSGAGGGDILKLLDLSK

SEQ ID NO: 73293 - DNA, 507 bp, Unknown
  Obtained from environmental sample
  misc_feature (1)..(507): n is a, c, g, or t
ttggaggtaaatatgaacgggatgaaatacgaaatcctgacttacctggacgcctgcgtcgatattatcgttgatatgggaaatgaaacgccggaattcgggcaaaaagaaaaaatcattaattccataggcatcatgctgggtggttccgcctgtatcttcgcgagccaatgcgcaaagctcgggttgaaaacagccggccccggtataataggaaatgattatttcgggcaaatagtgcggcaggagctcgataaaaacaatgtagatacttccttcttaacagagtccggcaatgtccgcacctcggcgggcatccttctgtgccggggcgcagacagggcgatgctgaccagcgaccagtcaataacggcgctcaaaaccgaagctttatccggggatatggttaaaaacgcgagacatttgcatatatcaagttattatctgctgacaggcattaaggaaaaactgccggagacgctccggcaggcaaaagacacggattga

SEQ ID NO: 73294 - protein, 168 aa, Unknown
  Obtained from environmental sample
  misc_feature (1)..(168): Xaa is any amino acid
MEVNMNGMKYEILTYLDACVDIIVDMGNETPEFGQKEKIINSIGIMLGGSACIFASQCAKLGLKTAGPGIIGNDYFGQIVRQELDKNNVDTSFLTESGNVRTSAGILLCRGADRAMLTSDQSITALKTEALSGDMVKNARHLHISSYYLLTGIKEKLPETLRQAKDTD

SEQ ID NO: 73295 - DNA, 663 bp, Unknown
  Obtained from environmental sample
  misc_feature (1)..(663): n is a, c, g, or t
atgaaggcaacggcaaccaacggcggctaccagttccgcagcgtggaggagcttgcgccctacgagcgcaacccccgcacacacacgccgaagcaaatcagggccatacgcaagtcaatagagcggttcgggttcgccggcttgatagccagcgggcacgccaggctggaggccgccaagcagatatacgccgacaagggcgtgatataccccatacccggaaaaaagaagggcgccgcgccgttcccccttggcgcggtgcccgtgcaggacgcgaccggctggacggaggaggtgttcaaagccttcgtcatagccgacaaccgcataccggaacagtcaagctggaacaggctcatgctggcggaggagatgccgctgatagaggacgaggacctcaccgcgctcatgggcgacatcgacatggacgcgctggtggccgtccacaaccagggcgaaaggttcgagttcagggagggcgcctataccgcctccgacgaaacgtccgatgccgagcaggaaacggagccggagccagaggacaaagaaaaaacggccagcggcaagtaccccgtcacattcgtgcttgacggcgcggagtggaaacggtggttggagttaaagagggccgtgccagggctgacccacaagaagctgttgtga

SEQ ID NO: 73296 - protein, 220 aa, Unknown
  Obtained from environmental sample
  misc_feature (1)..(220): Xaa is any amino acid
MKATATNGGYQFRSVEELAPYERNPRTHTPKQIRAIRKSIERFGFAGLIASGHARLEAAKQIYADKGVIYPIPGKKKGAAPFPLGAVPVQDATGWTEEVFKAFVIADNRIPEQSSWNRLMLAEEMPLIEDEDLTALMGDIDMDALVAVHNQGERFEFREGAYTASDETSDAEQETEPEPEDKEKTASGKYPVTFVLDGAEWKRWLELKRAVPGLTHKKLL

SEQ ID NO: 73297 - DNA, 570 bp, Unknown
  Obtained from environmental sample
  misc_feature (1)..(570): n is a, c, g, or t
atgaaaatagtaggtgaatactcttttaatggtggcaaagaggcagtccatcatcgctatccaaaattgctggtagaaatacgcgacattatcaagtctgttgatgcgtatgaacataaaacaaaaaagagcaaagaaaaaaccatgtcgggaaaaattctttttgcgccaacagcacttaataaagccataaagaaattgttcctagaaaaagaatggatgcctgtccgcgaaaaatgcgaatatcctacacagttctatgtgaaagactacaagccaaaaccactccacaaaggagcatttcgcgaaatggatttcgtcaaacagaaactgggagtcgaagtgcaatttggcaagtattcattcatggtttacaatgttgccgccaaaatgaccatcttcaaaaatctgggccatatagatactggaattgaaatagtcccagtgaaagcccttgcagatgaaatgagcagtggggtaagttatttcgagcaatttgtgtgggatttagaacatcgcgggacatcaaatattgatgtgccagttctagtaattggcatagatgtataa

SEQ ID NO: 73298 - protein, 189 aa, Unknown
  Obtained from environmental sample
  misc_feature (1)..(189): Xaa is any amino acid
MKIVGEYSFNGGKEAVHHRYPKLLVEIRDIIKSVDAYEHKTKKSKEKTMSGKILFAPTALNKAIKKLFLEKEWMPVREKCEYPTQFYVKDYKPKPLHKGAFREMDFVKQKLGVEVQFGKYSFMVYNVAAKMTIFKNLGHIDTGIEIVPVKALADEMSSGVSYFEQFVWDLEHRGTSNIDVPVLVIGIDV

SEQ ID NO: 73299 - DNA, 525 bp, Unknown
  Obtained from environmental sample
  misc_feature (1)..(525): n is a, c, g, or t
atgttccacagagaagtggcgacacctgaaacctatgtcagacaagaatggaatcgagagactagcatgcctgccaaaatagtggccctggccaaccagaaggggggagtgggtaagaccacttccgccatcaatatagctgcctcattggcgatgatggagaaattggtgctcttgattgactttgacccccaagggcacagcaccacgggccttggcttccccaagcccagccaagattctggctcctacgcgctgatgaagggcgcaccgattgaatcgctgatattgaccaccgaagtcccgatgcttcaggtcatcccggccggcaaggacttagcccaattggaattcgagctattcgagctgccgcagctgcaggagcttcgcatggccatgcagcctataattgaccgctatgactttatcttgattgattcgcttccggcgcttgggatgatcaccctgaacgccctgactgccgccgatgaggtaatagtgccgatgccatctcgtccaatctga

SEQ ID NO: 73300 - protein, 174 aa, Unknown
  Obtained from environmental sample
  DOMAIN (28)...(174): CobQ/CobB/MinD/ParA nucleotide binding domain
  misc_feature (1)..(174): Xaa is any amino acid
MFHREVATPETYVRQEWNRETSMPAKIVALANQKGGVGKTTSAINIAASLAMMEKLVLLIDFDPQGHSTTGLGFPKPSQDSGSYALMKGAPIESLILTTEVPMLQVIPAGKDLAQLEFELFELPQLQELRMAMQPIIDRYDFILIDSLPALGMITLNALTAADEVIVPMPSRPI

SEQ ID NO: 73301 - DNA, 414 bp, Unknown
  Obtained from environmental sample
  misc_feature (1)..(414): n is a, c, g, or t
gtgtccatcgctaaaaggtatgaactgcccaaaagaatagttgctggcaatacccgggaaaaatcagccccgaccagcatccgcgccaaatgcggaataatcagcccaacccaatggataatgccgctgacgctgactgccgccgcaatcatcatggtagcacaagccaatgtcagaaaccgggtgaatttgatgctgacacctaaagtttgcgcttcttcctccccgacactcagcacattgattcgccagcgtgccagatacaaaattacggcaggaatcaaaaccggcagagttatccataaaacatcagtcgtgccaactttcgataagccgcccatcagccaaaaggtgagtgctggtaaggtgtccatcgggtcggccagatatttaagcactgagatgcctgcttga

SEQ ID NO: 73302 - protein, 137 aa, Unknown
  Obtained from environmental sample
  misc_feature (1)..(137): Xaa is any amino acid
MSIAKRYELPKRIVAGNTREKSAPTSIRAKCGIISPTQWIMPLTLTAAAIIMVAQANVRNRVNLMLTPKVCASSSPTLSTLIRQRARYKITAGIKTGRVIHKTSVVPTFDKPPISQKVSAGKVSIGSARYLSTEMPA

SEQ ID NO: 73303 - DNA, 510 bp, Unknown
  Obtained from environmental sample
  misc_feature (1)..(510): n is a, c, g, or t
gtgcttaaatatctggccgacccgatggacaccttaccagcactcaccttttggctgatgggcggcttatcgaaagttggcacgactgatgttttatggataactctgccggttttgattcctgccgtaattttgtatctggcacgctggcgaatcaatgtgctgagtgtcggggaggaagaagcgcaaactttaggtgtcagcatcaaattcacccggtttctgacattggcttgtgctaccatgatgattgcggcggcagtcagcgtcagcggcattatccattgggttgggctgattattccgcatttggcgcggatgctggtcggggctgatttttcccgggtattgccagcaactattcttttgggcagttcataccttttagcgatggacactttaagccggagtattgccgcgatagaaattcaggtcggaatttttacagcggtagttggcgcacctgtttttgtctttttattaatgaaagccaaaaaaggctgggcgtga

SEQ ID NO: 73304 - protein, 169 aa, Unknown
  Obtained from environmental sample
  DOMAIN (1)...(163): FecCD transport family
  misc_feature (1)..(169): Xaa is any amino acid
MLKYLADPMDTLPALTFWLMGGLSKVGTTDVLWITLPVLIPAVILYLARWRINVLSVGEEEAQTLGVSIKFTRFLTLACATMMIAAAVSVSGIIHWVGLIIPHLARMLVGADFSRVLPATILLGSSYLLAMDTLSRSIAAIEIQVGIFTAVVGAPVFVFLLMKAKKGWA

SEQ ID NO: 73305 - DNA, 720 bp, Unknown
  Obtained from environmental sample
  misc_feature (1)..(720): n is a, c, g, or t
ttgagcaaaaggggcgttaacgatatggaagagtttagattctggctgaaatcatctttcgcttccacctttattcatttttttgctattgtctntgcggcatttcttttaggaacaccgcatcaacttgagtcgaaagaaagacagtctattgatgtagaattggtgcatgtcctgccggttccaacaattcaaaatgacgcgcctcaaccggaagaagcgccgccgcaggcacctctgccggaaaaagcgccgccaacgccggaaaaaacaccgccagcggcaattaaaccgccacctcaacatccgccaaatgttgctcctgctccagcagaattggaaacagccgctgaaccagcagcaattcctgcgttgcttggcacagcagacgctgattccagcaatgcgggcagtgaaggaataccggcaaatgcctcaatcgcgggcggcagcagcaacggcagtggcggtggtggtggcagtgttcccaaaggcggcgggaggcctgaccgaaaagcctatccaacacatacacctttgccagaatatcctgttgacgcaagaactgaaaatgttgaaggaaaagtattaatcagagtattaattgatgaaaaaggcatagtccaagaagcgcagataaccaaaagttccggtatcagttctttagaccaagcggcgttaaatgcgttgcgtaaatggaaattcgcgccagcttattga

SEQ ID NO: 73306 - protein, 239 aa, Unknown
  Obtained from environmental sample
  DOMAIN (180)...(214): Gram-negative bacterial tonB protein
  misc_feature (1)..(239): Xaa is any amino acid
MSKRGVNDMEEFRFWLKSSFASTFIHFFAIVXAAFLLGTPHQLESKERQSIDVELVHVLPVPTIQNDAPQPEEAPPQAPLPEKAPPTPEKTPPAAIKPPPQHPPNVAPAPAELETAAEPAAIPALLGTADADSSNAGSEGIPANASIAGGSSNGSGGGGGSVPKGGGRPDRKAYPTHTPLPEYPVDARTENVEGKVLIRVLIDEKGIVQEAQITKSSGISSLDQAALNALRKWKFAPAY

SEQ ID NO: 73307 - DNA, 342 bp, Unknown
  Obtained from environmental sample
  misc_feature (1)..(342): n is a, c, g, or t
atggggnnnncccacggacagattcggccgagaatttgcccggaagaatggaatctttcacatcctgaaatcgttcgcaaaattgcggaaaattaccttgcggcgggcagcgacattattctgacgaacactttcggcgcaaaccgttttcaattggaacattacggtctcgctgaaaaagtaagagaaatcaataaaacaggagccgctcttacccgtgaagtctgccgtgataaagcgattaccgccgcaagcatggggcctagcggaaaactttttcttatggagaggtttcacaggaagagctttttgacgcgttttacgaacaggcgcaaagtttga

SEQ ID NO: 73308 - protein, 113 aa, Unknown
  Obtained from environmental sample
  misc_feature (1)..(113): Xaa is any amino acid
MGXXHGQIRPRICPEEWNLSHPEIVRKIAENYLAAGSDIILTNTFGANRFQLEHYGLAEKVREINKTGAALTREVCRDKAITAASMGPSGKLFLMERFHRKSFLTRFTNRRKV

SEQ ID NO: 73309 - DNA, 486 bp, Unknown
  Obtained from environmental sample
  misc_feature (1)..(486): n is a, c, g, or t
ttgaaagaaggcggcgctcaatggatagtcgttgagacaatggctgatacaggtgaaatggaaattgcggtccgcgccgcagccgccgcaggtttaccgactgtcgcttccatgacctatgaaaaaactccctccggttaccataccattatggggcaaactccaaatgacgcagttgacgcggcggttaaagcaggagcctcttatatcggggcaaattgcggctgcggaattgactcttatgtggaaatcgcctccgtattacgctcccttactgaacttccggtctggataaaagcaaacgcagggcttccgcagcttatcggcggaaaaaccttttacggcatgactgccgataaatacgcgtcttatgtaaaatacatccttgaagcgggcgcaagtgtaatcgggggatgctgcggaacaaaccctgaatatataaaaaaaatacgctccgctgttgacgaatggaacactaatcactga

SEQ ID NO: 73310 - protein, 161 aa, Unknown
  Obtained from environmental sample
  misc_feature (1)..(161): Xaa is any amino acid
MKEGGAQWIVVETMADTGEMEIAVRAAAAAGLPTVASMTYEKTPSGYHTIMGQTPNDAVDAAVKAGASYIGANCGCGIDSYVEIASVLRSLTELPVWIKANAGLPQLIGGKTFYGMTADKYASYVKYILEAGASVIGGCCGTNPEYIKKIRSAVDEWNTNH

SEQ ID NO: 73311 - DNA, 837 bp, Unknown
  Obtained from environmental sample
  misc_feature (1)..(837): n is a, c, g, or t
ttgaccgagattaaagtcctctgccgcagcgaatcccgcggacagcgggctattaacgccgcctttgtccgcctaaaagaattggaagataaatttaattactttgacccgcggagtgaattgtccgaaatcaaccgcagcgcctacggccgggatttgtccatcagcgaggacatgcaaaaaatcttagtcttgtctctggaaggcagcgcaatttccaacggggcctttgacatcacggtcacaccgattaccagaatgtacggcttcggcacggcagccaagcaagtcccgtccgcgcggcaaattcaaaaccagttacagagtgtcggctggcaaaaggtgcagctctctacagaaaaccgcacggtgcgtctcctcgatccccgcacccggatcgacctcggcggcatcgccaaaggctatgcggtggacgaagcggtgaccgttctccggaaacacggcatccgtcacgccttagtcaatgcaggcgggaatatttacgcgctgggtaaaaatcgcggacagccctggcgtatcggcgtccgcaatccgcgcgctgtcacggaaaatatagaaatactggaattaaacaatctggcctgcgcaacctccggcgattacgaacaatattttatggacaacaccaatcagcgcaacgcgcatatttttaatccgcggacggggcgtccggccaatctggaaaacaatattgcttccgtcacggttctggcagacaccgcggcgcgcgccgatatgctctccactgcttgtttcgtcctaggcgaggaaaaatccgcagtcatcccgganagaaaaatatttttacagccgtga

SEQ ID NO: 73312 - protein, 278 aa, Unknown
  Obtained from environmental sample
  DOMAIN (1)...(275): ApbE family
  misc_feature (1)..(278): Xaa is any amino acid
MTEIKVLCRSESRGQRAINAAFVRLKELEDKFNYFDPRSELSEINRSAYGRDLSISEDMQKILVLSLEGSAISNGAFDITVTPITRMYGFGTAAKQVPSARQIQNQLQSVGWQKVQLSTENRTVRLLDPRTRIDLGGIAKGYAVDEAVTVLRKHGIRHALVNAGGNIYALGKNRGQPWRIGVRNPRAVTENIEILELNNLACATSGDYEQYFMDNTNQRNAHIFNPRTGRPANLENNIASVTVLADTAARADMLSTACFVLGEEKSAVIPXRKIFLQP

SEQ ID NO: 73313 - DNA, 780 bp, Unknown
  Obtained from environmental sample
  misc_feature (1)..(780): n is a, c, g, or t
atggccgcgggaatcgacaatcttgacgacaagcacgccaatacgcaggttcaaaaggccgtgggctatgcccgcgtcgccgaactgggacgcgatccgcaatacgcaaaggcggcttctttcttctgggataccgtgacgcgtaaccgttcccttgccttcgggggcaacagcaggcgggaacattttccccgcgccgccgatacccgcagctatattgaagatcgggaaggccccgaatcctgcaacacctacaatatgttaaaactcacggaaaccctcttcaggatggagccaaaggccgaatacgccgatttttacgagagggccgtgttaaaccatatcctttccgcccagcatccggcgcacggcggttatgtgtatttcactccagtgcgccctcagcattacagggtatattccgcgccgaacagcgccatgtggtgctgcgtgggaaccggtatggagaaccacggcaaatacggcggatttatttatacccataccgataacgccctgtatgttaatctttttgccgcttcgcggctgaactggaaagaaaaaggcgtcatcgttacgcaggatacgaggttccccgacggggaaagcagcaggctgactgtccgcgccgataaaccggtccgcttttctttggccttacggcacccggcctggacggacggcatgaaggcggccgtcaacggcgaagactattcgcataacacgcggccctcgtcatacatggtaattgaccgcacctggaataacggcgacgtgtag

SEQ ID NO: 73314 - protein, 259 aa, Unknown
  Obtained from environmental sample
  DOMAIN (1)...(259): Putative glycosyl hydrolase of unknown function (DUF1680)
  misc_feature (1)..(259): Xaa is any amino acid
MAAGIDNLDDKHANTQVQKAVGYARVAELGRDPQYAKAASFFWDTVTRNRSLAFGGNSRREHFPRAADTRSYIEDREGPESCNTYNMLKLTETLFRMEPKAEYADFYERAVLNHILSAQHPAHGGYVYFTPVRPQHYRVYSAPNSAMWCCVGTGMENHGKYGGFIYTHTDNALYVNLFAASRLNWKEKGVIVTQDTRFPDGESSRLTVRADKPVRFSLALRHPAWTDGMKAAVNGEDYSHNTRPSSYMVIDRTWNNGDV

SEQ ID NO: 73315 - DNA, 882 bp, Unknown
  Obtained from environmental sample
  misc_feature (1)..(882): n is a, c, g, or t
atgatcttgggcgcggccgccccgtggtgggagacccactacccgcccaacgggtgggggtgccgttgtttcgttgacgtggtgagcaaaggcgagatggaggcccttgggaaggtgggcgaggacggcaagcngaagccggacatcccgccgccggacgccatgcggaaggtcaagtatggcggccgcgagatcgaggtcccgaagggcgttgacccggggtgggcctacgcgcccgggaagagcctcgaacccgtcaggcccttcccggcggcgcccaacgcctcgccggacaaggtgcggctggcggagaagcagatggagaaggcgccgcccgagctggcggcgaagctgagggcggagatggaggccagggctgttgtcgcgccactagagaaaagccccgctccccgcccagcttacagtccagaccccattcgggaggcgaaggcactggagttccacgagcggatgaagcaagaggtgctggaggcgacaagcaatggctactcgtgcccagtgcctgtggtgagcggcgatgcaaaggagatacttcttgaggaactggcgaagaggaagtggctagaactcacagaagccgagataaatgggttactcaaaaagctagagcaatccgatgcggtgtgcataacgcttcccgacaggcatggagacctagaacctgtcagaatcgtgatgtatagggaatacactgattttcgtatggatggtcccgctgacccagcctacagtgacggctacggccgctacagtccaccgctgccgcctgatgtcgaatacaagctgaccatgtgccatgagatagttcacgcgattctgcccccggtggcgaggaacacagccagatgcacgatgacttga

SEQ ID NO: 73316 - protein, 293 aa, Unknown
  Obtained from environmental sample
  misc_feature (1)..(293): Xaa is any amino acid
MILGAAAPWWETHYPPNGWGCRCFVDVVSKGEMEALGKVGEDGKXKPDIPPPDAMRKVKYGGREIEVPKGVDPGWAYAPGKSLEPVRPFPAAPNASPDKVRLAEKQMEKAPPELAAKLRAEMEARAVVAPLEKSPAPRPAYSPDPIREAKALEFHERMKQEVLEATSNGYSCPVPVVSGDAKEILLEELAKRKWLELTEAEINGLLKKLEQSDAVCITLPDRHGDLEPVRIVMYREYTDFRMDGPADPAYSDGYGRYSPPLPPDVEYKLTMCHEIVHAILPPVARNTARCTMT

SEQ ID NO: 73317 - DNA, 837 bp, Unknown
  Obtained from environmental sample
  misc_feature (1)..(837): n is a, c, g, or t
gtgaacagttattcatcggccatagcctccgccatcagggcgattgacagcaaaaacataataattgtggggtcgcccaattggagttcgcaaccgcaaaacgtgagcgtgtccggggacaatatcgcgtattcgatacacttttacgcgaatcagcatcaagtcggaggaaacgatgattacagtaaaaacgtggatcaggcgctgaaccaagggaaggcggttttcgccacggaatggggaacgtcgaacgctgacgcgaagggggggtatagcgcggcgcagtcggataagtggattgactaccttaacaacaaaaaaatcggatggacgaattggtcggtaaccaatgacgccaccaacgtcacttccatactgagcaaaagcgggaccaacggaaactgggcgacgagcgaccttaccgaatccggcaaatatatccgcggcaaattgcccaccggcggcaacgccacctacaaagtcaccgtcacccagcccgcgagcggcggcaccatagacgtctctaagctcaaggcgagttacggctgggagggcgagcttgacctcaccgcggttccggcggccggttgggaactgaagagctggacgggggacgcctcaggaaatacgaactcgctgaagggcaatttctatggattgagccttaatatatccgccgagttcttcaactgcggggtgataaagaacggccattttgcatacgatgtggtgaattggacgcccacccccaccggcaacgcgaaagcgaccgcgacggccgtcaactcggagtgcgaagtcaaaataacgaccgcggcactggcgtcggcaacgtga

SEQ ID NO: 73318 - protein, 278 aa, Unknown
  Obtained from environmental sample
  misc_feature (1)..(278): Xaa is any amino acid
MNSYSSAIASAIRAIDSKNIIIVGSPNWSSQPQNVSVSGDNIAYSIHFYANQHQVGGNDDYSKNVDQALNQGKAVFATEWGTSNADAKGGYSAAQSDKWIDYLNNKKIGWTNWSVTNDATNVTSILSKSGTNGNWATSDLTESGKYIRGKLPTGGNATYKVTVTQPASGGTIDVSKLKASYGWEGELDLTAVPAAGWELKSWTGDASGNTNSLKGNFYGLSLNISAEFFNCGVIKNGHFAYDVVNWTPTPTGNAKATATAVNSECEVKITTAALASAT

SEQ ID NO: 73319 - DNA, 525 bp, Unknown
  Obtained from environmental sample
  misc_feature (1)..(525): n is a, c, g, or t
ttggtcaacaataccggcctggacttcaagagcgccagcgcgggaccaggcgccattgtgtacgaacagttcggcaccatccatttgtacgacatagcggcaaaccagagcaaaaaggtggaaatcacgctgaccggcgacatgccaagcctgcggacgcgcttcgagccgttggcgagccgcatcgaaaacgccgacatatcgccgaatggggccagggcggtgttcgaggccaggggcgaaatcttcactgtccctgcggaaaagggcagcgtcaggaacatcaccggcacgccaggcgtgatggagcgcaatcccgcttggtcgcccgacggcaagtccatagcgtactattccgacgcgtcgggcgaatacgcgctgcacatcagggcgcaggacggctcatgcgccccgcgcgtgatcaacctggagcccaccttctacttcggcccagtgtggtcgcctgattccaaaaaaatagccaccatagacaagcgcaacaacctctggctcattgacgtctaa

SEQ ID NO: 73320 - protein, 174 aa, Unknown
  Obtained from environmental sample
  DOMAIN (93)...(129): WD40-like Beta Propeller Repeat
  misc_feature (1)..(174): Xaa is any amino acid
MVNNTGLDFKSASAGPGAIVYEQFGTIHLYDIAANQSKKVEITLTGDMPSLRTRFEPLASRIENADISPNGARAVFEARGEIFTVPAEKGSVRNITGTPGVMERNPAWSPDGKSIAYYSDASGEYALHIRAQDGSCAPRVINLEPTFYFGPVWSPDSKKIATIDKRNNLWLIDV

SEQ ID NO: 73321 - DNA, 696 bp, Unknown
  Obtained from environmental sample
  misc_feature (1)..(696): n is a, c, g, or t
atgattgaacaagttaaacgcgccggtagaaaacgcgattatgactgcctaatcggtctctccggcggcgtggacagttcttatctggcgtatgtagctgcggataaatggggacttcgaccgcttattctaacggtggatgttggttggaatctgaacgtggctattgagaatgtagagaagatagttaaaggtcttggattggatatggttacggaggtagtcaactgggaggagatgaaagatctgcaacgggcttattttatgtcgcaggtgccatatcaagatattcctcaggatcacgctatatttgccgctgtttacaattttgcagcaaaacataacttcaaatatgttattacaggaggcaatttttccactgaatgtgtgcgggaaccaaacgagtgggttcatcaaaacgatattgctcaaattaaagatatacacaagaaattcgggaaagttccgttgaagactttcccattatgcggaatgttcaaataccgtctctattatcgttacttaaagggtatgcacattgttaagcctttagattggataccatacgttaaagcagatgctatacgcgaattgggagaacgattcggctgggtgccttacaaaaacaaacacttcgaaaacgtctttacccgtttctatgaaggctattggctgactcataaattcggggtatga

SEQ ID NO: 73322 - protein, 231 aa, Unknown
  Obtained from environmental sample
  misc_feature (1)..(231): Xaa is any amino acid
MIEQVKRAGRKRDYDCLIGLSGGVDSSYLAYVAADKWGLRPLILTVDVGWNLNVAIENVEKIVKGLGLDMVTEVVNWEEMKDLQRAYFMSQVPYQDIPQDHAIFAAVYNFAAKHNFKYVITGGNFSTECVREPNEWVHQNDIAQIKDIHKKFGKVPLKTFPLCGMFKYRLYYRYLKGMHIVKPLDWIPYVKADAIRELGERFGWVPYKNKHFENVFTRFYEGYWLTHKFGV

SEQ ID NO: 73323 - DNA, 579 bp, Unknown
  Obtained from environmental sample
  misc_feature (1)..(579): n is a, c, g, or t
atgactgagaaatttaacggaaaaacgcttctaatcacaggtggaaccggctctttcgggaatgccgtgcttaaacgttttcttaattccgatgtaaaagaaatccgcatattcagccgcgatgaaaaaaaacaggatgatatgcgccatgaactgcaaaacaacaaagtaaaattttatataggcgacgtgcgggataaatattcagtggacggagcaatgagcggcgttgactatatatttcacgcggctgcgcttaaacaggttccttcgtgtgaattctttcccatgcaggcggtaaaaacaaatattatcggaacggaaaatgttcttgattctgcgatagagcatggcgtaaagcgaatcgttgtattaagtacagataaagcctgttatccgataaacgcgatgggcatatcaaaggccatgatggaaaaggtagcgattgcaaaaggccgggcgctgggggaaaacngcgaatactgtaatttgcgctactcgttacggcaatgtaatggcaagccgaggttctgttattcccttgtggatagatcaaataaaagctcggtaaggaaataa

SEQ ID NO: 73324 - protein, 192 aa, Unknown
  Obtained from environmental sample
  DOMAIN (8)...(158): short chain dehydrogenase
  misc_feature (1)..(192): Xaa is any amino acid
MTEKFNGKTLLITGGTGSFGNAVLKRFLNSDVKEIRIFSRDEKKQDDMRHELQNNKVKFYIGDVRDKYSVDGAMSGVDYIFHAAALKQVPSCEFFPMQAVKTNIIGTENVLDSAIEHGVKRIVVLSTDKACYPINAMGISKAMMEKVAIAKGRALGENXEYCNLRYSLRQCNGKPRFCYSLVDRSNKSSVRK

SEQ ID NO: 73325 - DNA, 792 bp, Unknown
  Obtained from environmental sample
  misc_feature (1)..(792): n is a, c, g, or t
ttgaagacgtggaggttgtcccttgaaagcgatggcgaggggatcgggctttttcgaagcgaattcgtataccttggcagggaggattatcctggcgatgatatccaatacgaaagctatcgaaaagtcgctgaaaaaacgaacgaaaagatggtaattatccgtacccttgacatcggggcggataaaagagctgattatttcaagcttccccatgaagaaaaccccgcgcttggaatgagggcgatccgcatctgtctgacccgcccggaactgttcaagacccaactccgcgcgatttacagggcgtccgtgcatggcaatgtggcgattatgttccccatgatttcaagcgtgggagagctgcagcgcgcgaaaaaatacgcggaagaagcccgcagcgagcttctggaaaaaaacataccgtttaatgccaatgttccaatagggattatgattgaaacaccggcttccgttataatcagcgatcttttagccagggaatgcggctttttcagcataggaaccaatgatcttacgcaatacacactggctgtggacagggagaatgagacaatcagtgaatttgtggataccccccacgaagcgatactgcggatgatcaaaataacgacggataacgcgcataaagcgggcatttggtgcgggatttgcggctcgcttggcgcggatatgaatcttacaaaaatgtttattgaaatgggcgtggacgagctttcggtagacccttcgtatatacttaaaattcgcaggcgtatagcggaaatatag

SEQ ID NO: 73326 - protein, 263 aa, Unknown
  Obtained from environmental sample
  DOMAIN (1)...(263): PEP-utilising enzyme, TIM barrel domain
  misc_feature (1)..(263): Xaa is any amino acid
MKTWRLSLESDGEGIGLFRSEFVYLGREDYPGDDIQYESYRKVAEKTNEKMVIIRTLDIGADKRADYFKLPHEENPALGMRAIRICLTRPELFKTQLRAIYRASVHGNVAIMFPMISSVGELQRAKKYAEEARSELLEKNIPFNANVPIGIMIETPASVIISDLLARECGFFSIGTNDLTQYTLAVDRENETISEFVDTPHEAILRMIKITTDNAHKAGIWCGICGSLGADMNLTKMFIEMGVDELSVDPSYILKIRRRIAEI

SEQ ID NO: 73327 - DNA, 708 bp, Unknown
  Obtained from environmental sample
  misc_feature (1)..(708): n is a, c, g, or t
gtgaagatcgtcgataccgtttttggcgatgtagcttacgctacagacgatctcttccctgagaaccactggtcgcactccacggatctgaaaacctatagttacgatgttaacaaggccaaagccctcttggagggagccggttacgttatgggctctggtggttattacgagaagaacggcaaggtcttccatttgaaatacgatgtggtggattccacaaacggaaggcgaatagcacagctgattcagcaatattggaaagctataggcgtggagctggagataatcactcaggacttcgccaccctggctttcacaaaactcttcccctcgaacagttccggcgctccccgtgctgtcactgccgccgactttgactgctatgccttgggcttcggcgttgaagccgacccggacgagtaccgtgattattttgtgacaacgacaagcccgggtagctggaactttatcacctactcaaatcctgaggtcgataagcttttcaaagaacagctccttttaaccgaccccaaccaacgcgccgccgccttccacaaaataggcaagtacttcagcgaagacatcccctggatacccctctatggagctaaaaacgtcaccggcgtccgtgatcgagtgaagggctttgtggcggattaccgcggcgttacgttccagattgagaagtggactattgactcttaa

SEQ ID NO: 73328 - protein, 235 aa, Unknown
  Obtained from environmental sample
  misc_feature (1)..(235): Xaa is any amino acid
MKIVDTVFGDVAYATDDLFPENHWSHSTDLKTYSYDVNKAKALLEGAGYVMGSGGYYEKNGKVFHLKYDVVDSTNGRRIAQLIQQYWKAIGVELEIITQDFATLAFTKLFPSNSSGAPRAVTAADFDCYALGFGVEADPDEYRDYFVTTTSPGSWNFITYSNPEVDKLFKEQLLLTDPNQRAAAFHKIGKYFSEDIPWIPLYGAKNVTGVRDRVKGFVADYRGVTFQIEKWTIDS

SEQ ID NO: 73329 - DNA, 429 bp, Unknown
  Obtained from environmental sample
  misc_feature (1)..(429): n is a, c, g, or t
gtggactccccatctaaagaagagtttatctccgtttctccggatgaaacacggcagtttggggaaaaaatcggaaatctccttaaatcaggcagtatcgttgccctgcgtggaaagctgggggccggaaaaacggtgcttacccagggtatagcccgggctttgggaattacggagacagtaaccagccccagttatacgattatcagcgaatatcaggggatcctgcccttgtatcacatggacgcatacaggctttccggggaagaagatttccgccttgccggaggagaagaattgctttacggaacggggatttccgttgttgaatggcccgaacggattaacctttcaacaaccgacgtaaatgtagaaatcgagattctcgaagacggaaggcgatatatccgttttcaccttctttcatga

SEQ ID NO: 73330 - protein, 142 aa, Unknown
  Obtained from environmental sample
  DOMAIN (17)...(136): Uncharacterised P-loop hydrolase UPF0079
  misc_feature (1)..(142): Xaa is any amino acid
MDSPSKEEFISVSPDETRQFGEKIGNLLKSGSIVALRGKLGAGKTVLTQGIARALGITETVTSPSYTIISEYQGILPLYHMDAYRLSGEEDFRLAGGEELLYGTGISVVEWPERINLSTTDVNVEIEILEDGRRYIRFHLLS

SEQ ID NO: 73331 - DNA, 825 bp, Unknown
  Obtained from environmental sample
  misc_feature (1)..(825): n is a, c, g, or t
gtgtactcggcgcagcgcatggcggagcatttgcataccaaatttgccgnatgtggaggtggtgattacgcaccgcgaacaaaaaataaaatcaacgctgccatgaaggctttgatacttgcagcagggcttggcacacgcctaaagccgcttacaaacgaagtgccgaaagcgttggtgtcggttggcggagtgccgatgttggagcgcagcttgaaatttttggcagggcagggcgttacggagtttatagtaaacgtacatcactttgccgataaggtagaagattttttggcgcataacaacaacttcggcttaaaggttgcgatttcagacgagcgcaatatgcttttggaaacaggcggcggcttacgccacgcctcgtggttctttgacgatggaaaaccttttttgctgtacaacgtggatattcttacctcgttgaacgtgcaggaaatgtatcggcagcacgtgcagagcgcagcgttggcaacgcttgccgtcagcaaccgccattcttcgcgctactttttatttaacgcaaaaaacaaactttgcggttggcgaaacgtaaaaacaggcgaggaaaagcttccgctgcaaaccaatgaaacgcttacgccgcttgcctttggcggagtacacattattagccccgaaatttttaagcacttggataatttcggcgaaaaattttccatagtagatgtgtacctatcgcttgcggtttctcacctcattattggatacgatatgcacaacgcgcagtggcttgatgttgggaagctggaaactctggagaaagcgaacgccatgttttgctga

SEQ ID NO: 73332 - protein, 274 aa, Unknown
  Obtained from environmental sample
  DOMAIN (36)...(271): Nucleotidyl transferase
  misc_feature (1)..(274): Xaa is any amino acid
MYSAQRMAEHLHTKFAXCGGGDYAPRTKNKINAAMKALILAAGLGTRLKPLTNEVPKALVSVGGVPMLERSLKFLAGQGVTEFIVNVHHFADKVEDFLAHNNNFGLKVAISDERNMLLETGGGLRHASWFFDDGKPFLLYNVDILTSLNVQEMYRQHVQSAALATLAVSNRHSSRYFLFNAKNKLCGWRNVKTGEEKLPLQTNETLTPLAFGGVHIISPEIFKHLDNFGEKFSIVDVYLSLAVSHLIIGYDMHNAQWLDVGKLETLEKANAMFC

SEQ ID NO: 73333 - DNA, 885 bp, Unknown
  Obtained from environmental sample
  misc_feature (1)..(885): n is a, c, g, or t
atgctgcaggagtgtgtaaaattatttgaactttggagcggagaacagctgcagtcgtcaaaggagttgacgcaggcagggtctaaccgccgctactttcgcctctgctcggcaagcaagacggcagtggtttgctacggcagcaacgttcaagaaaatcagtgtttcgtaaggttatcgcaacacttttttaatcaaggtcttaacgtgccacaggtatttgccgtttcggactgcggcagctactacctgcagcaggactttggcgatgtttcgctttttgatgtgattgccaatgggcgtaccacaggcgtttttttagatgatgaaaaatacgcgctgcgcaaagcagtggctgcgctgccgcgccttcagtacgagggtgcgcaagggcttgacttttctatatgctacccacaggcagaatgggacgcaagttctatcatgtgggatttgagctactttaaatactacttcctcaagcccaccttcgaggactttaacgaggagctgctggagcgcgattttgccaagctgtgcaagcttttgctgagcgaaaaaaacagctgctttatgtaccgcgattttcagtcgcgcaacgtgatgtggcaggaagaaaaaccgtactttatcgattttcaggggggcagaaaaggagtatctgcctacgatgtagcctcttttctgtaccaagctaaggcaaacttttctgaggagctgcgcgatgagctgctgctagtgtacctcgaaaatgctgcgaaatatgccaaaaataatattgccgattttaaaaaaagctgctgcaatatgttttgctgcgcaccttgcaggtggctggggcttacggctatcgcggatactttgagcgcaggntgcattttttga

SEQ ID NO: 73334 - protein, 294 aa, Unknown
  Obtained from environmental sample
  DOMAIN (19)...(261): Phosphotransferase enzyme family
  misc_feature (1)..(294): Xaa is any amino acid
MLQECVKLFELWSGEQLQSSKELTQAGSNRRYFRLCSASKTAVVCYGSNVQENQCFVRLSQHFFNQGLNVPQVFAVSDCGSYYLQQDFGDVSLFDVIANGRTTGVFLDDEKYALRKAVAALPRLQYEGAQGLDFSICYPQAEWDASSIMWDLSYFKYYFLKPTFEDFNEELLERDFAKLCKLLLSEKNSCFMYRDFQSRNVMWQEEKPYFIDFQGGRKGVSAYDVASFLYQAKANFSEELRDELLLVYLENAAKYAKNNIADFKKSCCNMFCCAPCRWLGLTAIADTLSAGCIF

SEQ ID NO: 73335 - DNA, 747 bp, Unknown
  Obtained from environmental sample
  misc_feature (1)..(747): n is a, c, g, or t
atggacaataagaatctcatgctgaccattgcgctgtgcgttatcattcttgtcggctggaatcattttgcgggttatatgggctggatcgccaagcccgatcctgcgcagacggcgcaacagcaaaaagccgcccagcagccggacggaggaaaaagcgaggctcccgctccgaacgttgccgcgtctcccgcgccgcttgcgccgggcgtcttcacgccgtcggaagggcgcgccgtcacggtgcgcacacccttgtacaaggcggtgcttcattcgggcggcggcttcctgaaatctttcgaattgctccagtaccgggtaggggtcgcgccgggctccgccctcgtgaacctggttgatgaagctacggccgctgtagcgcccatgggtttgctcatcaacggacagccttcctggaatacggggcgctggactcttgagggcggggatttgacgctggcggccgggcagcagggaacgctgcgcctgattggcgaggtggacggcctgcgcgtggagcgcgaactgcgttttaccgcggcttcctatcttatttccgaacggctggcgctgtatacgccgggagatgcggcgcgcacggcccgcgtagcgtttacggcaggcgccagcgcggcttccacaggcgccggaggcacctatgatcccatacgcatcggctggagcctgaacgggcagttcgatgaaaaaacagcagcaaggatttgtcctctgcncagggcgtga

SEQ ID NO: 73336 - protein, 248 aa, Unknown
  Obtained from environmental sample
  misc_feature (1)..(248): Xaa is any amino acid
MDNKNLMLTIALCVIILVGWNHFAGYMGWIAKPDPAQTAQQQKAAQQPDGGKSEAPAPNVAASPAPLAPGVFTPSEGRAVTVRTPLYKAVLHSGGGFLKSFELLQYRVGVAPGSALVNLVDEATAAVAPMGLLINGQPSWNTGRWTLEGGDLTLAAGQQGTLRLIGEVDGLRVERELRFTAASYLISERLALYTPGDAARTARVAFTAGASAASTGAGGTYDPIRIGWSLNGQFDEKTAARICPLXRA

SEQ ID NO: 73337 - DNA, 945 bp, Unknown
  Obtained from environmental sample
  misc_feature (1)..(945): n is a, c, g, or t
atgatcggcgaggaaattacttataatacgccggaagacgaggaattggaaaaagtggctgaaaaattaaagttacgtcccactgataacaacaacagcgcattaaagagtttattgcaagatgacaagcacgaagatttcacatcgtattctaacatcattgtcaactttgattattttaaaagatctataaccaaggaaaattaccaagacgtgcgccaagggttatccaaattatggttcgttgagatttcgttagaccgaacaaacgacaacccgcaacgaattttcgagagcttaaattcaacagggctagacttatcacaagcagaccttattagaaattacattttaatgggtttaaacagaaagaatcaaaacgagatatatcaaaattattgggaagctatagaaaaatttgcaaaagatgaaacccgcaacacaagcaaagtttctgattttatacgggattttttaacgttagacaataagaaaattccaaacaaaggaaacgtatacgcggaatttaaagagaaatataatgtttcctctatgactatagaggaacttaaaaatatcctgtcgccgatcaagagattggccaaacattataacaaactgcttaatcctaaaaaagaaaccgaccaggagatacaagagcaacttaaatatatatgtcagcttgaaataaatgtcgcttatccgtttctgatgaaagtgtatgatgatttctataataacatcatcgacaaaactacgtttattaatatattgaatctcgttcaatcgtttacgtggcgaagatttattgttgccgtaccaacgaatgctttaaacaaaatttttatgagcttgtatgacaaagtagatacaaataactatttgtattctatccaaaaaatcgcttttgctacgtttcggcacacatcgttttcccaaaaatga

SEQ ID NO: 73338 - protein, 314 aa, Unknown
  Obtained from environmental sample
  misc_feature (1)..(314): Xaa is any amino acid
MIGEEITYNTPEDEELEKVAEKLKLRPTDNNNSALKSLLQDDKHEDFTSYSNIIVNFDYFKRSITKENYQDVRQGLSKLWFVEISLDRTNDNPQRIFESLNSTGLDLSQADLIRNYILMGLNRKNQNEIYQNYWEAIEKFAKDETRNTSKVSDFIRDFLTLDNKKIPNKGNVYAEFKEKYNVSSMTIEELKNILSPIKRLAKHYNKLLNPKKETDQEIQEQLKYICQLEINVAYPFLMKVYDDFYNNIIDKTTFINILNLVQSFTWRRFIVAVPTNALNKIFMSLYDKVDTNNYLYSIQKIAFATFRHTSFSQK

SEQ ID NO: 73339 - DNA, 639 bp, Unknown
  Obtained from environmental sample
  misc_feature (1)..(639): n is a, c, g, or t
atggatcngtcatatnnccgtaagaaaggctttaaaaattcttgcggtaattatatattatatgttgacgctgatgactatatagaagttgatatgcttgaaaaaatgtattcaatggcagtgtcacgaaattatgatatggtatattgcgattattatcagcatgataaagtaaataatattttttataagaaagtaccaatattatcgaatgattttttgtcgaatattaaatgttcagttattgatgtcaatgtcggaggtagagtctggaacaagttagtaaaaagaacaatatatgagaaaatagtatttccgaatgatgaatattgtgaagataaatatatacttacccaagtattttttctttccaaagagataggatatgtaaatgccgctctttatcattatcaatacaaccaatattcgctttcaaaggatcctttaaaaatatggaataaatatattggattaaagaaaaatttcaggaaagtgatttcttttttaaaagtgaactatggaaaggacttaagcgtatttgaacctgaattgagtaacagagaaaaatacattgtaaataatcatccgataattgttattataaaaaaaataattaaaaaactattacatattacatag

SEQ ID NO: 73340 - protein, 212 aa, Unknown
  Obtained from environmental sample
  misc_feature (1)..(212): Xaa is any amino acid
MDXSYXRKKGFKNSCGNYILYVDADDYIEVDMLEKMYSMAVSRNYDMVYCDYYQHDKVNNIFYKKVPILSNDFLSNIKCSVIDVNVGGRVWNKLVKRTIYEKIVFPNDEYCEDKYILTQVFFLSKEIGYVNAALYHYQYNQYSLSKDPLKIWNKYIGLKKNFRKVISFLKVNYGKDLSVFEPELSNREKYIVNNHPIIVIIKKIIKKLLHIT

SEQ ID NO: 73341 - DNA, 840 bp, Unknown
  Obtained from environmental sample
  misc_feature (1)..(840): n is a, c, g, or t
atggaaagttgtgaaggggatataagggattattcccctaacccgccagtgaaaatagatttatggcagggaggagttccctgtccgcgtttttcngtagccggaaaacaacttggagcaaaagatgaacgtgatttatttcctgaagccttacggcttgttaaggaattacagcctaaagcggtaatgctggagaatgtaagaggtttactggactcaatttttgatgaataccggacaaaattaattaaggatttagaaaatttaggatatgttacagattggaaattattaaacgcttctgattacggcgtttcgcaattacgtcccagagttgtttttgttgcgttgaaaaaggaattggggcagttttatttttggcctaatgcttctgaaataatacctctgacagtcggagaattactatatgatttaattagtaaaaatggctggaagggagcgcggcaatggaaaaaaattgcctgcgatattgctccaacaattgttggcggaagtaaaaaacacggaggaccggatttaggaccaacgagggcacggaaggcatgggcgtctttgggcgttgacggaatgggaattgcaaatgacgcgccggaaaaagattttgagggtatgccaagacttactgttgaaatggttgcacgtattcaaggttttccttcggattgggtttttaccggaagcaaaacaaacagttaccggcaagtcggtaatgctttccctccgccggttgcacaggcagtcgggctgcaaataaaaaaagcttttgaattatatgccatgtttattgaacacaaattaccaaaaaggaaaattgcataa

SEQ ID NO: 73342 - protein, 279 aa, Unknown
  Obtained from environmental sample
  DOMAIN (1)...(260): C-5 cytosine-specific DNA methylase
  misc_feature (1)..(279): Xaa is any amino acid
MESCEGDIRDYSPNPPVKIDLWQGGVPCPRFSVAGKQLGAKDERDLFPEALRLVKELQPKAVMLENVRGLLDSIFDEYRTKLIKDLENLGYVTDWKLLNASDYGVSQLRPRVVFVALKKELGQFYFWPNASEIIPLTVGELLYDLISKNGWKGARQWKKIACDIAPTIVGGSKKHGGPDLGPTRARKAWASLGVDGMGIANDAPEKDFEGMPRLTVEMVARIQGFPSDWVFTGSKTNSYRQVGNAFPPPVAQAVGLQIKKAFELYAMFIEHKLPKRKIA

SEQ ID NO: 73343 - DNA, 837 bp, Unknown
  Obtained from environmental sample
  misc_feature (1)..(837): n is a, c, g, or t
atgaacctaaatgcttttgtaaaaaaaatagagtattttaagcatattttggattctcttggcatacccttggtttatgcgcaatatccaaatgttatatgcgacgaagacgaagtttcaaaaactggcaaagaccaaactatgcagaaaaagaacgaatttatggcaaaattggaaaacttgggtattcccgtcatagatttgcacaaggagtttcataaaagagcaaataacagtagcaaggaatttcaccattcgcttttctacaaaacagaccaccactggcagggaaaaacctcaatttgggcagggaaaataataagcgaaaaattaaatgaactttatggttttggtttggaaacggaactcttagacagcaataactttaccgagaaatttgttgaaaaatggttaggttcaatgggtgaaaaagttacaccactttatccaaaagaagatttttatatatacagcccaaaatatgcaacagacataaacatgacacttaaagatacttataaatatttgttttatgaaggcaatgggagttttgacaatttttatcattttatatccaatattaatcaggataaaaagacgtatatgattgcatatacacaattttgtttatcgatgaataataatttaccgaatggcaaaaaaattcttatagtcggcgatagttttagtatgcctttgagcaagtttttaatcccgatattcgggaaaatttattatatccatgagacttcaaatttgctgaataattcaaatttgctgaatacttatcttgcaaataaacccgatgtagtaattttaggttatgtcattttctaa

SEQ ID NO: 73344 - protein, 278 aa, Unknown
  Obtained from environmental sample
  misc_feature (1)..(278): Xaa is any amino acid
MNLNAFVKKIEYFKHILDSLGIPLVYAQYPNVICDEDEVSKTGKDQTMQKKNEFMAKLENLGIPVIDLHKEFHKRANNSSKEFHHSLFYKTDHHWQGKTSIWAGKIISEKLNELYGFGLETELLDSNNFTEKFVEKWLGSMGEKVTPLYPKEDFYIYSPKYATDINMTLKDTYKYLFYEGNGSFDNFYHFISNINQDKKTYMIAYTQFCLSMNNNLPNGKKILIVGDSFSMPLSKFLIPIFGKIYYIHETSNLLNNSNLLNTYLANKPDVVILGYVIF

SEQ ID NO: 73345 - DNA, 573 bp, Unknown
  Obtained from environmental sample
  misc_feature (1)..(573): n is a, c, g, or t
atgatatttcaggattatgcggtattcccctggatgactagtctgcataatgtggagttcgcccttaaactgcggaactcagggcgcaaaggaaaggaaaaactaaaacgctcggagataagcgataaggcgcttttttatctgcaaaaaacagggcttggaggatttgcgaacaaatacccgtcccaactttcaggcggtatgcgtcaacgccttgcccttgcaagagcgctttcggtagaaccttctattatattgatggacgaaccttttgccgccgtagacgcgcttacaagggaaaaattacaggacgaacttttacgccttttatcggaacggaacggccaatccccattaaccgcaattttagtaacccacgaagtacatgaagcggtctatctttccgatgaagtaattattttttctcccagtccgggaagtatacgcaaccgcatttctgttaatgtgaaacgtccacgagcaagaaccgaccctgagttaatcgacattcaggatcgtatttttgcaatgttccaatacgacctcaatcaggaatcggagtattcaatatag

SEQ ID NO: 73346 - protein, 190 aa, Unknown
  Obtained from environmental sample
  DOMAIN (1)...(144): ABC transporter
  misc_feature (1)..(190): Xaa is any amino acid
MIFQDYAVFPWMTSLHNVEFALKLRNSGRKGKEKLKRSEISDKALFYLQKTGLGGFANKYPSQLSGGMRQRLALARALSVEPSIILMDEPFAAVDALTREKLQDELLRLLSERNGQSPLTAILVTHEVHEAVYLSDEVIIFSPSPGSIRNRISVNVKRPRARTDPELIDIQDRIFAMFQYDLNQESEYSI

SEQ ID NO: 73347 - DNA, 441 bp, Unknown
  Obtained from environmental sample
  misc_feature (1)..(441): n is a, c, g, or t
atgagaatatttatagctggcccgagagctatttctaagttagatgaagccgtaaagaatagactttacgggatatataagcacaactataccatcttgataggtgatgcgagcggtgtggacaaagctgttcagcaatattttttgaatcttaagtattctgacgtaattgtatatgcgagtaatgggaaagttagaaataatcttggcaattggcaagtggagtcagttgcagttccaccagatgttacaggttttgagttttatgcagcgaaagacggcgctatggcagactgtgccgattatggttttatgatttggaatggtaagagtaggggaacactgaataatattataaatttactgaatggtaacaagaaagttttggtgtttttcgatccaaaaaagtcattttttaacatcggaaacattgagacttaa

SEQ ID NO: 73348 - protein, 146 aa, Unknown
  Obtained from environmental sample
  misc_feature (1)..(146): Xaa is any amino acid
MRIFIAGPRAISKLDEAVKNRLYGIYKHNYTILIGDASGVDKAVQQYFLNLKYSDVIVYASNGKVRNNLGNWQVESVAVPPDVTGFEFYAAKDGAMADCADYGFMIWNGKSRGTLNNIINLLNGNKKVLVFFDPKKSFFNIGNIET

SEQ ID NO: 73349 - DNA, 324 bp, Unknown
  Obtained from environmental sample
  misc_feature (1)..(324): n is a, c, g, or t
atgtataaaattagagcaatgattatagaggattacaatgaaataataaatttatggaagaatgccgaaggtgtaggtttaagcggaaaagatgactcaaaaaaatccataaaaatatttttgaaaagaaatcccaatacttgctttgttgctgaatataacaatgaaataatcggtacaataatgggcggaaatgacggacggagagggcatatatatcatttaatggtaaaatctgaacacagaaaaaaaggcttggggagaaaattactggagaagacagagaaggcgctgaanaaagacggcgtcagaaaacttttttag

SEQ ID NO: 73350 - protein, 107 aa, Unknown
  Obtained from environmental sample
  DOMAIN (49)...(107): Acetyltransferase (GNAT) family
  misc_feature (1)..(107): Xaa is any amino acid
MYKIRAMIIEDYNEIINLWKNAEGVGLSGKDDSKKSIKIFLKRNPNTCFVAEYNNEIIGTIMGGNDGRRGHIYHLMVKSEHRKKGLGRKLLEKTEKALXKDGVRKLF

SEQ ID NO: 73351 - DNA, 681 bp, Unknown
  Obtained from environmental sample
  misc_feature (1)..(681): n is a, c, g, or t
atggctgaacgaaagcaagcctccggcgatgccgcgctgacgcccgtacttgttattcagctcgcccgctttggcgaccttgtgcagacaaaacgcctgttgctcaccctggctgcggagtaccgtgtgcatctgtgcgtggatcgttccctggctccgctggcgcggctgctgtatccgcaggcgcgggtgcatcccgtcgcggcgcacggcggcagtgcggccgaggtcgcggctttcaaccgcaccgcctttgccgccctggcggcggaacgctttcattgcgtctacaatctcaaccattcgcccttaaaccgcgccctggcccgtctctttgccgcggaaaccgtgtacgggcactatgtggacaaggggcaggacatgcgttcgccctgggtggatatggccttccgctggacaacgcagcgccggcttgcccccctgaatcttgcggacttctgggcctttttgcatccgaaccccctgccgccgcacacggtcaatcccgtcgcgcggcccggcggcaaagggctcggcgttgtcctgggcggccgcgaggctcggcgttcccctgccgcgcatattctcgccccctgtgtgcatgccgcgttcacctgcctggacggccggacgtctatctcttcgggggcgcaggcgaacacgctctcgcgcgcggcctga

SEQ ID NO: 73352 - protein, 226 aa, Unknown
  Obtained from environmental sample
  misc_feature (1)..(226): Xaa is any amino acid
MAERKQASGDAALTPVLVIQLARFGDLVQTKRLLLTLAAEYRVHLCVDRSLAPLARLLYPQARVHPVAAHGGSAAEVAAFNRTAFAALAAERFHCVYNLNHSPLNRALARLFAAETVYGHYVDKGQDMRSPWVDMAFRWTTQRRLAPLNLADFWAFLHPNPLPPHTVNPVARPGGKGLGVVLGGREARRSPAAHILAPCVHAAFTCLDGRTSISSGAQANTLSRAA

SEQ ID NO: 73353 - DNA, 609 bp, Unknown
  Obtained from environmental sample
  misc_feature (1)..(609): n is a, c, g, or t
gtgcagcagcagggggcgcgcatctccccggaagagtccgtgcgtatttacaacgccagccggatcaacctcaacntgcattccagcgtccagaccagggagcttgtgccgccgggggatttcgtcaatccgcgcacctttgagctggccgcctgcggcgctttccagcttgtggacaggcgcgagctgatgcccgagctgtttgcggacgatgaattggcctgcttcagcagcatgcaggagcttcttgaaaagatagactattttctcgcacatcccgcggcacgcgccgcctttgccgagcgcggcaggcaacgggtgctgcgcgaccacagctaccacaggcgcatggaaacactcctaagcttcgtcaaggagcgcaaagcgggctggcccgcccgcgcaaagggcgatgggctgcccgcggatctgccgccggggctgcgtgcggaacttgcggatctgctggccgggcttggcctgccggaaaacgcgcctttggaagacgtgatgctgcggctgcgccagcgctcaggcacgctttcgcccctggaaaccaacctgctttttttggacgagtggcgcaagctctacatcaaaaaggcctga

SEQ ID NO: 73354 - protein, 202 aa, Unknown
  Obtained from environmental sample
  misc_feature (1)..(202): Xaa is any amino acid
MQQQGARISPEESVRIYNASRINLNXHSSVQTRELVPPGDFVNPRTFELAACGAFQLVDRRELMPELFADDELACFSSMQELLEKIDYFLAHPAARAAFAERGRQRVLRDHSYHRRMETLLSFVKERKAGWPARAKGDGLPADLPPGLRAELADLLAGLGLPENAPLEDVMLRLRQRSGTLSPLETNLLFLDEWRKLYIKKA

SEQ ID NO: 73355 - DNA, 690 bp, Unknown
  Obtained from environmental sample
  misc_feature (1)..(690): n is a, c, g, or t
atggcaaaaattgacataaagaaaaccgaacttgtatggcgcggaaaatacgacgaggacggacggcttgcgcccgtggaaaaacccggtcccttcccttttcagattgtagaaagcgtcaatgaaccccgtgttgagaaaggcgaaacggaaccacagctttccttgtttgattactggaaaggcgacgaaggcagtacctttgaagaaggctggaagaataaattaatatggggtgacaacaaatttgtcatgtcaagtttattggaaaagtttgcaggtaagatagatttaatttacattgatccgccgtttgttactgggtctgattttacattggatgtacagattggcgaaaaaggtgatctggtacataaagaacattcaatattagaagaaaaagcgtatagagatacttggggtcaaggattagattctttcttaggaatacttaatgaccgcttaaatataatgaaagatttactttctgataaagggagtatttatgttcatcttgattggcatatagggcattatgtgaagacattaatggatgatatttttggtgatgacaactttagaaatgaaattgtgtggaaaagatcggcaattgctaccaatgtgaacaaacaattcagaaatagccatgatgttcttttctttttactaaacagatacaaatatatttaa

SEQ ID NO: 73356 - protein, 229 aa, Unknown
  Obtained from environmental sample
  misc_feature (1)..(229): Xaa is any amino acid
MAKIDIKKTELVWRGKYDEDGRLAPVEKPGPFPFQIVESVNEPRVEKGETEPQLSLFDYWKGDEGSTFEEGWKNKLIWGDNKFVMSSLLEKFAGKIDLIYIDPPFVTGSDFTLDVQIGEKGDLVHKEHSILEEKAYRDTWGQGLDSFLGILNDRLNIMKDLLSDKGSIYVHLDWHIGHYVKTLMDDIFGDDNFRNEIVWKRSAIATNVNKQFRNSHDVLFFLLNRYKYI

SEQ ID NO: 73357 - DNA, 624 bp, Unknown
  Obtained from environmental sample
  misc_feature (1)..(624): n is a, c, g, or t
atgattagacaaagaagaacctttctcttgacaagtatgacagggaagaacgttcccccgcgcagatatgacagagatgaacgtccgccacgcaggcgttttgatgaagaaaataatgaaacaaagcgcccccgccgtccagagannngttgnaattcgaaaattgttcgagatattgtaatgaaaagacgggaaacaggacgtgtttcggaacggcgacccaaagtgctttccctgcaatggaacgaggacagaggtttgatacgcctcaataaatatatttccaacagcggcatttgttcccgccgtgaagcagacgatttgattattgcggggacggttaccgtgaacggacagattgttacggaactgggtactaaaatatcgccaaccgatgaagttcgttacgaagacaaagtgttgcaacgtgaaaaacctgtttacatacttttaaataaacccaaagattacattaccactaccgaagacgacagaggtcgcgacaatgtgatgtcgctcatttacggtgcttgccagcagcgtgtgtatcctgtggggcgtttggacagaaacacaacgggtttgctgctctttaccaatgacggggaattgaccaagaaatga

SEQ ID NO: 73358 - protein, 207 aa, Unknown
  Obtained from environmental sample
  DOMAIN (88)...(134): S4 domain
  misc_feature (1)..(207): Xaa is any amino acid
MIRQRRTFLLTSMTGKNVPPRRYDRDERPPRRRFDEENNETKRPRRPEXXXNSKIVRDIVMKRRETGRVSERRPKVLSLQWNEDRGLIRLNKYISNSGICSRREADDLIIAGTVTVNGQIVTELGTKISPTDEVRYEDKVLQREKPVYILLNKPKDYITTTEDDRGRDNVMSLIYGACQQRVYPVGRLDRNTTGLLLFTNDGELTKK

SEQ ID NO: 73359 - DNA, 552 bp, Unknown
  Obtained from environmental sample
  misc_feature (1)..(552): n is a, c, g, or t
ttgaattatgagaacctcaatgaagcgttgaaaggggaactggcagcttcgttctcttcgggctggctgataattgccgctttctttttattttttgcctgcaccggaaaaagcgcgcaaattcccctattaacctggcttccagatgctatggcaggtccaactcctgtttccgcccttatacatgcggctacaatggtcacggctggggtttatttggtggcaaggctttccctgctctttgtttccacgccagaaatactgttatttgtgcttttgattgccattgcaacggctctgtgggctgcgattacaggcctccttcagcacgatattaaaaaggttttggcatattccacagtatctcagctcggttttatgtttatggctgcgggtgctggggcatttgatgtggcaattttccacgtgttcacccacgcattcacaaaagctgccctgntcttggctgctggctctgttatacacgccttgggtggagaacaggacatcgcaagatggcgggcttgcattaaagctcccctcacattttaa

SEQ ID NO: 73360 - protein, 183 aa, Unknown
  Obtained from environmental sample
  DOMAIN (2)...(183): NADH-Ubiquinone/plastoquinone (complex I), various chains
  misc_feature (1)..(183): Xaa is any amino acid
MNYENLNEALKGELAASFSSGWLIIAAFFLFFACTGKSAQIPLLTWLPDAMAGPTPVSALIHAATMVTAGVYLVARLSLLFVSTPEILLFVLLIAIATALWAAITGLLQHDIKKVLAYSTVSQLGFMFMAAGAGAFDVAIFHVFTHAFTKAALXLAAGSVIHALGGEQDIARWRACIKAPLTF

SEQ ID NO: 73361 - DNA, 819 bp, Unknown
  Obtained from environmental sample
  misc_feature (1)..(819): n is a, c, g, or t
gtgaacggcaagatcatcgcccttccctggacgaatattatgaccaaccgccccttctttcagtggcgcgccgatcttatcgacgtggatcccgacacggtgaaaaccattgaagatgtcgagaaagttctctatgagctcaaaaagcgttatccggatcgttatacgatagagaactcaagcacggaagtgttcctgatgaagaacggcttaatgagcgccaccaacggttttgtgtttaacgccgacgatccctccatacaggtacagcacattagcgaaacggatgcctaccttgaacgggcaaaatacgcggaaaaatggcaaaaggacgggattatctggtcggacgtgctggtggatcagcttgaccacaaccatctcattaaccagggtcggcttataaccaagttcggaacccatgaattttcgaccgatacccgtgcctgggttgagcctgcggccaaatggggtttcagttccctgtatgacgataaaaaattccccttccgcacgcctcttggcaatatggtcgcgattccccggacggccaaaaatccccagcgggtactcatgtttctcaacctggtggaaacgaaccagaagatgttcgatatggtcatgtacggcatagagggcaaaacttatgttaaagataccgccaagcccaatacggtgaagtatcccgaagggatgaacgacaataactccaactacatgggctggcagagccgttgggcgctcttcaaaccccagcacatgcggggcgatcctctgtacgcggagggatttggcagagcgagaaagatttcgccatga

SEQ ID NO: 73362 - protein, 272 aa, Unknown
  Obtained from environmental sample
  misc_feature (1)..(272): Xaa is any amino acid
MNGKIIALPWTNIMTNRPFFQWRADLIDVDPDTVKTIEDVEKVLYELKKRYPDRYTIENSSTEVFLMKNGLMSATNGFVFNADDPSIQVQHISETDAYLERAKYAEKWQKDGIIWSDVLVDQLDHNHLINQGRLITKFGTHEFSTDTRAWVEPAAKWGFSSLYDDKKFPFRTPLGNMVAIPRTAKNPQRVLMFLNLVETNQKMFDMVMYGIEGKTYVKDTAKPNTVKYPEGMNDNNSNYMGWQSRWALFKPQHMRGDPLYAEGFGRARKISP

SEQ ID NO: 73363 - DNA, 510 bp, Unknown
  Obtained from environmental sample
  misc_feature (1)..(510): n is a, c, g, or t
ttgatatccactgaaaccatcgagcgtatccgggaagcgcttcccctggttgattatatcgctcgggatattgttctcaaaaaggccggttccattcataaggggctttgcccctttcataacgagcgcaccccctcgtttgtggtctacgcaaacgagaaccgctaccattgctttggctgcggcaaggacggggatatttttacctacgtcgaagaactcaagcatctcagttttatggaagccgtgcgtatgcttgccgaaaccgcangcatcccgctggaagaggacgacgcgcgggagagcgtgcaggccgccgaagcgcggcgcatggcggagctgaacgagcgcgctctccactattttcgccatgcgctcaagaatctgccngcagggcgcaaggcgctggaataccctcacgcgcggggactgacgcccgaaagtattgaggcttttcagcttggctacccgctgccggcatggggcaggtctcgcctccccacctcttaa

SEQ ID NO: 73364 - protein, 169 aa, Unknown
  Obtained from environmental sample
  DOMAIN (2)...(99): CHC2 zinc finger
  misc_feature (1)..(169): Xaa is any amino acid
MISTETIERIREALPLVDYIARDIVLKKAGSIHKGLCPFHNERTPSFVVYANENRYHCFGCGKDGDIFTYVEELKHLSFMEAVRMLAETAXIPLEEDDARESVQAAEARRMAELNERALHYFRHALKNLPAGRKALEYPHARGLTPESIEAFQLGYPLPAWGRSRLPTS

SEQ ID NO: 73365 - DNA, 705 bp, Unknown
  Obtained from environmental sample
  misc_feature (1)..(705): n is a, c, g, or t
ttgatggccgagaatgatgccatcttaaatgaaggcagcagtagccttttcaacaaaaagaatgaaatgggcaaagaccagtttttgaatttgctcgtaacgcaattaaaatatcaagatccgcttaacccggctcaagataccgaatttatcacgcagttagcacaattctcgcaattggaatttacgcaaaactcaacttctgcaatttctacgcttgcttctaatatgcaggaatttatgaatatgcagaatttgcaggcacagagcataaccaatgcgagtgcaactccgcttttgggcaaggatgttcgtgttatggaatcttctttccatcacaaaggtttatccgaaagggaatttaacatttatgttatggaaggaaatagccagggcactgttcttgttaaagacaaagacggaaatgttgttggcgaaattggctttacaatggataatagcaagggcggagatacaaccgtaaaatgggacggaaaaaatcaagagactggcaatctttatttaggtggcgaatacacggtagaagtggtgagctcaaacggcacaaagagcgcaggttatgctttccaagatggcagagttactggagttaatttcagttcctctggcgcagccttaaccgtaaatgggcttcattatggtcttggatatttggtaaaggtcaacgagagccttgtcagttaa

SEQ ID NO: 73366 - protein, 234 aa, Unknown
  Obtained from environmental sample
  DOMAIN (2)...(148): Flagellar hook capping protein
  misc_feature (1)..(234): Xaa is any amino acid
MMAENDAILNEGSSSLFNKKNEMGKDQFLNLLVTQLKYQDPLNPAQDTEFITQLAQFSQLEFTQNSTSAISTLASNMQEFMNMQNLQAQSITNASATPLLGKDVRVMESSFHHKGLSEREFNIYVMEGNSQGTVLVKDKDGNVVGEIGFTMDNSKGGDTTVKWDGKNQETGNLYLGGEYTVEVVSSNGTKSAGYAFQDGRVTGVNFSSSGAALTVNGLHYGLGYLVKVNESLVS

SEQ ID NO: 73367 - DNA, 777 bp, Unknown
  Obtained from environmental sample
  misc_feature (1)..(777): n is a, c, g, or t
gtgaacgtcgcaagcgtgccggtgaatcccgtcaagcctccgggcagctacgcgttcggtgtgccggagattcccgttcagcagagcacatcccgggttgatccgaaggcggcgctgcagtaccgctggacgagccatttgatgacgtacgtggagtattcgaccggatttaagggggccgggtccaacccgcagccgatcagcgcagcccagaccaccactttcaagccggaaattctgaaatcctacgaagtcggtgccaagagcgagtggctcgatcggcgccttaccgtgaatgccgatgcttactacaacatggtgagtgatctgcagttgatcgggtacgctggaaccagcgccggaggaaccgagacgatcaacgccggtgaggcgcacatcgcaggcgccgagctcgagctgttggctcgcccggtgaacaaccttttgttcaatttgtctgccgactacatgcagttcaagtatgcgtctctcggcgctgcggcgttttcggcacagaaccccagcggcctgttcctgaacgatgtcgcgccgtacagcccgaagtacaaggcggacgccggtgtgcagtatacggtccagctgggcgcggctggcagcctgcaaccgcgagtggacgccacgtatacgagccgcgtgtattttgatcctcagaacctgaccgcatcgtcgatgggcggatacgccttgctcaacggccatctcatgtacatcccccacgcggggcggtggaggccacggntgatgtcaacaacttga

SEQ ID NO: 73368 - protein, 258 aa, Unknown
  Obtained from environmental sample
  misc_feature (1)..(258): Xaa is any amino acid
MNVASVPVNPVKPPGSYAFGVPEIPVQQSTSRVDPKAALQYRWTSHLMTYVEYSTGFKGAGSNPQPISAAQTTTFKPEILKSYEVGAKSEWLDRRLTVNADAYYNMVSDLQLIGYAGTSAGGTETINAGEAHIAGAELELLARPVNNLLFNLSADYMQFKYASLGAAAFSAQNPSGLFLNDVAPYSPKYKADAGVQYTVQLGAAGSLQPRVDATYTSRVYFDPQNLTASSMGGYALLNGHLMYIPHAGRWRPRXMSTT

SEQ ID NO: 73369 - DNA, 513 bp, Unknown
  Obtained from environmental sample
  misc_feature (1)..(513): n is a, c, g, or t
atgagggtgtttcgttcacgcagggcggcccacttgctggtggtcttccagtttttggccactctcggcgggtgggtcatcgcccggcccctcgaccgcttcgggatgattccctgcaccatcctgtacctgctcagcatcccgattgtcgcaagcctcgggctgcccggtcatacggacatgatgatcgcggtgctggtgggccttgccggattctgcgtgctcggcatgcatttcgcgcaggtcgcctgcgtcagcagcatctatccgaccgcggtgcgcgccttcggcgtgggctggttcatgctgttcgcccgggtggggggcgctgtcgggccggaggctgtcagcaggctcctggcgcagcacatgtccgtgaacgctcttttttactgggccgccgtgccgcttgcgctgggcgcagtggcctccgcgtgggtgacattgctttattggcatcacttccaccgccgcctagaggcgcccgcgctgcccattcagcaagcgacatga

SEQ ID NO: 73370 - protein, 170 aa, Unknown
  Obtained from environmental sample
  misc_feature (1)..(170): Xaa is any amino acid
MRVFRSRRAAHLLVVFQFLATLGGWVIARPLDRFGMIPCTILYLLSIPIVASLGLPGHTDMMIAVLVGLAGFCVLGMHFAQVACVSSIYPTAVRAFGVGWFMLFARVGGAVGPEAVSRLLAQHMSVNALFYWAAVPLALGAVASAWVTLLYWHHFHRRLEAPALPIQQAT

SEQ ID NO: 73371 - DNA, 651 bp, Unknown
  Obtained from environmental sample
  misc_feature (1)..(651): n is a, c, g, or t
gtgatactcaccgccatctgcacgctgttttcgctcgccatgacgattctgtgcgccttccccctgatatactccaacctcaagggcaaggggattatcaatacgcttatcatatttaccatgtacttcagcgccggcaccataccgaactatattctgattagagaccttaagatgctgaacagcccctggtcgcttatactgcccggatgcctctccgtttttaacatgataatcctgaggagctttttctattccgtgccggaaagcttaagggaatccgcccagattgacggggccaacccttttacgattcttgtaaaaatttatctgcccctttctttgccggtactgtcaaccctcgcgttgttttacgccgtcagccgctggaacggcttttccgacgcgcttatgtacatgacctctgcgcccgattaccatcccatccagcttaaattgtataacatcattaacaacctttcttctatagagatagccgcccaggaaggcattgccgggggcgttccggcggccaccgacgggatgaaagccgccgctgtaatgttcgcgacggttcccattctgattctatacccctggctgcagcgccactttattaccggtgtttccatcggagccctgaaagggtga

SEQ ID NO: 73372 - protein, 216 aa, Unknown
  Obtained from environmental sample
  SIGNAL (1)...(19)
  DOMAIN (1)...(211): Binding-protein-dependent transport system inner membrane component
  misc_feature (1)..(216): Xaa is any amino acid
MILTAICTLFSLAMTILCAFPLIYSNLKGKGIINTLIIFTMYFSAGTIPNYILIRDLKMLNSPWSLILPGCLSVFNMIILRSFFYSVPESLRESAQIDGANPFTILVKIYLPLSLPVLSTLALFYAVSRWNGFSDALMYMTSAPDYHPIQLKLYNIINNLSSIEIAAQEGIAGGVPAATDGMKAAAVMFATVPILILYPWLQRHFITGVSIGALKG

SEQ ID NO: 73373 - DNA, 618 bp, Unknown
  Obtained from environmental sample
  misc_feature (1)..(618): n is a, c, g, or t
atgaatgacatgaactattacgccaaggagggcatattacagcccatggacgagaatgtccttatgaggtggcccaacatcagggccgcttttgaggaattccccgccgtattccagaggattcggggtactgacggtaaaatttacgcgcttcccgatataaacgactgcctgcattgcgtctacagttacgggcgggtgtggtattacatgccctggatgagggaccacgggttcaaggaaccccaaaccacggcggaacttgaagcgtatctgcgctatgttgtaagcaacgacatgaacaaaaacggccagcgaaatgccatgggcatagcctttgattcgggctcccttagaaactttatcgcctattttgccaagcctttcctgccttgggtatacggcagccggtacggagtagctcttgatggaaaaaccgtggttgcgcaataccgggacacacggttccgggatgccctngaatggatgaacagcctttataagcanggcctgatagtacccgattcatttacaatgtccggcgatcagttaaaagtcctctggcagggcagcaccccccaggttgcgatactggcggcaacatggatgaccgggtaa

SEQ ID NO: 73374 - protein, 205 aa, Unknown
  Obtained from environmental sample
  misc_feature (1)..(205): Xaa is any amino acid
MNDMNYYAKEGILQPMDENVLMRWPNIRAAFEEFPAVFQRIRGTDGKIYALPDINDCLHCVYSYGRVWYYMPWMRDHGFKEPQTTAELEAYLRYVVSNDMNKNGQRNAMGIAFDSGSLRNFIAYFAKPFLPWVYGSRYGVALDGKTVVAQYRDTRFRDALEWMNSLYKXGLIVPDSFTMSGDQLKVLWQGSTPQVAILAATWMTG

SEQ ID NO: 73375 - DNA, 459 bp, Unknown
  Obtained from environmental sample
  misc_feature (1)..(459): n is a, c, g, or t
gtgttgcggaacgctgaanaaataggcagagacgctcgtgttatgaattcttttcaagtcgataaagtcgccgagtattttactgctgaaaacgcgatacgtcatttgcaggaaaaaaaaatcgttattatttccggcggaacgggaaatccatttttcacgacggacacggcggcggctttgcgttgcgcggaattaaactgcgaagtgtttttcaaggcgacgaaagtagacggaatttatgataaagacccgatgaaacataaagacgcggtgaaattcagcgaaattacgcactcttcggcgattgaaaaacagttgaaaattatggattcgacggcgttttcgctttgcttggacaataatattgaaatattggtttttgaattgcttaacaagggaaatgtttttcgtgccgtaaacggtgaaaatgtcggcacggtagtaaggaaaggatag

SEQ ID NO: 73376 - protein, 152 aa, Unknown
  Obtained from environmental sample
  DOMAIN (1)...(129): Amino acid kinase family
  misc_feature (1)..(152): Xaa is any amino acid
MLRNAEXIGRDARVMNSFQVDKVAEYFTAENAIRHLQEKKIVIISGGTGNPFFTTDTAAALRCAELNCEVFFKATKVDGIYDKDPMKHKDAVKFSEITHSSAIEKQLKIMDSTAFSLCLDNNIEILVFELLNKGNVFRAVNGENVGTVVRKG

SEQ ID NO: 73377 - DNA, 372 bp, Unknown
  Obtained from environmental sample
  misc_feature (1)..(372): n is a, c, g, or t
gtgattgatttgattaaaaccgaaacaaaagaaaaaatggaaaaatccatcgaatctctgaaacttcatttcaagaaaatacgcacgggaagagcgtcggtggatatgcttgacggaataaaggtaaactattacggaacgccgactcccataaatcaagtgggtaatatttctactcccgatgcgaaaacgatagtcgttcagccgtgggaaaaaaatcttatcggcgaaatagaaaaggcgattttgtcctcaaatttggggattacgccgcaaaacgacggaaatcttattcgcttgtctgttccggctgttacgcaagagcgtagaaagaattggccaaagaatgtgagggtatatcggaagatataa

SEQ ID NO: 73378 - protein, 123 aa, Unknown
  Obtained from environmental sample
  DOMAIN (19)...(122): Ribosome recycling factor
  misc_feature (1)..(123): Xaa is any amino acid
MIDLIKTETKEKMEKSIESLKLHFKKIRTGRASVDMLDGIKVNYYGTPTPINQVGNISTPDAKTIVVQPWEKNLIGEIEKAILSSNLGITPQNDGNLIRLSVPAVTQERRKNWPKNVRVYRKI

SEQ ID NO: 73379 - DNA, 894 bp, Unknown
  Obtained from environmental sample
  misc_feature (1)..(894): n is a, c, g, or t
atgtacaattcatttggaaacatatataaactttcccctttgggattgctactttctgagctagagtatttgggtagtagagttcttgccatagccaaaaagaatatgctaaaggatacaaacacaatttcagtcgataaaaaatcattttctcttgatgttacatctgaaatggagaaaaaaggagcaaaatttatttgcaaaaagctggaaaaaattcctgatgatgataccccactgattattgcaacaggtcctcttacacctgaagagcttatggccgatatagcgaagcaatgtaatttgctaaattataccttttccgacgcaaccagtccggtaattgacggaactaacatacaatatgacgatcttcacttgcaaaagctaagtaatgatttatatgttttaaatatctcaaatgatgaatttgatatgtttttcaacgttctcttaaattcagagagcaacaaagaccatttgattgataaaggtaatgattttatccaatgtcaatctttagaacgtcttgcaaaacaggggaaaaaattccttgtctcaaaacgctttacatacgatgatatgcctgtaccttcactattattacgtcgtgaaacagctttaaatgacgcatttattttagtcggatgtacaactgcattggggcataaagatcagctttctttattttcaacgttaccagcattacgaaaagtaaaatttattcgatatggcagacagcataggaattcttattttaaaacaccaggtgtacttaattctttttttcaggtaaaaaacaaaaaaagagatatattcattattggacaattatctggattggatggatatgcaccagcaatcgcaagtgggtatgtagctgctcgtaaataa

SEQ ID NO: 73380 - protein, 297 aa, Unknown
  Obtained from environmental sample
  DOMAIN (1)...(297): Glucose inhibited division protein A
  misc_feature (1)..(297): Xaa is any amino acid
MYNSFGNIYKLSPLGLLLSELEYLGSRVLAIAKKNMLKDTNTISVDKKSFSLDVTSEMEKKGAKFICKKLEKIPDDDTPLIIATGPLTPEELMADIAKQCNLLNYTFSDATSPVIDGTNIQYDDLHLQKLSNDLYVLNISNDEFDMFFNVLLNSESNKDHLIDKGNDFIQCQSLERLAKQGKKFLVSKRFTYDDMPVPSLLLRRETALNDAFILVGCTTALGHKDQLSLFSTLPALRKVKFIRYGRQHRNSYFKTPGVLNSFFQVKNKKRDIFIIGQLSGLDGYAPAIASGYVAARK

SEQ ID NO: 73381 - DNA, 741 bp, Unknown
  Obtained from environmental sample
  misc_feature (1)..(741): n is a, c, g, or t
ttgtatgaagaaaatatacaaaatatgttttcttcttttacagacataaaagcgataaatattatgagtaaatatacaaaagactggcttaacaggcatccggatgtgcagcttttatcaataattaacttattgaataacagacttttatatttttcttttttaaaatgcgctccgcttgtttttcgacattatatatacgacaatggacattggctggcagcggaaaacggaaatactccttttaaaactattgaaagttattccatgttggatattcttccggaaattacttctttttccgatactgattataatactttaacaatgatggtaaataatttgcctcatgaacctgcttttttacaagctccgaattatacaattccttcagtatcttctacaaataagggaaatggtaaatttgcgcttgattattattatcatataaatatcgcttctttattattattggggaaatggtttatgttccttaaagaaaacggagtatatgataacacaagaattattgttgtttcagaccatggtattaacgcattctctgaatttgatggaaatataatcttaccaacaggtgaatgtcttcaattttatacggctctattattatataaggattttaacgcgggaataacaagtgaggtatcgataaataatcaattcatggtaaacgcggatactcccattcttgccgtacagggaattatttcgaaactataa

SEQ ID NO: 73382 - protein, 246 aa, Unknown
  Obtained from environmental sample
  misc_feature (1)..(246): Xaa is any amino acid
MYEENIQNMFSSFTDIKAINIMSKYTKDWLNRHPDVQLLSIINLLNNRLLYFSFLKCAPLVFRHYIYDNGHWLAAENGNTPFKTIESYSMLDILPEITSFSDTDYNTLTMMVNNLPHEPAFLQAPNYTIPSVSSTNKGNGKFALDYYYHINIASLLLLGKWFMFLKENGVYDNTRIIVVSDHGINAFSEFDGNIILPTGECLQFYTALLLYKDFNAGITSEVSINNQFMVNADTPILAVQGIISKL

SEQ ID NO: 73383 - DNA, 546 bp, Unknown
  Obtained from environmental sample
  misc_feature (1)..(546): n is a, c, g, or t
ttggccgaggtttttcagataggcctcttttccgtcgggggtgggcttgcaaccctgcccttcctctacaacatggcatcaaaccgcgcctggcttacgagcgaaaacatcgggaactttcttgccatcgcgcagtcttctccgggggccatcggggttaatgtttccgcccaaacagggtaccttgcttcgggaataaacggggccattctcgcgcccctggctttggtaaccccggcgatactgatgatcatcgtcattgccagagtcctttccgcgtttaaggaaaacaccgtggtagcggcggtgttctgcggcctccgccccgccgcggcagggctgatctttgccgcgggctttggggtaattgccctgtccctgtattccatggaagctttccgccaggcgggaatctggtacggcggtatccgctggaaagaaataatcctgttcgcggttctttacctgttgatctggaaattccagaaacatcctatactatacgttgtcatcgccggggccgctggaatagcgctgggactgtaa

SEQ ID NO: 73384 - protein, 181 aa, Unknown
  Obtained from environmental sample
  DOMAIN (1)...(164): Chromate transporter
  misc_feature (1)..(181): Xaa is any amino acid
MAEVFQIGLFSVGGGLATLPFLYNMASNRAWLTSENIGNFLAIAQSSPGAIGVNVSAQTGYLASGINGAILAPLALVTPAILMIIVIARVLSAFKENTVVAAVFCGLRPAAAGLIFAAGFGVIALSLYSMEAFRQAGIWYGGIRWKEIILFAVLYLLIWKFQKHPILYVVIAGAAGIALGL

SEQ ID NO: 73385 - DNA, 318 bp, Unknown
  Obtained from environmental sample
  misc_feature (1)..(318): n is a, c, g, or t
atgaccgatgtggatcgctttggaatcgcggaaagcgcacggcggatcgtttcgttctttaagggaaacgtggatcgtattcatgtaagcgttgacatggacgttatggatccggccattgcccccggcgtggggatacctctaagcgggggttttacccaccgggaagtgctgctcctggcggaagaactggccgcttcgggccttttgggttccgccgacatagtggaagtaaaccctgtccttgatgtacggaaccagacggcccggatggcggtggaaatagtgggacggctcctggggggccgcatttattga

SEQ ID NO: 73386 - protein, 105 aa, Unknown
  Obtained from environmental sample
  misc_feature (1)..(105): Xaa is any amino acid
MTDVDRFGIAESARRIVSFFKGNVDRIHVSVDMDVMDPAIAPGVGIPLSGGFTHREVLLLAEELAASGLLGSADIVEVNPVLDVRNQTARMAVEIVGRLLGGRIY

SEQ ID NO: 73387 - DNA, 408 bp, Unknown
  Obtained from environmental sample
  misc_feature (1)..(408): n is a, c, g, or t
gtgactttggaagatggcctgttgtttttggacagttgcctgaagcaattctgcgcttttatagcgcagcacaacgaacaggcttccgccgccctgcacgaagccgcaaagcagtatgtgtgcattcactacggcgagagcttttcagtcagcagaatcgcggcaagcctgaacaccacgccggaacacctgaacagggtctttctggaaaaggaacgggcgaccctgttcgactacgtgatgtacgtgcgcgtttgcgaggcgcagcaattgttggtcagcactgacctggacgaggagattgtcgcggtgaagtccggtttcgacgacgtgaaatatttcaggtccatgttcaggaaatacaacggcgacagcccggctgaataccgggctaaagcggggaattag

SEQ ID NO: 73388 - protein, 135 aa, Unknown
  Obtained from environmental sample
  DOMAIN (87)...(131): Bacterial regulatory helix-turn-helix proteins, AraC family
  misc_feature (1)..(135): Xaa is any amino acid
MTLEDGLLFLDSCLKQFCAFIAQHNEQASAALHEAAKQYVCIHYGESFSVSRIAASLNTTPEHLNRVFLEKERATLFDYVMYVRVCEAQQLLVSTDLDEEIVAVKSGFDDVKYFRSMFRKYNGDSPAEYRAKAGN

SEQ ID NO: 73389 - DNA, 759 bp, Unknown
  Obtained from environmental sample
  misc_feature (1)..(759): n is a, c, g, or t
atgtggtggaccagtcacccatatttactagatgttgtcaggctgatgtataaccaaaatgaggacggaagccttgcatctggacaatatcccagccagaataattctgatggcataaaggttaatgggcgttataaacgtgtatttaccgaacagaatacggcagatatgaagtgggcaattaccagtgggcattctatggctagcgaataccgtccagacagggaaaacgcggtaggtcggaattatagccgtaacagcgatgaaaaagccgcttttgcgtctgatgtaagatatcgaaacctctttgattttagcattaacgacagagacgcgatttatcctgtacgttcggggtatttttttaacccggcgggaagctacacctttaaaataactacggaaatatataaaaacacaggagatagtacgccggaacatgaaaaattggttaatgatttaatttcggcttttcggtatgaatctaacatgacctatgtcaatacggcaagggatgctgtttatattgacggaactccggctacaagaagcggaaccgcttatggacctcatacagcttatgtttcaaccggaagcactccgttgttcaacagaaatgtggcggtaagtaacaaacttgttaatgggccattgtttgatattggagtatcaatgcagtataacaaggatagtgcggtagaaactcagcacaactatgttgaaactggagcgaacgcaattacagacccgcgcttttaa

SEQ ID NO: 73390 - protein, 252 aa, Unknown
  Obtained from environmental sample
  misc_feature (1)..(252): Xaa is any amino acid
MWWTSHPYLLDVVRLMYNQNEDGSLASGQYPSQNNSDGIKVNGRYKRVFTEQNTADMKWAITSGHSMASEYRPDRENAVGRNYSRNSDEKAAFASDVRYRNLFDFSINDRDAIYPVRSGYFFNPAGSYTFKITTEIYKNTGDSTPEHEKLVNDLISAFRYESNMTYVNTARDAVYIDGTPATRSGTAYGPHTAYVSTGSTPLFNRNVAVSNKLVNGPLFDIGVSMQYNKDSAVETQHNYVETGANAITDPRF

SEQ ID NO: 73391 - DNA, 879 bp, Unknown
  Obtained from environmental sample
  misc_feature (1)..(879): n is a, c, g, or t
ttgttattgggtataaaacaacggacgtttcttccagaaacgaagaaattccccgcataccctgtgggctatgtggaacatctagatatgtattctctggattttgaggaatacctctgggcaaggggcgttacggcagaatccattgcggatataaaagagtattttgaccggaaaaagaaagtcccccctgccatgcatgagcgcatgatggaacttttcaaggaacatattgtcgttggcggtatgccgcgggttgtgcaggaatttgtcgataccggtaattttaacgcggttctgaagctgcaacgggatataatcagcgactacgcgagtgatattgccaaatatgcggaaagctccgaaaaggttaaagcccgctcttgtttctactcgattcccaaacaactcgcaaaggattacaaaaaattccagtacagtattgttgaaaagaaaggaacaaacaggaaattcggaggcagtctggaatggctctatgatgcgggcataatcaatttctgttacaaccttcgctgtccggaacttccccttgagggcaatgccatagatgacatattcaaagtctatatgcgggataccggactgttaacagccatgctggaagacggatctcaggcggatattattgacggcaaactgggtatttataagggcgcgctctacgaaaacattattgccgatgtttttggcaagctgggaaaaaaattattttattatgaataccgcggtcaaatggaaatagatttctttattcgccggaattcacaggcccaggctgtagaggtaaaatccgccggaaataccaaatcaaaatcactggacaatatcatcaaaaattacggggtgaacacgggataa

SEQ ID NO: 73392 - protein, 292 aa, Unknown
  Obtained from environmental sample
  misc_feature (1)..(292): Xaa is any amino acid
MLLGIKQRTFLPETKKFPAYPVGYVEHLDMYSLDFEEYLWARGVTAESIADIKEYFDRKKKVPPAMHERMMELFKEHIVVGGMPRVVQEFVDTGNFNAVLKLQRDIISDYASDIAKYAESSEKVKARSCFYSIPKQLAKDYKKFQYSIVEKKGTNRKFGGSLEWLYDAGIINFCYNLRCPELPLEGNAIDDIFKVYMRDTGLLTAMLEDGSQADIIDGKLGIYKGALYENIIADVFGKLGKKLFYYEYRGQMEIDFFIRRNSQAQAVEVKSAGNTKSKSLDNIIKNYGVNTG

SEQ ID NO: 73393 - DNA, 912 bp, Unknown
  Obtained from environmental sample
  misc_feature (1)..(912): n is a, c, g, or t
ttgtttttcccgataattatcaaagaaaaagaagaaatattaaacggcggctcaatatcggtagacagattaaacgctttaggcaactggaatcttgaacagttaaaaaaaatggttcctgaagacaacgcggaacggttttactcgcaggaaatgacagttaagacgcgttttggcgagtataaagtcaaaggcgatatttttaccgcccaatcttataatgaatatttgcaaaagatgttaagcgctattaccggcaacatggcaagaggttcatcaaacaggcggaagacaacaatgccggtaatgcagatagatcaaagtattcttgtttccgccgttgataaattcatcagaacaaaaatgtttgaccggccttttgacccaatggaaggcaataattggcgcgtgcttatactaagcggcgcaaaaattattgatcacgtaataatggaactttcaaaggcgatttacgaaatgcaaagtaatcttgacatcagcgaagctgttgtagaaaaacaatatttctcaacaataaaaacgattgtcggacggaaaaactattctcttgatatagttaagtcaatttataaaatgactttttacccatcaaataaaggcgggctggaaaaagattttatgcttgcctgcgacgctgattccaaagttgaacgtattataaagataaatgagaacaagcatatttttgcccgttttcgatatctccgttcagacgggatgttgtcatcatattatcctgattttatgttaaaaataggcagtaacatctatgtggtggaaacaaaaggttcggacagagcgtcaaaccctgacgtgctaagcaagcagcgaggcgcattagactggattaaaaagataaacgaattaaacctgaagaccgaatggatgtga

SEQ ID NO: 73394 - protein, 303 aa, Unknown
  Obtained from environmental sample
  misc_feature (1)..(303): Xaa is any amino acid
MFFPIIIKEKEEILNGGSISVDRLNALGNWNLEQLKKMVPEDNAERFYSQEMTVKTRFGEYKVKGDIFTAQSYNEYLQKMLSAITGNMARGSSNRRKTTMPVMQIDQSILVSAVDKFIRTKMFDRPFDPMEGNNWRVLILSGAKIIDHVIMELSKAIYEMQSNLDISEAVVEKQYFSTIKTIVGRKNYSLDIVKSIYKMTFYPSNKGGLEKDFMLACDADSKVERIIKINENKHIFARFRYLRSDGMLSSYYPDFMLKIGSNIYVVETKGSDRASNPDVLSKQRGALDWIKKINELNLKTEWM

SEQ ID NO: 73395 - DNA, 723 bp, Unknown
  Obtained from environmental sample
  misc_feature (1)..(723): n is a, c, g, or t
atggtacttgaagaatgtttcgcttatatgaacggtcgttacatgaatgcggagattgccggtatttacggcggaacaggtcccaaacccggcgattccactcgcgcgggcggaaacggctttaagatgggcggcgaaggaatttctgtcccccatttggcgataaactgccttgccttccagaatgacggcgacggttttaccagcaactctgatccagcggtacgcttaacttactgcacatccgttgacaatgacaaccgcaatgaacaaaccggcagcggcagttctaattacgccgtttatggcgcaggctctgcaagccatgaagggcttgacgcggtgcttacccagattttctcatggtggtcggttagaaaagatcaccgcgatgaccgcgtggaacccaagtctcccgcttctggttatgtatggagaagcggtaagagcgtaagcacgctttatattgacggaaaattatcaaacggaagaaacaactatgtagacggaaacattatgtatgattccagcgtaaacgacagttacaacaatttgtattatggcggcaagaccgcgttttccggcaatgtcgcgccatttgattcaagtattatcggggatttcctggatgtcgatcaaactacaggtaaacctaaattgggaaattttatgaaactgacgggaataaccggagtaacgcccggcatacagggaatgtggtga

SEQ ID NO: 73396 - protein, 240 aa, Unknown
  Obtained from environmental sample
  misc_feature (1)..(240): Xaa is any amino acid
MVLEECFAYMNGRYMNAEIAGIYGGTGPKPGDSTRAGGNGFKMGGEGISVPHLAINCLAFQNDGDGFTSNSDPAVRLTYCTSVDNDNRNEQTGSGSSNYAVYGAGSASHEGLDAVLTQIFSWWSVRKDHRDDRVEPKSPASGYVWRSGKSVSTLYIDGKLSNGRNNYVDGNIMYDSSVNDSYNNLYYGGKTAFSGNVAPFDSSIIGDFLDVDQTTGKPKLGNFMKLTGITGVTPGIQGMW

SEQ ID NO: 73397 - DNA, 768 bp, Unknown
  Obtained from environmental sample
  misc_feature (1)..(768): n is a, c, g, or t
ttgtcgaaaacaggacatccccggcaagcaaaatatgagcagaaaaaacttttcccttacatggataaaaatagtttgtttcagactcccaaaccagagcgcctaatagagcgggttctgacactcgccaccaaccccggcgacctggtcctggactccttcctcggatcgggcaccacggcggcggtcgcccacaagatgggcaggcgctggataggcgtcgagttcggcgaccactgtttcacgcactgcctgccgaggctgcagaaggtcgtggacggcgagcaggggggcatatccaaggccgtcaagtggacgggtgggggcggctttaggttctacgagctggcgcccaccctgatagtgaaagacgaaaacggcatggaggtgatctccagcaagtacagccccgccatgctggccgcggccgtcgccaagctgtgcggctaccgctacgcgccaagggcggacaacccctacatccacggcgagaacggcaccggcggctacatctttgtcaccacgcagttcgtcacgccgccctttctggacgagatagccaaaaggttccgcgacggccagaagctgaccatctgcgcgtcggcgtttcagccaggcgtgggcgcggcccaccccaacgtctgcctgcggaagataccgcagtcggtgctctccaggtgcgagtacggcgcggagaactacaacctgaagatagttgacctgccggatttcgaagaaacggaagaggactttgagtatgctgactga

SEQ ID NO: 73398 - protein, 255 aa, Unknown
  Obtained from environmental sample
  misc_feature (1)..(255): Xaa is any amino acid
MSKTGHPRQAKYEQKKLFPYMDKNSLFQTPKPERLIERVLTLATNPGDLVLDSFLGSGTTAAVAHKMGRRWIGVEFGDHCFTHCLPRLQKVVDGEQGGISKAVKWTGGGGFRFYELAPTLIVKDENGMEVISSKYSPAMLAAAVAKLCGYRYAPRADNPYIHGENGTGGYIFVTTQFVTPPFLDEIAKRFRDGQKLTICASAFQPGVGAAHPNVCLRKIPQSVLSRCEYGAENYNLKIVDLPDFEETEEDFEYAD

SEQ ID NO: 73399 - DNA, 396 bp, Unknown
  Obtained from environmental sample
  misc_feature (1)..(396): n is a, c, g, or t
ttggttggtatcgtgaaaaaacggctggcttatggaataacaattgttattttgggcttacttattgccttggggccacagttcttatttaaggtttgttcggcacatgacggcgcatttcctctctgtcattggtcggcacaggcggaattaggtatggggatgttagtcgctgcgttgggtctctgttttattactttttctgaactaaaaacacaacttggtttggcaattggcatatttttgatcggtattattgtcctgggtattccctatgcacttatcggcggatgtacttcaaagacgatgtcgtgccacagagttgcttttccagctctgacaattcagggcgtaattttattggtatattcagcnggttatggtagtttatcttga

SEQ ID NO: 73400 - protein, 131 aa, Unknown
  Obtained from environmental sample
  misc_feature (1)..(131): Xaa is any amino acid
MVGIVKKRLAYGITIVILGLLIALGPQFLFKVCSAHDGAFPLCHWSAQAELGMGMLVAALGLCFITFSELKTQLGLAIGIFLIGIIVLGIPYALIGGCTSKTMSCHRVAFPALTIQGVILLVYSAGYGSLS

SEQ ID NO: 73401 - DNA, 405 bp, Unknown
  Obtained from environmental sample
  misc_feature (1)..(405): n is a, c, g, or t
atgtatctgctagacacgatggtcttgtctgagttgcgaaagaaagaacgcaacccaagcgtggcggcgtggctctctggcaaggctgatggagagctttttatcagtgtggtcagcgttgccgagatagccaaagggatagcgcagaaggacaaacaagataatgtgtttgccggaacgctgaggcggtggcttgacaaattgctgctgctctatggcgacaggatacttccggtggacgttcccatcgccaaaagatggggggagatgagcgcacaggcgcacaactctggcgcagatgcgctgcttgccgccacagcgattgaacatggcctaagcattgtcacgcgcaacgtaaaacacttcagtgcgtttggagcaaaaatcataaatccctggggatga

SEQ ID NO: 73402 - protein, 134 aa, Unknown
  Obtained from environmental sample
  DOMAIN (2)...(132): PIN domain
  misc_feature (1)..(134): Xaa is any amino acid
MYLLDTMVLSELRKKERNPSVAAWLSGKADGELFISVVSVAEIAKGIAQKDKQDNVFAGTLRRWLDKLLLLYGDRILPVDVPIAKRWGEMSAQAHNSGADALLAATAIEHGLSIVTRNVKHFSAFGAKIINPWG

SEQ ID NO: 73403 - DNA, 366 bp, Unknown
  Obtained from environmental sample
  misc_feature (1)..(366): n is a, c, g, or t
atgtttggcaaggttcataatattcatttcgttggcatcggcggcatagggatgtcggggatagcggaagtgctcatcaatttgggcttcagcgttagcgggtctgacgtcaagtctggcccagtgacagaaaggctttcccagctgggcgcgaaaatccgcatagggcacgacgcaagctgcctagccaacgcccaagtagtagtaatttcaagcgccgtaaagccagacaacccggaagtgcaggcggcctatgaagccaaggtgcctgtgatcccccgtggcgaaatgctggccgagctgatgaggatgaaaaaaggcatagccgtagccggctcccacgcaagacgaccaccacaagcatga

SEQ ID NO: 73404 - protein, 121 aa, Unknown
  Obtained from environmental sample
  DOMAIN (7)...(106): Mur ligase family, catalytic domain
  misc_feature (1)..(121): Xaa is any amino acid
MFGKVHNIHFVGIGGIGMSGIAEVLINLGFSVSGSDVKSGPVTERLSQLGAKIRIGHDASCLANAQVVVISSAVKPDNPEVQAAYEAKVPVIPRGEMLAELMRMKKGIAVAGSHARRPPQA

SEQ ID NO: 73405 - DNA, 381 bp, Unknown
  Obtained from environmental sample
  misc_feature (1)..(381): n is a, c, g, or t
ttgaggaaggnaaatgccggaagggtaagggactttgtttccgactgggaacaaactgccaattccgtccggaaccggaggcgcgatcggagcctttccatttactggcttgaatattntaagaaattctccattccctttggggccctntcatttgtacttgtggcggtatccatcggcttgttgacaaacaaaggcggtcaaactgtaggatttattattggtatctgtatggcggctgtctattgggcactgcttcttatcggtcaggacttgggaaccaggctggatttttcccctttctgggccatgtggtttcccaattttctggccattgcggggggaggtgttttgttggtaaaaagaattctttttctatga

SEQ ID NO: 73406 - protein, 126 aa, Unknown
  Obtained from environmental sample
  misc_feature (1)..(126): Xaa is any amino acid
MRKXNAGRVRDFVSDWEQTANSVRNRRRDRSLSIYWLEYXKKFSIPFGALSFVLVAVSIGLLTNKGGQTVGFIIGICMAAVYWALLLIGQDLGTRLDFSPFWAMWFPNFLAIAGGGVLLVKRILFL

SEQ ID NO: 73407 - DNA, 468 bp, Unknown
  Obtained from environmental sample
  misc_feature (1)..(468): n is a, c, g, or t
atggggcgaaaggttgcagcgggggcggcgtccccagccccggctccagcgggggcggcggctccggcgggtcaaggcggcggggaaggccacggngcatcggcaggcgcatcggcaggcgcatcggggggcgcatccggcggcggcgacgtgcgctcgcgcccggtcttcaagcctgtctccttgccgtctttgaccgtcaacctggcggatccctcaggcacgcgctacctcaagatcggcatggatgtggaactgaacgcgcccgaggccgctcaagaaattgacgcccaagccgcgcgcgtgcgcgatgcgatcattctgctgctttccagcaaacaaattcaggatcttaccacggcagaaggcaaaatcctgctcaagaccgaggtcgctgcccggctcaaccagatcctcggcgcgcaacgcgtggtgcggatttattttaccgaatttgtcattcgctag

SEQ ID NO: 73408 - protein, 155 aa, Unknown
  Obtained from environmental sample
  SIGNAL (1)...(19)
  DOMAIN (9)...(155): Flagellar basal body-associated protein FliL
  misc_feature (1)..(155): Xaa is any amino acid
MGRKVAAGAASPAPAPAGAAAPAGQGGGEGHGASAGASAGASGGASGGGDVRSRPVFKPVSLPSLTVNLADPSGTRYLKIGMDVELNAPEAAQEIDAQAARVRDAIILLLSSKQIQDLTTAEGKILLKTEVAARLNQILGAQRVVRIYFTEFVIR

SEQ ID NO: 73409 - DNA, 456 bp, Unknown
  Obtained from environmental sample
  misc_feature (1)..(456): n is a, c, g, or t
ttgtttccagagggcccaaacgaacttacaaccgaaggcggtttaaatgttgatgcgaaggctgcagaggttgaggttgcggttcgggcttgncaaagctctggaatttttgtcagtgtgttcatagacccaaaaatagaccaagtgaaagcggctcgcaaggttggcgcagattacgtggaatntcatacagggcattatgcagaagcctttgagcggcacgacgaacgtggaatagaatcggagcttttaaaattgcaggaccaaattacccttgcgttgaaaagcggtttaaaggtcaatgcagggcatggcttgaattatcgcaacataaagggaatagcggaactcagcggaatagaggagtttaatatagggcatagcattatagcacgtgccgctttggttgggatggaaaaagctgttaaggaaatgctgagtttaataggcaaataa

SEQ ID NO: 73410 - protein, 151 aa, Unknown
  Obtained from environmental sample
  DOMAIN (1)...(151): Pyridoxal phosphate biosynthesis protein PdxJ
  misc_feature (1)..(151): Xaa is any amino acid
MFPEGPNELTTEGGLNVDAKAAEVEVAVRAXQSSGIFVSVFIDPKIDQVKAARKVGADYVEXHTGHYAEAFERHDERGIESELLKLQDQITLALKSGLKVNAGHGLNYRNIKGIAELSGIEEFNIGHSIIARAALVGMEKAVKEMLSLIGK

SEQ ID NO: 73411 - DNA, 855 bp, Unknown
  Obtained from environmental sample
  misc_feature (1)..(855): n is a, c, g, or t
atggctgtagccctcggagggcgcatggatctagtgaataatcctttccatattcttgcggctaccncaagggacaatcgacagcggatcatggaactggccgatgaacggagccttttgtttgatcctgccgcttgtgaacgtgcacgttccgatttgctcaatccaagaaaacgtctcgctgcggaaatggcttggctccctggcgtcaatcctaagcgtactgtcgaatttatgtccctattggaaacatcaccgtcagatgtgttcaacgtgacggagttggaaccactcgcgcacgccaatctcatcgcctccggcctagcccgccttcctgcctccgcaccaatggatcttgccaaatggatattggccatcgcgcaaacatttgaattcatggacccagatgaggtatgcggtgttatcaacgaagaacgtatcgccgcgggctttcccgaagtaacagatatggcggatgttgaatttgaactccaggagcggcggcggcattaccgcaaaagccttatggccgccctggatgccctgccttccgttgatttgattaaagctgtgacccttgctgtggaatccgccacagatattggagaaaagcaaggcccggttttactggacgatttggttgatgcatatgcggtggaggcccagagttttcttgaggcggaagaggaaaacatcaaggtcttgctcgaaaaggtaaaggcggcggcggacgccggatcttctgatgccgcgttgaatgtatgggcggacagactcattgctgttatcaaaaacntgggattttgtggcgcaacccatccaggtcagcacaaaaagcagaggcttgggtcatga

SEQ ID NO: 73412 - protein, 284 aa, Unknown
  Obtained from environmental sample
  misc_feature (1)..(284): Xaa is any amino acid
MAVALGGRMDLVNNPFHILAATXRDNRQRIMELADERSLLFDPAACERARSDLLNPRKRLAAEMAWLPGVNPKRTVEFMSLLETSPSDVFNVTELEPLAHANLIASGLARLPASAPMDLAKWILAIAQTFEFMDPDEVCGVINEERIAAGFPEVTDMADVEFELQERRRHYRKSLMAALDALPSVDLIKAVTLAVESATDIGEKQGPVLLDDLVDAYAVEAQSFLEAEEENIKVLLEKVKAAADAGSSDAALNVWADRLIAVIKNXGFCGATHPGQHKKQRLGS

SEQ ID NO: 73413 - DNA, 747 bp, Unknown
  Obtained from environmental sample
  misc_feature (1)..(747): n is a, c, g, or t
atgaaaattacaggaggaaaacatatggcgaaaaagcgcgtggcggtgctgttcgggggcgcgtccgaagaccataacgtatcgctgaaatcggcttgttcggtgcttcgcggacttgacaggtcaaaatacgacgttatcccgatcggaattacgaaagcgggtaggtggctgtatttccccggtgacttctcgctgatcccggacggcagttgggagaacgactccgacaactgctcggccgtgttaagccccgatccgcaccacggcggattaataaagcttatggacgatgacagccattctttgcagaaaatcgacgtgattttccccgtactcggcggaaaatacggcgaatgcgggcaaattcaggcgctttgcaagatgtcgggcattgcgtacgcggggagcgggttctcggcggcgaacgtctgctttgacaagacgcttacgcatttaatcttagacaaagccggcataaaaaccgcgaaatactgctgcgtcgaacgggttgacattgacgctatggagaataaattcgccgagatagaagcgctggttaaatacccgatgtacgttaagccgtcgtgcgcgtcgacttcggtgaaagctgccgaggcgcgtacccgcgaggaagtgaaagccgcccgtaaatcgcgttttcgcaccaccacaaaatcattatcgaggagcagattttgggccgcgaactcaatgtatagtgtgggggagcgtggactcgcttaa

SEQ ID NO: 73414 - protein, 248 aa, Unknown
  Obtained from environmental sample
  DOMAIN (12)...(146): D-ala D-ala ligase N-terminus
  misc_feature (1)..(248): Xaa is any amino acid
MKITGGKHMAKKRVAVLFGGASEDHNVSLKSACSVLRGLDRSKYDVIPIGITKAGRWLYFPGDFSLIPDGSWENDSDNCSAVLSPDPHHGGLIKLMDDDSHSLQKIDVIFPVLGGKYGECGQIQALCKMSGIAYAGSGFSAANVCFDKTLTHLILDKAGIKTAKYCCVERVDIDAMENKFAEIEALVKYPMYVKPSCASTSVKAAEARTREEVKAARKSRFRTTTKSLSRSRFWAANSMYSVGERGLA

SEQ ID NO: 73415 - DNA, 432 bp, Unknown
  Obtained from environmental sample
  misc_feature (1)..(432): n is a, c, g, or t
atgaacagggaagtagcgattaacattaaaaccgttcagatcgccgaaaacgagcgcgacacgaccgagctgttcacgcgcggcatacttaaaaaagggcgcggccgcggcaaatacactctgatttacgaggagagcgacgcgaccggattcggcggcaacacggtcagctttgccgttacgggcgacaacatggtggttatggagcgcaaaggcgacgcccccgcgaacataatcgtcgaaaagggcaaaaaacaccactgccattacggaacgccgtacggagactttatgatagggataaccgccggcgatatcaaaagcagtcttaccgacgacggcggcgatctgtatctgaaatacacgatagatataaattcgagcctgatgtcggagaacgagctgacgatagacgttaaggcgattcagtaa

SEQ ID NO: 73416 - protein, 143 aa, Unknown
  Obtained from environmental sample
  misc_feature (1)..(143): Xaa is any amino acid
MNREVAINIKTVQIAENERDTTELFTRGILKKGRGRGKYTLIYEESDATGFGGNTVSFAVTGDNMVVMERKGDAPANIIVEKGKKHHCHYGTPYGDFMIGITAGDIKSSLTDDGGDLYLKYTIDINSSLMSENELTIDVKAIQ

SEQ ID NO: 73417 - DNA, 327 bp, Unknown
  Obtained from environmental sample
  misc_feature (1)..(327): n is a, c, g, or t
atgagaaacgaagcaatttttgacgaagtgcaaattttgaaagagatcatcggcagttttagcactgttaagaaaatatatcttttcggttcccttgcgtatggacagccggatgaaaattcagatatagatttatacgtagtattgaaaaacgaagctgcacagacatattttgaagaagggatacgcatgcgcagcgccgtagccggcaagatttccgtcaaaacagacattcttgtgaaaccggaacgaacatttcttgcacgcgcgcggcagggaggatatctggaacaaacgattatgcaaaaagggatatgtatttactga

SEQ ID NO: 73418 - protein, 108 aa, Unknown
  Obtained from environmental sample
  DOMAIN (9)...(107): Nucleotidyltransferase domain
  misc_feature (1)..(108): Xaa is any amino acid
MRNEAIFDEVQILKEIIGSFSTVKKIYLFGSLAYGQPDENSDIDLYVVLKNEAAQTYFEEGIRMRSAVAGKISVKTDILVKPERTFLARARQGGYLEQTIMQKGICIY

SEQ ID NO: 73419 - DNA, 822 bp, Unknown
  Obtained from environmental sample
  misc_feature (1)..(822): n is a, c, g, or t
ttgacaccccatgggatagtgtcttgcacaataaaacgcttgaatttttgcgggacatttttgatacttggtgggatgcccgaagtggtagccgcttatgcaaatggagaaggaatgtataaatgtcagacaattttaaacgatttaataaattcgttgcgaactgattttgcaaaatataagcaacacataccgactttgcagattgtagaggcgtttaaggcagtaacggaacaagttggcaagaaatttatgtattctcgagcaggacaagattattcgccttatcaaatgaaaacggcagtggaactgcttgtaatggcgggtttggtaatccctgtgttgcatacatcggcaaatggaataccgcttggggcgcaggttaatttgaaaaaacaaaaaatgcttgtacttgacaccggaattttacaacgtttacttggtctgcaacttgctgatatattggtgaataaagattttgatgttgtaaataaaggaaacattgcggaactttatgttggtttggaacttttgaaagcaacatcttgttacgaaatggcgcaactttactattggcagcgcgaggaacaaaatgcacatgcggaagttgattatattttgcagaaaaattacgatattatacctttggaagtgaaatccggcaagcaaggtaaaatgcaaagtttgcatctgtttttaaagggaaaaaatttgccctttggctatcgtacttcgctcgaaaactatgcagaatacggaaaaataaaaataattccgctatatgccgtagcagaattgatgaaaatgaataaaaaattataa

SEQ ID NO: 73420 - protein, 273 aa, Unknown
  Obtained from environmental sample
  misc_feature (1)..(273): Xaa is any amino acid
MTPHGIVSCTIKRLNFCGTFLILGGMPEVVAAYANGEGMYKCQTILNDLINSLRTDFAKYKQHIPTLQIVEAFKAVTEQVGKKFMYSRAGQDYSPYQMKTAVELLVMAGLVIPVLHTSANGIPLGAQVNLKKQKMLVLDTGILQRLLGLQLADILVNKDFDVVNKGNIAELYVGLELLKATSCYEMAQLYYWQREEQNAHAEVDYILQKNYDIIPLEVKSGKQGKMQSLHLFLKGKNLPFGYRTSLENYAEYGKIKIIPLYAVAELMKMNKKL

SEQ ID NO: 73421 - DNA, 408 bp, Unknown
  Obtained from environmental sample
  misc_feature (1)..(408): n is a, c, g, or t
gtgttctttttggcgcggtggcgcttgtatcgttcactattatatataacgcaaagcgaaaaaaacgcaaagtctgtagctgtggctacggaaaaagctgtgacggctgtcccggttgtgcaaatattaatgcggaggataaaggcaatggcacaaataaataatagcgcagaggactatttggaggctatttttaggcttttgcaaagcgacaaccatgcccattcggtggatattgcggaggctatgggggtcactaagcctagcgtgtttaaggcgcttaaaagcctttcggagcaggggtatataataaaggaaaagtacggtagcgtgacgcttacggaggcgggcaggaagcgggcagaggcggtnaaaaaaagcacaaggctatccgaatgcttcttatag

SEQ ID NO: 73422 - protein, 135 aa, Unknown
  Obtained from environmental sample
  DOMAIN (53)...(120): MarR family
  misc_feature (1)..(135): Xaa is any amino acid
MFFLARWRLYRSLLYITQSEKNAKSVAVATEKAVTAVPVVQILMRRIKAMAQINNSAEDYLEAIFRLLQSDNHAHSVDIAEAMGVTKPSVFKALKSLSEQGYIIKEKYGSVTLTEAGRKRAEAVKKSTRLSECFL

SEQ ID NO: 73423 - DNA, 564 bp, Unknown
  Obtained from environmental sample
  misc_feature (1)..(564): n is a, c, g, or t
atgggcgcggacggctggaagtttgtcgtagccgccatttcggggcttatcgcaaaggaaatggtagtcggcaccatgggcacctttgcgggaatggaacgaagtgaagcaatcggcgcggacggaagcttcgcggacagcgcaatgggcgccatgatgcttggtatcggcgggaccttggggggcataagtatcgcaatccccgcgatgtttgcctttatggcgtttaaccttttgtccgtaccgtgcatggcggcggtagcggccgctaggggcgaatttatggataagaaaaagctttggactgcaataatattttgggtcgtaaccgcctatgtcgtatcgcttgtagtcttctgggtaggcgtgctgtttaccgtaatggaccctatagagataggtgttctttttggcgcggtggcgcttgtatcgttcactattatatataacgcaaagcgaaaaaaacgcaaagtctgtagctgtggctacggaaaaagctgtgacggctgtcccggttgtgcaaatattaatgcggaggataaaggcaatggcacaaataaataa

SEQ ID NO: 73424 - protein, 187 aa, Unknown
  Obtained from environmental sample
  misc_feature (1)..(187): Xaa is any amino acid
MGADGWKFVVAAISGLIAKEMVVGTMGTFAGMERSEAIGADGSFADSAMGAMMLGIGGTLGGISIAIPAMFAFMAFNLLSVPCMAAVAAARGEFMDKKKLWTAIIFWVVTAYVVSLVVFWVGVLFTVMDPIEIGVLFGAVALVSFTIIYNAKRKKRKVCSCGYGKSCDGCPGCANINAEDKGNGTNK

SEQ ID NO: 73425 - DNA, 603 bp, Unknown
  Obtained from environmental sample
  misc_feature (1)..(603): n is a, c, g, or t
gtgcttgtgcgcggcggcggcgccctgcaggatttgtgggctttcaacgatgcccgtctggcccggcgtctggccgcttcccccgtgccggtcttgaccggcataggacacgaaattgataccaccatcgccgatcttgttgccgatgcccgtgcggccacgccgagccatgccgcccaattgctgtggccggagcgtgaatggtacgcgcagcgcctggacgatctggagcaggccatgagccgggctttcaatcgccgcgcggcgtggaatgcggaacgcctgcgggagctggacaggggactggcctggctctcgccggggcgcgtcgcgcgcccgctgcatgagcgcgctgcgggcttgggccgaacgtttggagcaggcctttgccgtcngtctgaatctccgccggaacgtccgcccatgacccctgacaagctggggcgcctcaagcggaaatgccctggtcaaaaatcccaatgcccgggtttgccaactttgaggaatgtttttcgggcaaaaggggccctttcttttccggcccgggaaaaattggaaaaaatggatgggaaacccgccccgggcgcggaaaaaaacttttag

SEQ ID NO: 73426 - protein, 200 aa, Unknown
  Obtained from environmental sample
  DOMAIN (2)...(166): Exonuclease VII, large subunit
  misc_feature (1)..(200): Xaa is any amino acid
MLVRGGGALQDLWAFNDARLARRLAASPVPVLTGIGHEIDTTIADLVADARAATPSHAAQLLWPEREWYAQRLDDLEQAMSRAFNRRAAWNAERLRELDRGLAWLSPGRVARPLHERAAGLGRTFGAGLCRXSESPPERPPMTPDKLGRLKRKCPGQKSQCPGLPTLRNVFRAKGALSFPAREKLEKMDGKPAPGAEKNF

SEQ ID NO: 73427 - DNA, 873 bp, Unknown
  Obtained from environmental sample
  misc_feature (1)..(873): n is a, c, g, or t
ttgatttggcatatgggttatgagactttggaaattcggcaaaaaaaagctaagaggaatttagagctccaactggcagacccggaacaggaaaaaaaaatagaaggtttgcttgaattaggtgattcttattcggtaattggcgaaacagagaaagctgcggattattatagacgcgcagcggaatttaactgcgcaccggaaatgtttgacttaaagatgaatgccatgaacaaatacgctagacagctggtagctttgaataaagtaaaagaagcaaacgaaatgtttgaaaaatgcataaagcagtttccaaaaaacgaagaagcttattacgggcttgctagggttcttctatcgcaagataaaaaagcagagagcatggttattttcagaaaaatagcttccatgagagcgaatgtaactataggtggaacgaatttttttatcataaagcaagattctctaaaaaatttgagcttatgggaatttgagcagggaaattataagctatcaaaaaattatgccgagcaaatgcttaaagaagataaagataatgaagagggaaaatggctgtttgagcgtgcaaacacggcattgctgaacaaaaacgataaacgccctttgctttcgctttgcatgattgtcaaaaacgaggaaaaaaacataggggagtgcctgaaatcggctgagggcttggctgatgaaattatagtaacagatacaggctcaacggataaaactattgaaatagcgcagagctatggtgcaaaaatagagcatttcacatggataaaggattttgccgctgcgangaatcactccatttcaaaagctaccagccgttggataatatgggctggatgcagatga

SEQ ID NO: 73428 - protein, 290 aa, Unknown
  Obtained from environmental sample
  misc_feature (1)..(290): Xaa is any amino acid
MIWHMGYETLEIRQKKAKRNLELQLADPEQEKKIEGLLELGDSYSVIGETEKAADYYRRAAEFNCAPEMFDLKMNAMNKYARQLVALNKVKEANEMFEKCIKQFPKNEEAYYGLARVLLSQDKKAESMVIFRKIASMRANVTIGGTNFFIIKQDSLKNLSLWEFEQGNYKLSKNYAEQMLKEDKDNEEGKWLFERANTALLNKNDKRPLLSLCMIVKNEEKNIGECLKSAEGLADEIIVTDTGSTDKTIEIAQSYGAKIEHFTWIKDFAAAXNHSISKATSRWIIWAGCR

SEQ ID NO: 73429 - DNA, 843 bp, Unknown
  Obtained from environmental sample
  misc_feature (1)..(843): n is a, c, g, or t
gtggccgcagagtatctaaaagtccagaacaagccccaagaacttgacgacttcaacaactccgtgctagccaagccagttgagccggacaattcaaggacaagcgcggaaatagactattcaaagctgaggggcggatactattgcgagaaaaacgatatgccagaagatgtgtttgctttgactgcgggggtagacgttagtaaaaagatgatatggtttatgctgattggctggggcaccaatgatagaaaattcattataaaaagcgaaggggttcctagaggcagaggcgcggatagccttgagatagctatggataaagtaacggatatatgcactatggattataggtacaaaagaatgaatttcaagcctcagttttctggtgggtttcttgattcgggatacgacactcagcaagtttacgactattgcttaaagaacccgctatggcggccatcgaaaggcgttgaccagcaaaagcaggtcattgtcctttccaaggttgataaggatgtaaaattttcaaaatacaacaacctgccgctcgttcttttaaacacgggaatgcttcacagcagcttgcacgggtatttaagcaccgcgcctggcgagaggcacagcataacctttgccgaggatgcccctaaagttctctttgagcattttgcggcggaagaacagcgcgaggaaatctcaaaaaacggaagaagcgtgttccggtggggcaagttaaaacaccgagctgaccatttgagagacgcctgcctgaatgccattgcgactggcatgtcgctggaattgaatgacgtgaaagaagtccaatggaaggaaaaataa

SEQ ID NO: 73430 - protein, 280 aa, Unknown
  Obtained from environmental sample
  misc_feature (1)..(280): Xaa is any amino acid
MAAEYLKVQNKPQELDDFNNSVLAKPVEPDNSRTSAEIDYSKLRGGYYCEKNDMPEDVFALTAGVDVSKKMIWFMLIGWGTNDRKFIIKSEGVPRGRGADSLEIAMDKVTDICTMDYRYKRMNFKPQFSGGFLDSGYDTQQVYDYCLKNPLWRPSKGVDQQKQVIVLSKVDKDVKFSKYNNLPLVLLNTGMLHSSLHGYLSTAPGERHSITFAEDAPKVLFEHFAAEEQREEISKNGRSVFRWGKLKHRADHLRDACLNAIATGMSLELNDVKEVQWKEK

SEQ ID NO: 73431 - DNA, 426 bp, Unknown
  Obtained from environmental sample
  misc_feature (1)..(426): n is a, c, g, or t
gtgctggtgctgcacatcatattgatagtcgccgccatgctgaccagcactagggcgggctttggggccattttcggcaaaaccgagaacgcgctttcatgggtgacactgggcctggtgctggtcggggggctattcttcggcgccctggtggcaaaggccgccttcggcacctactggggcggctggccctacggatgggacctgacggacaacaagacgctgctgatgttcctggcgtggctggcggcctgcctgctgctgcccgtggccaaggccaggcgaatcgccattgtgaccgccgccgccttgactatcatcgtctatctgattccccacagttttgaagagagcacgcccaaccagcaacaggacacgcttgaagccccgcagggcgagaacactggcgcggaaacagataggtaa

SEQ ID NO: 73432 - protein, 141 aa, Unknown
  Obtained from environmental sample
  SIGNAL (1)...(22)
  misc_feature (1)..(141): Xaa is any amino acid
MLVLHIILIVAAMLTSTRAGFGAIFGKTENALSWVTLGLVLVGGLFFGALVAKAAFGTYWGGWPYGWDLTDNKTLLMFLAWLAACLLLPVAKARRIAIVTAAALTIIVYLIPHSFEESTPNQQQDTLEAPQGENTGAETDR

SEQ ID NO: 73433 - DNA, 807 bp, Unknown
  Obtained from environmental sample
  misc_feature (1)..(807): n is a, c, g, or t
atgtcaaatgcaaaacgcgatatttggatattatttaatggcgaaatttataattataaatcgcttaaaaaagaactttctcaatttacatataaatccaatacggatactgaagttttgttgtatgcctatgaaaaatggggaattaactgtctgcatcatcttaacggaatgtgggcttttgttatttacgatactcgaaagaatttgctctttggcgcgcgggatcgtttcggtgttaaaccattatattatacaaataacaacgaaatttttgcctttagttcggaaattaagggattattagcaaacaaaaatatttcacgaaaaattaacgccagttcttctgctgcttttttaaagacaggcttgttgaattttgaaggagaaactttttttaatgatatttccgaattacaaccatctcattattttatatatgatatatcaggaaaaacaataagcatacagcgatattatgaattgccgttttatgatttatgggaaaaatttgatgaaaataaatgccgcgattatattaaaggtacaaaggaacgtgttattaatgctgttgatttacgtttaaatgctgatgttacaattggttcttgtttaagcggcggaatggattcatcggcaattgtttgttctatatgcgatcttttaggaaagaaaccatacaaatcaatcggttctaaacaagctgtaataaccgcctgttatgaatatttaaagattgatgaaagtaaatgggcgaaattagtcgttgatcatgcttctgcccaatggtataaagtctttccctaa

SEQ ID NO: 73434 - protein, 268 aa, Unknown
  Obtained from environmental sample
  DOMAIN (1)...(98): Glutamine amidotransferases class-II
  misc_feature (1)..(268): Xaa is any amino acid
MSNAKRDIWILFNGEIYNYKSLKKELSQFTYKSNTDTEVLLYAYEKWGINCLHHLNGMWAFVIYDTRKNLLFGARDRFGVKPLYYTNNNEIFAFSSEIKGLLANKNISRKINASSSAAFLKTGLLNFEGETFFNDISELQPSHYFIYDISGKTISIQRYYELPFYDLWEKFDENKCRDYIKGTKERVINAVDLRLNADVTIGSCLSGGMDSSAIVCSICDLLGKKPYKSIGSKQAVITACYEYLKIDESKWAKLVVDHASAQWYKVFP

SEQ ID NO: 73435 - DNA, 660 bp, Unknown
  Obtained from environmental sample
  misc_feature (1)..(660): n is a, c, g, or t
atgaagaaacgtgtttatcttattgccgccgtagtgagtggcgctctggcggtatctggctgcacaactaacccttacaccggcgaacgcgaagcaggtaaatctgctatcggcgcaggtctgggctctctcgtgggcgcgggtattggtgcgctctcttcttcgaagaaagatcgcggtaaaggcgcgctgattggcgcagcagcaggcgcagctctgggcggcggcgttggttattacatggatgtgcaggaagcgaagctgcgcgacaaaatgcgcggcactggtgttagcgtaacccgcagcggggataacattatcctcaatatgccgaacaatgtgaccttcgacagcagcagcgcgaccctgaaaccggcgggcgctaacaccctgaccggcgtggcaatggtactgaaagagtatccgaaaacggcggttaacgtgattggttataccgacagcacgggtggtcacgacctgaacatgcgtctctcccagcaacgtgcggattccgttgccagcgcgttgatcacccagggcgtggacgccagccgcatccgtactcagggccttggcccggctaacccaatcgccagcaacagcaccgcagaaggtaaggcgcaaaaccgccgtgtagaaattaccttaagcccgctgtaa

SEQ ID NO: 73436 - protein, 219 aa, Unknown
  Obtained from environmental sample
  SIGNAL (1)...(20)
  DOMAIN (35)...(82): Rickettsia 17 kDa surface antigen
  misc_feature (1)..(219): Xaa is any amino acid
MKKRVYLIAAVVSGALAVSGCTTNPYTGEREAGKSAIGAGLGSLVGAGIGALSSSKKDRGKGALIGAAAGAALGGGVGYYMDVQEAKLRDKMRGTGVSVTRSGDNIILNMPNNVTFDSSSATLKPAGANTLTGVAMVLKEYPKTAVNVIGYTDSTGGHDLNMRLSQQRADSVASALITQGVDASRIRTQGLGPANPIASNSTAEGKAQNRRVEITLSPL

SEQ ID NO: 73437 - DNA, 753 bp, Unknown
  Obtained from environmental sample
  misc_feature (1)..(753): n is a, c, g, or t
atggcggcgccaggcggcgccgcgctggggccggcccttggcgtgtggatgatgtcgcacatgggcttccccaagatgatgctgctgctggccgcgctgtccgcgtcgctcttcttcgtggtcggtctgttgcctgcggccgaggcccttggccgacccgtccacgaaggctacgaccacgcccgtcctgatgcgggctcttccgggctgcttgggtggatactcgcgccggcagtggtgctggcctgccttgccctcagctatggctccatcccttcatacgggacgcaggaggcgcgtgacctcggcttcgtctggccctccgcgctggtctcctgctacggccttggcatggtgctgctgaggctgtacatgggctggcacggcatgggcagagaccccatgaggctgatgcccaccatgctggcggccaacatcgtcgcggccttcggtctggcgatagtgccaggcggccttgtgcgccacatcctctgcgggacgctgtacggtgccagcttcggcatggcacacacgctggtgtggacttacacgatggcccgcgtggcggcagacaggcgcggggctgccacgggtgcgctgtatttctcctatgacgtgggcatcgcgctcggcagcttcctgatgggcttcccgatggaacacttgggctaccgctggggctgggtcgccgccgccctccccctctgcgccgccttgcccgccggccgcaggatgacaacgcggcggcggtag

SEQ ID NO: 73438 - protein, 250 aa, Unknown
  Obtained from environmental sample
  misc_feature (1)..(250): Xaa is any amino acid
MAAPGGAALGPALGVWMMSHMGFPKMMLLLAALSASLFFVVGLLPAAEALGRPVHEGYDHARPDAGSSGLLGWILAPAVVLACLALSYGSIPSYGTQEARDLGFVWPSALVSCYGLGMVLLRLYMGWHGMGRDPMRLMPTMLAANIVAAFGLAIVPGGLVRHILCGTLYGASFGMAHTLVWTYTMARVAADRRGAATGALYFSYDVGIALGSFLMGFPMEHLGYRWGWVAAALPLCAALPAGRRMTTRRR

SEQ ID NO: 73439 - DNA, 369 bp, Unknown
  Obtained from environmental sample
  misc_feature (1)..(369): n is a, c, g, or t
atgattcagccagaaaccagattgaccgtggccgacaattcgggcgccaagcaactttactgcatcaaggtgctgggcggcagccgccgccgctacgcctccctgggcgacatcattgtggtctcggtcaaggaggctctgcccggctccaaggtcaagaagggcgacgtgatgaaggccgtggtggtgcgctgcgccaaggaagtgggccggatggacggttcctacataaagttcgatgacaattccgccgtcctcataaacaacgcccgcgaaccgataggcacccgcattttcggccccgtggcccgggaactgcgggccaagcgcttcatgaagatcatctccctggcgccggaagtcatctag

SEQ ID NO: 73440 - protein, 122 aa, Unknown
  Obtained from environmental sample
  DOMAIN (1)...(122): Ribosomal protein L14p/L23e
  misc_feature (1)..(122): Xaa is any amino acid
MIQPETRLTVADNSGAKQLYCIKVLGGSRRRYASLGDIIVVSVKEALPGSKVKKGDVMKAVVVRCAKEVGRMDGSYIKFDDNSAVLINNAREPIGTRIFGPVARELRAKRFMKIISLAPEVI

SEQ ID NO: 73441 - DNA, 699 bp, Unknown
  Obtained from environmental sample
  misc_feature (1)..(699): n is a, c, g, or t
ttgggccagaaaactcaccccacaggtttccgtctgggcgtcataaagacatggagttcccgctggtacgccggccgtgatttcggccagcaggtggtggaggaccgcagaatacgcggctatgtcaagaagaagctggaagccgccgggatctcgcaggttgaaatcgagcgggcggccgccaaggtcaagttgcgcatccataccgcccgccccggcatagtcatcggcaagaagggcgcggatatagatatactgaaaaaagaggtcgaaaagctgatcaaccgggaggcggcggtccatggcgagagcggccaggagcggaagcctgtgcggaaggaagtcttcatcgacatccaggaagtccgcaagccggagatagcggcccagttggtggccgaggccgtggcccagcagttgcagcgccgggtggccttccgccgggccatgaagaagtccatctccctggccttgaagttcggggcccaggggatcaagatccactgcgccggccgcctgggcggggccgaaatggcccgccgggaatggtaccgcgaaggccgggtgcctctccacaccttgcgggccgatgtggattacggctttgccgaggcccggaccacctacggggtcataggcgtcaaaacctggatattcaagggcgaaatactggacgccaacacccccgaggctttttag

SEQ ID NO: 73442 - protein, 232 aa, Unknown
  Obtained from environmental sample
  DOMAIN (62)...(133): KH domain
  misc_feature (1)..(232): Xaa is any amino acid
MGQKTHPTGFRLGVIKTWSSRWYAGRDFGQQVVEDRRIRGYVKKKLEAAGISQVEIERAAAKVKLRIHTARPGIVIGKKGADIDILKKEVEKLINREAAVHGESGQERKPVRKEVFIDIQEVRKPEIAAQLVAEAVAQQLQRRVAFRRAMKKSISLALKFGAQGIKIHCAGRLGGAEMARREWYREGRVPLHTLRADVDYGFAEARTTYGVIGVKTWIFKGEILDANTPEAF

SEQ ID NO: 73443 - DNA, 669 bp, Unknown
  Obtained from environmental sample
  misc_feature (1)..(669): n is a, c, g, or t
atggaattaaaagcagaacaactatgggcaattgcgttagccggaataatgacggaattgaatggtggaagccatatcacactcaattctggagaaatgaatttttttaataaaattgtagaaaaaaaactgttaaaacaatggtggggagtaaaaaacagaaaagaattactcgaaacattggataaaatggaacgttctggacacagcgcgcggcttgataaaataaaatccataattgttgaaaacaattatgaggtgagcattgaaacaattaaagataaaataaacacagaagaacttgaaccggctgatggtgttcgtttatttttcgtatcggaaaattggaaaaaatttaaagatatacacattaaagcatgggatttaggcagaaatatttctttatgcagatggggctattccgccggttatttaaaagaagatgaagcgtgggactcaataatgtattacgcaaaaacaatacaacctttgtataactcatgggacgactacgggtatagttatagtatgggcagaatattttgggcctctgcgtttgaatcagaaaagttagatgaatatatatcacaaacccatgaggcgtataataacttaacagacgaatcaaccggttgttggcggaaattggaatggaacatgaaattataa

SEQ ID NO: 73444 - protein, 222 aa, Unknown
  Obtained from environmental sample
  DOMAIN (1)...(222): Protein of unknown function (DUF1266)
  misc_feature (1)..(222): Xaa is any amino acid
MELKAEQLWAIALAGIMTELNGGSHITLNSGEMNFFNKIVEKKLLKQWWGVKNRKELLETLDKMERSGHSARLDKIKSIIVENNYEVSIETIKDKINTEELEPADGVRLFFVSENWKKFKDIHIKAWDLGRNISLCRWGYSAGYLKEDEAWDSIMYYAKTIQPLYNSWDDYGYSYSMGRIFWASAFESEKLDEYISQTHEAYNNLTDESTGCWRKLEWNMKL

SEQ ID NO: 73445 - DNA, 765 bp, Unknown
  Obtained from environmental sample
  misc_feature (1)..(765): n is a, c, g, or t
gtggcgcgagaaaaagtgcagcgcaaaaatgtaatgtcgggtgcggggcttcctggtaaattatgcgattgcgccgacaaagacccaactaaatgcgagattttcttcgttgagggtgactcggctggcggtacggctaaacagggtcgtaaacgggagtttcaggctattatgccgttgcggggtaaaatcctgaatgtggaaaaggctatggaacacaaaattttcgataacgaggaaattcagcatatttataccgctttgggtgttactatcggtacggatgaagacagaaaagcgcttaatatttcggggttgcgttacaataaggttatcattatgaccgatgccgacgtggacggtagccatattgctactcttatgatgactttatttttccgacacatggcggctcttatccaaaatggtcacctgtacattgctactcctccgctttatcttgtaaaacgcggaaataaacgtctttactgctggacggaagaccaacgtttagccgcaattgaggaaatgaccacggcgcgaggtgagaaacctactgttcaacgttacaaaggtctgggtgagatggacgctgaacaactctgggaaacaacaatggatccttctcgacgtaccctgcgcagagtaactattgacagcgctgccgaagccgacagaattttctctatgctgatgggtgacgatgtgccgccacgacgtgaatttatcgaacgtcatgctaaatatgctaaaatagacgcttag

SEQ ID NO: 73446 - protein, 254 aa, Unknown
  Obtained from environmental sample
  DOMAIN (62)...(148): Toprim domain
  misc_feature (1)..(254): Xaa is any amino acid
MAREKVQRKNVMSGAGLPGKLCDCADKDPTKCEIFFVEGDSAGGTAKQGRKREFQAIMPLRGKILNVEKAMEHKIFDNEEIQHIYTALGVTIGTDEDRKALNISGLRYNKVIIMTDADVDGSHIATLMMTLFFRHMAALIQNGHLYIATPPLYLVKRGNKRLYCWTEDQRLAAIEEMTTARGEKPTVQRYKGLGEMDAEQLWETTMDPSRRTLRRVTIDSAAEADRIFSMLMGDDVPPRREFIERHAKYAKIDA

SEQ ID NO: 73447 - DNA, 309 bp, Unknown
  Obtained from environmental sample
  misc_feature (1)..(309): n is a, c, g, or t
atggctaccgtccacgtcggcatcggtcataatgataaccttattgtaacgcaaccccgaaatattaagcgcttttctgtcttcatccgtaccgatagtaacacccaaagcggtataaatatgctgaatttcctcgttatcgaaaattttgtgttccatagccttttccacattcaggattttaccccgcaacggcataatagcctgaaactcccgtttacgaccctgtttagccgtaccgccagccgagtcaccctcaacgaagaaaatctcgcatttagttgggtctttgtcggcgcaatcgcataa

SEQ ID NO: 73448 - protein, 102 aa, Unknown
  Obtained from environmental sample
  misc_feature (1)..(102): Xaa is any amino acid
MATVHVGIGHNDNLIVTQPRNIKRFSVFIRTDSNTQSGINMLNFLVIENFVFHSLFHIQDFTPQRHNSLKLPFTTLFSRTASRVTLNEENLAFSWVFVGAIA

SEQ ID NO: 73449 - DNA, 891 bp, Unknown
  Obtained from environmental sample
  misc_feature (1)..(891): n is a, c, g, or t
ttgccgctggacgtaaatgcagtggaaataagccccactggcgactttatgatactttcgatggctgtttttcctggcaagtcgccagaagaaacaaagaaacttcatgccgccaacgatgagcgcaagtcaaccggcatggtgtacgaccagttgtttgctcgccattgggacacttggaaggatggaacgcgcaaccacctattttattttggccttaaaacaggcgcggcaaaggacttgacgctcaaactagatggcgacgcgcctacgatgccctatggcggcagcgaggagtatgccatcagcggggacggcaagacgcttatttttaccgcaagggtggagggcaaaaaagaagcatggagcaccaacttggatctctgggaggtgccaactgacgggagcaaagagccagttagaatcacctccaatcctgcgctggacaacctggcgcaattttctccagacggtaagcaattggcgtacgtggccatgatcaaggctggctatgaagcggacaggcaagatttgatgatccgtgacctagccaccaagcgcgaacggaggattgtccttcgcttcgactctggcaagttcggagaccgctccataagcgaatttgcgtggactcccaacggaaaggaaatcatctgcaccgcagatcacttgggccaaaaggctattttcgccattgatgtgtcccgtggcgcaacccgcaccatacttgccgatggctccaactcttctccgcagttcttggcagacggcagaataatattcagccgcaacacgatgaactcccccgccgagctgttcaccatangcattgacgggcagggcctgcaagcctttacgaagatcaacgacgccaaagttaaagcgcgctga

SEQ ID NO: 73450 - protein, 296 aa, Unknown
  Obtained from environmental sample
  misc_feature (1)..(296): Xaa is any amino acid
MPLDVNAVEISPTGDFMILSMAVFPGKSPEETKKLHAANDERKSTGMVYDQLFARHWDTWKDGTRNHLFYFGLKTGAAKDLTLKLDGDAPTMPYGGSEEYAISGDGKTLIFTARVEGKKEAWSTNLDLWEVPTDGSKEPVRITSNPALDNLAQFSPDGKQLAYVAMIKAGYEADRQDLMIRDLATKRERRIVLRFDSGKFGDRSISEFAWTPNGKEIICTADHLGQKAIFAIDVSRGATRTILADGSNSSPQFLADGRIIFSRNTMNSPAELFTIXIDGQGLQAFTKINDAKVKAR

SEQ ID NO: 73451 - DNA, 765 bp, Unknown
  Obtained from environmental sample
  misc_feature (1)..(765): n is a, c, g, or t
ttgggtccgcgagatgctgtcacaggcaaagcgttgaagacaaaggctgcgacaaatccagtgccttttcgcgtatccatcattgactacctcaacgccgcgcctctaaattatggcttcaagcatggtctgggctctggacatttttgcttgaaattccaagtgccttcggcctgctgcgacagcttgcgcaacggtggcgcggatgctggcctgatcagctccatcgagtgcctgcgaataccgaaactcaaaatcgtccctggcctctgtatagccagcccacgcaaggttcggagcgtggtgatactgtcaaaagtgccgcctgaatccatcaaggcactggcaatggacgcatccagccgaagctcaaccgtcctcgcccaaatcattttgcgagaaaggtataacgcacagccgcatatttcggaaatgccgccaaatttagaagccatgcttgccgggcacgatgccgcactgatgattggcgatgcggccatgagggcgaacaagcaggggctattggcgctggacatggcggaagaatggaatacttggactggcctgccattcgtattcgcgctatgggccatcaagcgggacgcgcccgtgatagacgttcccggcggggccgcgtcaatatttcaccaaagttttgagcttggcaaaaacaatattgaaaacattattgaaatagcccaccgcgaaattggggtggacaaagcaagagatcagggaatacctaacagagaatctcaactttga

SEQ ID NO: 73452 - protein, 254 aa, Unknown
  Obtained from environmental sample
  DOMAIN (22)...(249): Uncharacterized ACR, COG1427
  misc_feature (1)..(254): Xaa is any amino acid
MGPRDAVTGKALKTKAATNPVPFRVSIIDYLNAAPLNYGFKHGLGSGHFCLKFQVPSACCDSLRNGGADAGLISSIECLRIPKLKIVPGLCIASPRKVRSVVILSKVPPESIKALAMDASSRSSTVLAQIILRERYNAQPHISEMPPNLEAMLAGHDAALMIGDAAMRANKQGLLALDMAEEWNTWTGLPFVFALWAIKRDAPVIDVPGGAASIFHQSFELGKNNIENIIEIAHREIGVDKARDQGIPNRESQL

SEQ ID NO: 73453 - DNA, 813 bp, Unknown
  Obtained from environmental sample
  misc_feature (1)..(813): n is a, c, g, or t
ttgcgagacaccgggtatgggaataacaaagggaaaggcggcaatactaccccaaaaacgtcattaaaaatcagcaaccactccagttacgagctttttaatgtaaaatactctgctgttaattttggcgatatgaacatcggggcaaacaaaaccatgagtgtaagcgctaatgctattgaactaatttattttgatttaaatattaataacagccgcataccgtgtagaactgatgatgtcattacttgcgatgaagggaaaacagaagaaaaagccatcacagataacaccactgttagagttattggaaacaatcaaacgggaactcttggcggtgtttataatgcgttaagcaaacctattcttgaattaagccagaacgataaagttatcggcaataatgctcctataccgattgactttggaaatatagaaattactaaaaatcaattgttgttgtttaccataaaaaacacaggtaatcttccgcttgaattaaccggaaacccgttggttgattcatcaaatcccgctgtttttaccgtttccacgcagcccgtaaagataatcaacagtggagccagcgcgcaattcgcaataaggtatgcgccaaccactgaaggggaagataccgcaactataactattaccaacaacagtaacgacacggtattcagcttcactgtaaagggaacctgttttacgaaaaaaccgcagataaaaatctattacgctgatagtgagattctccagaacggtactattgacgcgggcgacgagattcttacgctgttcaaactatcaccgtaa

SEQ ID NO: 73454 - protein, 270 aa, Unknown
  Obtained from environmental sample
  misc_feature (1)..(270): Xaa is any amino acid
MRDTGYGNNKGKGGNTTPKTSLKISNHSSYELFNVKYSAVNFGDMNIGANKTMSVSANAIELIYFDLNINNSRIPCRTDDVITCDEGKTEEKAITDNTTVRVIGNNQTGTLGGVYNALSKPILELSQNDKVIGNNAPIPIDFGNIEITKNQLLLFTIKNTGNLPLELTGNPLVDSSNPAVFTVSTQPVKIINSGASAQFAIRYAPTTEGEDTATITITNNSNDTVFSFTVKGTCFTKKPQIKIYYADSEILQNGTIDAGDEILTLFKLSP

SEQ ID NO: 73455 - DNA, 666 bp, Unknown
  Obtained from environmental sample
  misc_feature (1)..(666): n is a, c, g, or t
atgcaggcaaatcagacgggcattaccacaatatccgcccggcttgacgatctttctaattttataaaagagccgttaaaggaattctgggaaacttacggtatgcttcttaccggtttctatataacgtcggtggatcttgacacgtcaacagaggacggccagaagatcgccgccgccctgagcgaccgttcggcgcagagtattgccggttatacttggcagcaaaaacagggctttggtgtggcgaataacgcgctttccaaaggcggcgacatgggcatattgggagccgccgcgatgaccggaatgttgggcggaggcggaggcggaatgggccaggctatgatgcagcctcctcaaatgcaggcgccgctccaacccggtccggggccggttgccggacgcaaggaagtattctgcgcgaaatgctccaagaaataccccgcaacctcaaatttctgcccgttctgcggcaatagatacaatccctgcccgcgctgcggcagcgacaatcttgaaggcagcagacgctgtgtttcctgcggaaccgagcttgtttcggcgcaggcggccggcggatttggcaacgtctgttcccgctgcggacagcaggcggcgcccggcgtgaaattctgcgctggctgcggaaacaaactggcgtaa

SEQ ID NO: 73456 - protein, 221 aa, Unknown
  Obtained from environmental sample
  misc_feature (1)..(221): Xaa is any amino acid
MQANQTGITTISARLDDLSNFIKEPLKEFWETYGMLLTGFYITSVDLDTSTEDGQKIAAALSDRSAQSIAGYTWQQKQGFGVANNALSKGGDMGILGAAAMTGMLGGGGGGMGQAMMQPPQMQAPLQPGPGPVAGRKEVFCAKCSKKYPATSNFCPFCGNRYNPCPRCGSDNLEGSRRCVSCGTELVSAQAAGGFGNVCSRCGQQAAPGVKFCAGCGNKLA

SEQ ID NO: 73457 - DNA, 384 bp, Unknown
  Obtained from environmental sample
  misc_feature (1)..(384): n is a, c, g, or t
gtggcggcagtcccgcaaaaagcgcgcgctgaaagcgggcatccgncaaggagggtatttcaggccatccgtatcgcggtcaacgacgaactgggcagtcttggggcagcagtagaaagttttgccgcgctgttgaaacccggcgggcgtatatgcgtaatcagcttccattcgctggaagaccggattgtaaagcattgtttcaagacgctggaaaacccgtgtgtctgcccaagagatatcccgttttgcgtgtgcgggaagaagccgttgcttaggataataacgcgcaagccgctgacgcccggcgaggaagaacgcggacgcaacaaccgcgcccatagcgcgaagctgcgcatagcggagagaacggataacctgtga

SEQ ID NO: 73458 - protein, 127 aa, Unknown
  Obtained from environmental sample
  DOMAIN (1)...(124): MraW methylase family
  misc_feature (1)..(127): Xaa is any amino acid
MAAVPQKARAESGHPXRRVFQAIRIAVNDELGSLGAAVESFAALLKPGGRICVISFHSLEDRIVKHCFKTLENPCVCPRDIPFCVCGKKPLLRIITRKPLTPGEEERGRNNRAHSAKLRIAERTDNL

SEQ ID NO: 73459 - DNA, 609 bp, Unknown
  Obtained from environmental sample
  misc_feature (1)..(609): n is a, c, g, or t
atgcgattggattggctccgaatagggcggtttttacgttgtcagagtttattgaccaaagattcgatagtttattcatttggtgtcggagaggatgttacattcgatttagcattgatagaaaaatatggattgaatgtttatgcctttgatcccacgccgcttgctataaaatttgtggaaaaagaaaatttatcggctcaatttcatttcgaaagcattggtataagtgataaagatgaaattacgcagttttatctttcaacggatgaaagggatataagcggttctatcatagataaaaataataatgcgaattccattcaagttgaaatgaaaaaaatttcttctataacaaaaaagttgaaccatacccatatcgatttgttgaaaatggacattgagggttctgagtatgctgtattgaaaaatatgatggaggaaaaaatttttccgatgcaactttgtgtggaatttcatcatcgctttcctcaaattggcttaagtcaaacaaaagaagttgttcaaaagttgaacaatgcaggatataaaattgccaaaatttcgaatacggggttggaatatacattcctacactgttcgtgttaa

SEQ ID NO: 73460 - protein, 202 aa, Unknown
  Obtained from environmental sample
  misc_feature (1)..(202): Xaa is any amino acid
MRLDWLRIGRFLRCQSLLTKDSIVYSFGVGEDVTFDLALIEKYGLNVYAFDPTPLAIKFVEKENLSAQFHFESIGISDKDEITQFYLSTDERDISGSIIDKNNNANSIQVEMKKISSITKKLNHTHIDLLKMDIEGSEYAVLKNMMEEKIFPMQLCVEFHHRFPQIGLSQTKEVVQKLNNAGYKIAKISNTGLEYTFLHCSC

SEQ ID NO: 73461 - DNA, 456 bp, Unknown
  Obtained from environmental sample
  misc_feature (1)..(456): n is a, c, g, or t
gtgcattttccgtttgaagataataattttgactcggtgatttgcaatcaagttttggaacatgtaaccataccccaaacaacactttccgagatacatcgcgttcttaaacctaagggttatacgctgttgacggtaccttttatgggagacgaacatgaacaaccgtttgatttttatcgctactcatcttttggtatgacgcatttattggaaacccataattttgaaattgtcaaatccattaaacttaaccgaaatatggcattggtatcagcccatttttggaatacctattggtataaactgttgaaaacaccctatccaatggtttcgttgctgataacgccaatcgttcatgctccaataaccttgctgggatatgcaggaagtttgatttttcctcgaacccaagatttttataccgatttattgatattagctcgcaaaaagtga

SEQ ID NO: 73462 - protein, 151 aa, Unknown
  Obtained from environmental sample
  misc_feature (1)..(151): Xaa is any amino acid
MHFPFEDNNFDSVICNQVLEHVTIPQTTLSEIHRVLKPKGYTLLTVPFMGDEHEQPFDFYRYSSFGMTHLLETHNFEIVKSIKLNRNMALVSAHFWNTYWYKLLKTPYPMVSLLITPIVHAPITLLGYAGSLIFPRTQDFYTDLLILARKK

SEQ ID NO: 73463 - DNA, 513 bp, Unknown
  Obtained from environmental sample
  misc_feature (1)..(513): n is a, c, g, or t
atggcgggatcgtttccgacgaaaagaagttggctggtgcagaacgatccggcggtgtatacggaaaaacctgatacaagtaagcctcctattctgttcgccgccgccgacaatcccgatacggtagtgataacactgcctgtggaaccggcggactacggttctttcgccgtttacgataaagaccgcaaactcgcctgcgtctcccgcaaggccgctgaaaacaacggtatctttaaagcgcttgtttcgttaagcgataaaattgacgatcccgcgaagttgtacgttgtccgcgatgaaggcggcgtgtttcgggaacagaatgttaccatgcgcggtattttggacgcttattattacggcggcggcgatctgggccttgtttacggcgcgtcggaaagcagattcaaggtttgggctcctacggcggcgganatgtacctcgcgttatacgaagactcaggcgaatacaatanagcccggagagattgtcagccaggaaactcctga

SEQ ID NO: 73464 - protein, 170 aa, Unknown
  Obtained from environmental sample
  misc_feature (1)..(170): Xaa is any amino acid
MAGSFPTKRSWLVQNDPAVYTEKPDTSKPPILFAAADNPDTVVITLPVEPADYGSFAVYDKDRKLACVSRKAAENNGIFKALVSLSDKIDDPAKLYVVRDEGGVFREQNVTMRGILDAYYYGGGDLGLVYGASESRFKVWAPTAAXMYLALYEDSGEYNXARRDCQPGNS

SEQ ID NO: 73465 - DNA, 318 bp, Unknown
  Obtained from environmental sample
  misc_feature (1)..(318): n is a, c, g, or t
ttgtttcgccttggaaaagaaccaccttgttttcgggcggacggtttaaggaggacattgaaaaaacgctggagatcttccgtgccgggggacttatgcgtgtcatttatcctcaaggaaaacgccgcgggggatccctggcggacgatattgtgggcgtataacggcagtccctacccgaaagaattcactctgcctgccgccgtncctgttggaaaacaggtcgtggattcccgccgcgcgggaaccgagtccctggccgaattctccggcgcaatcacattgcnttcgttttcaatgacggttctgcatgaatag

SEQ ID NO: 73466 - protein, 105 aa, Unknown
  Obtained from environmental sample
  misc_feature (1)..(105): Xaa is any amino acid
MFRLGKEPPCFRADGLRRTLKKRWRSSVPGDLCVSFILKENAAGDPWRTILWAYNGSPYPKEFTLPAAVPVGKQVVDSRRAGTESLAEFSGAITLXSFSMTVLHE

SEQ ID NO: 73467 - DNA, 462 bp, Unknown
  Obtained from environmental sample
  misc_feature (1)..(462): n is a, c, g, or t
ttgaggcaagtacgctggagtttatggatatgctttactcaaaacaacccggtcatggcaattaagcgtaccctaaaggtggatgcgggctttagcttgtcgtccatgagcgacctcgtgtttctgctcctcatattttttatgataacctccaccatggttagccccaacgcgctgaagcttttgctgccgcaaagcagcaaccagatacagtcaaagcctgcggtgagcgtatccattcagcagggcagcgcgtacctctacgtagatggtaagttccccgtaaccattcaggagttgcccgttaagcttaaccagctgcttgccgacaggagcgaccccaccatatccattcacgccgataaaagcgtaaccattgacgaggtggtgaaggtgatgaacgtggcaaaagacaaccgatggaaagttattttagcaaccgctccagaaaccaaaaaatag

SEQ ID NO: 73468 - protein, 153 aa, Unknown
  Obtained from environmental sample
  DOMAIN (24)...(150): Biopolymer transport protein ExbD/TolR
  misc_feature (1)..(153): Xaa is any amino acid
MRQVRWSLWICFTQNNPVMAIKRTLKVDAGFSLSSMSDLVFLLLIFFMITSTMVSPNALKLLLPQSSNQIQSKPAVSVSIQQGSAYLYVDGKFPVTIQELPVKLNQLLADRSDPTISIHADKSVTIDEVVKVMNVAKDNRWKVILATAPETKK

SEQ ID NO: 73469 - DNA, 534 bp, Unknown
  Obtained from environmental sample
  misc_feature (1)..(534): n is a, c, g, or t
ttggcaatcaaccgcgcttccaagatggacggacactttatgagcaacattcgtgagtatattcagaaaaacagcattgacggcgcaatagccctgtgccaagcctgcaacacccctcaggcgcgccttattgagaaaggaattaagcgcataggctcgtcgctggcggatattcaaacctccatagaaaatgtgggtgggcttgaggtggcacgcttggaaaaagggttggctattttggctatggtagcgggtggtgcacccatgctgggttttttgggaacggtaacaggtatggtacgcgccttcttcaacatggcaagcgcgggtaacaacttggatattcaggtgctttcgtcgggcatatacgaggcaatgataactacggtggcaggtctcattgtgggcattattgcctactttggctacaactatctggtgtcgcgtgtgcagcgcgtagtgttccaccttgaggcaagtacgctggagtttatggatatgctttactcaaaacaacccggtcatggcaattaa

SEQ ID NO: 73470 - protein, 177 aa, Unknown
  Obtained from environmental sample
  DOMAIN (26)...(162): MotA/TolQ/ExbB proton channel family
  misc_feature (1)..(177): Xaa is any amino acid
MAINRASKMDGHFMSNIREYIQKNSIDGAIALCQACNTPQARLIEKGIKRIGSSLADIQTSIENVGGLEVARLEKGLAILAMVAGGAPMLGFLGTVTGMVRAFFNMASAGNNLDIQVLSSGIYEAMITTVAGLIVGIIAYFGYNYLVSRVQRVVFHLEASTLEFMDMLYSKQPGHGN

SEQ ID NO: 73471 - DNA, 336 bp, Unknown
  Obtained from environmental sample
  misc_feature (1)..(336): n is a, c, g, or t
ttggatgccttaaccgaatactcaacaagggattacattgagaaagactttgatgagatgaagaacaatctcgacatgaagcggataagggttcaaactgatacaaggatgaagtcgaggttgttcatacagttcatcgctgagattttcatgagggagattcgcgtttatattcgcgattctgattcatgtaaaaagttgactcgaaaacaggttttctcccatattaagacaatctacaaagtgaagttcaagggcaggtacagggacgtctatcccgaattatccaggcagcaacgcgatattcttgacgccttaaaggttacacttaaatga

SEQ ID NO: 73472 - protein, 111 aa, Unknown
  Obtained from environmental sample
  misc_feature (1)..(111): Xaa is any amino acid
MDALTEYSTRDYIEKDFDEMKNNLDMKRIRVQTDTRMKSRLFIQFIAEIFMREIRVYIRDSDSCKKLTRKQVFSHIKTIYKVKFKGRYRDVYPELSRQQRDILDALKVTLK

SEQ ID NO: 73473 - DNA, 615 bp, Unknown
  Obtained from environmental sample
  misc_feature (1)..(615): n is a, c, g, or t
gtgatagttatgaaatattattcaatacatgaatttagcaagataataaatagaacgcctcaaacattaagaacttgggataaaacaggaagattaaagcctgatcatttaggagcaaatggatatagatattattctgatatccaactgagggaagttttaggacgaaaagcgcctgtgaataagcaagtaattggatattgccgagtatcaagcaataagcaaaaagatgatttggaacgacagtctgagaatttagcggcatatttaacagcgcaaggcaagccatatacaattattactgatataggcagtggaataaattataataaaaagggattaaaagaactaatagataagatgacaaaaaacgaagtagaaaaagtcgttgttttgtacaaagatagattattgcggtttggatatgagctagtggaatatattgcggaactttacggttgcgatattgaggttgttgatagtacagacaagacagaggaacaagaattagtcgaagatctagtccaaattataactgtatttagctgtaagctacaaggcaaacgggcgcataaggctaaaaagatgattaaggagctgatcaatgatgattaa

SEQ ID NO: 73474 - protein, 204 aa, Unknown
  Obtained from environmental sample
  DOMAIN (8)...(45): MerR family regulatory protein
  misc_feature (1)..(204): Xaa is any amino acid
MIVMKYYSIHEFSKIINRTPQTLRTWDKTGRLKPDHLGANGYRYYSDIQLREVLGRKAPVNKQVIGYCRVSSNKQKDDLERQSENLAAYLTAQGKPYTIITDIGSGINYNKKGLKELIDKMTKNEVEKVVVLYKDRLLRFGYELVEYIAELYGCDIEVVDSTDKTEEQELVEDLVQIITVFSCKLQGKRAHKAKKMIKELINDD

SEQ ID NO: 73475 - DNA, 696 bp, Unknown
  Obtained from environmental sample
  misc_feature (1)..(696): n is a, c, g, or t
atgtggaataggttatttattttagcgaccgccttgctcttttcttcctgcgcggaaaaaggcgatatagatgcagcagacttgctcgcntgcggagtttttgaccctgaaaaacagatttgcgacaggagagatggcaatatgtacaaatttgtgaaaatagataaacaaatttggcttgccgaaaatcttagatacaacagcaatttgtctgattgttatgggggttatgaggattaccctgaaaactgcgacgaatatggcaggctctatctttgggacaatgaggaaaacaaaaaactttgccccgaaaactggcatattccaacaaatgatgaatggaattttctaggagaacaagcgaatgaccatcaactgaaggcaaaaagtggatgggattcttatagcaaagacggaaaaacatatcctggcaatggcgatgataaatatgggtttgccgccttgccggctggcgtgtctatatttaagtacagaggtgacaaaggtaactgcagtgattatgagagtgacggaacattggaactcgatgaatggggtggcaagagaacaataacggcatttatggcttcggtgtcaggatataaaatattcttatcgaacgatacaagccttacgagtaatgacgtttgcatggcagaaaattcactggtttctgttaggtgcattaaagattag

SEQ ID NO: 73476 - protein, 231 aa, Unknown
  Obtained from environmental sample
  SIGNAL (1)...(20)
  misc_feature (1)..(231): Xaa is any amino acid
MWNRLFILATALLFSSCAEKGDIDAADLLACGVFDPEKQICDRRDGNMYKFVKIDKQIWLAENLRYNSNLSDCYGGYEDYPENCDEYGRLYLWDNEENKKLCPENWHIPTNDEWNFLGEQANDHQLKAKSGWDSYSKDGKTYPGNGDDKYGFAALPAGVSIFKYRGDKGNCSDYESDGTLELDEWGGKRTITAFMASVSGYKIFLSNDTSLTSNDVCMAENSLVSVRCIKD

SEQ ID NO: 73477 - DNA, 729 bp, Unknown
  Obtained from environmental sample
  misc_feature (1)..(729): n is a, c, g, or t
atgcctgacaaacttgcagaaattaaccgccggcgcacctttgcgataatcagccatcctgatgccggcaaaaccaccattacggaaaaacttttgctttttggcggggcgattcagaccgccggggcgatcaaagccaagaaaaccggcaagcacaccacctcggactggatggagctggaaaaacagcgcggggtgtctatcgcgacttccgtaatgtcttttgaatatgacgggatgattatcaatctgctggatacgcccggccatgcggatttcggcgaggacacttaccgcacgctcaccgccgtggattccgtgttaatggtcattgattcggtcaaaggcgtggaggagcgcaccaaaaagctgatggagatttgccagatgcgcaatattccggtcattacttttatcaataaactggaccgcgagggcaaagacccgtttgctttgctggatgatattgaaaacaatctggcgattacggctgtgccgttgagctggccgatcgggatggggcgtgatttccgcggggtgtacaatctgcggcagaaaagctatttgcagttttcggacaaacaaaaatttgcggaaattaccgatgtggaaccgcaaaatatcccggcgattgcggaggagcagaaaaataaattagccgaggatacggcgacgattgacggcgcgctggagccgtttgaccgggaaaatatctgcgcggcgaaatga

SEQ ID NO: 73478 - protein, 242 aa, Unknown
  Obtained from environmental sample
  DOMAIN (12)...(143): GTPase of unknown function
  misc_feature (1)..(242): Xaa is any amino acid
MPDKLAEINRRRTFAIISHPDAGKTTITEKLLLFGGAIQTAGAIKAKKTGKHTTSDWMELEKQRGVSIATSVMSFEYDGMIINLLDTPGHADFGEDTYRTLTAVDSVLMVIDSVKGVEERTKKLMEICQMRNIPVITFINKLDREGKDPFALLDDIENNLAITAVPLSWPIGMGRDFRGVYNLRQKSYLQFSDKQKFAEITDVEPQNIPAIAEEQKNKLAEDTATIDGALEPFDRENICAAK

SEQ ID NO: 73479 - DNA, 510 bp, Unknown
  Obtained from environmental sample
  misc_feature (1)..(510): n is a, c, g, or t
gtgatgagaaacatgggactctataacaatccatggatctgtatacttatgggttgcgtttcggtgtggaacgtgatggtagccagaacctatataaaatccacgatcccggaatccctttacgaagccgcagttttggacggtgcttcccattggcggtattttctccatgtggtgctgccgttatcaggcacaattatcgcggtgctttccgtttattacggcgtgggcaaatggaacgattactggacggggcttgtctacatttccagggaacaatttatgccccttcagactgttctaaggcggctactggcttctctgacaaccaacaccgagcttatgaatctttccggagatattacagaaagcatggcaataaggatgcagagggcagagctggcaaaatacggcatcattgtgataaccacggctcctgctgttgtcctttatctttgcatgcaaaaattcttcgtaaagggcgttatgataggcagcttaaagggttaa

SEQ ID NO: 73480 - protein, 169 aa, Unknown
  Obtained from environmental sample
  misc_feature (1)..(169): Xaa is any amino acid
MMRNMGLYNNPWICILMGCVSVWNVMVARTYIKSTIPESLYEAAVLDGASHWRYFLHVVLPLSGTIIAVLSVYYGVGKWNDYWTGLVYISREQFMPLQTVLRRLLASLTTNTELMNLSGDITESMAIRMQRAELAKYGIIVITTAPAVVLYLCMQKFFVKGVMIGSLKG

SEQ ID NO: 73481 - DNA, 804 bp, Unknown
  Obtained from environmental sample
  misc_feature (1)..(804): n is a, c, g, or t
gtggctgcttttggaatagaaggaaccgaagaacggctgggctgggatttagttaaccactcagtagcgcaggctgtcggtgatttattaaaggataaccaaaacagcttcattgtaaaagatgaaaaaacttatatagaaaaaataaaaacattgaaatatgataaagaaattaaagttgacagcgctttttttaaaaaccctaaagagagcgaatttgtaagagatatgcaaaacatcttgtttaaatggtttaaactcgctaatattgatgagcataaatcgaaaactataacggcaagatttcccagcttttttgtatatgcgctgaatgatgaatggggaaaaaattcaaagaaatatgagcgattgctcgctcctacggaaactcctttttcagaacaggctaaaatggaggacgattggaataaatataaggcctacctggataaacaaacgcaggaaagtatatttaccgaggcttttagtttatctcaaatatatatacagttatgcgcatattataaggaaaataaggagaataaagaaaaaagaatagtcgtagatcttcacaacgcaatatatgaatggttggagaaagacgataaagacgattctgtacgtataattagcgggggccctggaagcgggaaatcttcattcgtgaaaatgtttgcagccagcattgccgatacgcataaggttttatttattccgcttcatcatcttagtttaaaagatgacatagaagaagatattactaagttcttggtttctaataaatattttgaaaaaccccgatag

SEQ ID NO: 73482 - protein, 267 aa, Unknown
  Obtained from environmental sample
  misc_feature (1)..(267): Xaa is any amino acid
MAAFGIEGTEERLGWDLVNHSVAQAVGDLLKDNQNSFIVKDEKTYIEKIKTLKYDKEIKVDSAFFKNPKESEFVRDMQNILFKWFKLANIDEHKSKTITARFPSFFVYALNDEWGKNSKKYERLLAPTETPFSEQAKMEDDWNKYKAYLDKQTQESIFTEAFSLSQIYIQLCAYYKENKENKEKRIVVDLHNAIYEWLEKDDKDDSVRIISGGPGSGKSSFVKMFAASIADTHKVLFIPLHHLSLKDDIEEDITKFLVSNKYFEKPR

SEQ ID NO: 73483 - DNA, 498 bp, Unknown
  Obtained from environmental sample
  misc_feature (1)..(498): n is a, c, g, or t
ttgatggccgaggggctgctggattataggagcattgttccggctactgatcagtctggtaaatgggctatggtgaacacccccagattggcaaatgttgccagctccaaaaactattccagccagggcggttccggatggatggtaatgtcccacaccaaatatcctgatgtagcgtttgacatacttgataaagtttgggcaggcagcgtggaattctacgaaaccatcctgcctccttcaggcgctatttcaacatggcttcccgctgctaattctacagtttacagtcagccccaggcattctttggcggccagaagatctatgaacagctgatggattatgccagtaagattccccaagtaaaattcggcctctacaattatgaagccagggacgcggttagccgtgcagcttcgaacataattctcggcgccaatattgacacggaaattaacaatgcccagagcgaagttgaattcctgatgaatcaataa

SEQ ID NO: 73484 - protein, 165 aa, Unknown
  Obtained from environmental sample
  misc_feature (1)..(165): Xaa is any amino acid
MMAEGLLDYRSIVPATDQSGKWAMVNTPRLANVASSKNYSSQGGSGWMVMSHTKYPDVAFDILDKVWAGSVEFYETILPPSGAISTWLPAANSTVYSQPQAFFGGQKIYEQLMDYASKIPQVKFGLYNYEARDAVSRAASNIILGANIDTEINNAQSEVEFLMNQ

SEQ ID NO: 73485 - DNA, 627 bp, Unknown
  Obtained from environmental sample
  misc_feature (1)..(627): n is a, c, g, or t
ttgctggcggctgatttttcccatctggcagatgcagtggaacaaatcgacgcttcaggcgcagaatggacccatcttgacgtgatggacgggaattttgtcagcgaattgacttttggcgtcaaaatggtaagggatcttagaccgtttagccgaacgatctttgatgtccacttaatgatcaaccatccggagcactttattgaggaatttgcccgtgccggtgccgattacataacttttcactgtgaagcggccctgcatctgcacagaattttgacttcgataagggatttagggaaaaaagcgggaataagcatcgttccttcgactcctgttggggttttggaagaagtccttccctttgtggatctggtacttataatgacggtcaatccggggtttggcggccaaagccttattccctcctgtcttgaaaaggtaaaagccctgaagcgcataagggaagaaaaaggctattcctacttaatttccgtggacggcggggtaaacgccgatacggtatcgcaggtgagggattcgggagtagacgttattgtagcgggggaagcgtttttcagggccgcagataaagcggcaattgccgccctgctaaagggtatctaa

SEQ ID NO: 73486 - protein, 208 aa, Unknown
  Obtained from environmental sample
  DOMAIN (1)...(196): Ribulose-phosphate 3 epimerase family
  misc_feature (1)..(208): Xaa is any amino acid
MLAADFSHLADAVEQIDASGAEWTHLDVMDGNFVSELTFGVKMVRDLRPFSRTIFDVHLMINHPEHFIEEFARAGADYITFHCEAALHLHRILTSIRDLGKKAGISIVPSTPVGVLEEVLPFVDLVLIMTVNPGFGGQSLIPSCLEKVKALKRIREEKGYSYLISVDGGVNADTVSQVRDSGVDVIVAGEAFFRAADKAAIAALLKGI

SEQ ID NO: 73487 - DNA, 423 bp, Unknown
  Obtained from environmental sample
  misc_feature (1)..(423): n is a, c, g, or t
gtgcatcatctccttgacgatgcgcttaccgtcgacctgcgctttaagcttgagccccagcaaaaggcccataccgtgcgcctgaacgcacaggttttcgtgttttttcgccaagccgccgagctccgcaagaaacgccgcgcctaccttttgcgcgcgcgcaggcaggtcttcatcgatcatcacgtccagcaccgcgcacgccaccgcgcacgccagcgcgttgccgccaaacgtcgtaccatgatccccgggcttgaacgcctgggcgatctcctctttggcgatcgccgcgccgatgggaaagccattgcccagcgctttagccagcgtcgtgatatcggcgcgcacgccctcgtgatcggcgcacagtatttttcccgtgcggcccatgcccgattgcacctcgtcgagcacgagtaa

SEQ ID NO: 73488 - protein, 140 aa, Unknown
  Obtained from environmental sample
  misc_feature (1)..(140): Xaa is any amino acid
MHHLLDDALTVDLRFKLEPQQKAHTVRLNAQVFVFFRQAAELRKKRRAYLLRARRQVFIDHHVQHRARHRARQRVAAKRRTMIPGLERLGDLLFGDRRADGKAIAQRFSQRRDIGAHALVIGAQYFSRAAHARLHLVEHE

SEQ ID NO: 73489 - DNA, 540 bp, Unknown
  Obtained from environmental sample
  misc_feature (1)..(540): n is a, c, g, or t
gtgtcagacttggcgatgtgtgagactgcgctcggaattgtcgtgcggcgcgcgacggccgtcgacgtagcggccatctacgagatcacccgcgattctttcgcgctgtaccaacgcgagttgggcctgccgggcaaggtggcggcgctgaaagagatgcccgaagatattttgagggatctcaaaaccaagatgatttggttggcatgcgtggacggcgaggattgcggcgctctgcggctggagatactcggcgatatcggctatatcagccgctttggcgtcaaaaccggcgcaagggggggcggcgtcgggaccgagctcatggccgccactattgaggaagccgagcgccgggggctcttggcgctcgcgctccacacaagcacgcgtatgtacggcctgatgagcttttattccaaaaaccgctttttcgtccactcaacgacttttgatcgcgggtatgtgcgcggcctgctcctgcgcgatgtccgcgggaacgcaacaaaggtggacatcacggccatcgcggggaaatag

SEQ ID NO: 73490 - protein, 179 aa, Unknown
  Obtained from environmental sample
  DOMAIN (67)...(145): Acetyltransferase (GNAT) family
  misc_feature (1)..(179): Xaa is any amino acid
MSDLAMCETALGIVVRRATAVDVAAIYEITRDSFALYQRELGLPGKVAALKEMPEDILRDLKTKMIWLACVDGEDCGALRLEILGDIGYISRFGVKTGARGGGVGTELMAATIEEAERRGLLALALHTSTRMYGLMSFYSKNRFFVHSTTFDRGYVRGLLLRDVRGNATKVDITAIAGK

SEQ ID NO: 73491 - DNA, 612 bp, Unknown
  Obtained from environmental sample
  misc_feature (1)..(612): n is a, c, g, or t
ttgctcgcccatgcccatgccgcatcacaatatcctgtctctgtgctggtccgcatcgcctgggcggatcgcatcctgatcaagcgcgctttggaccttggcttgggcggcatcatgattccctacgtgcagaccgcggaaagcgccgaagaggcggtacgctacgccaaatatatgccccagggggaacgcggcgtggcttccttcactcgcgccgccggatacaacgtcaattttaagaactacttcgccacagccaacgacaaactgctgactatcgtgcaaatcgaaacaggccggtctgcggacaacgccgaggccatcgccgcggttgacggtgtagacgtactctttgtcggccccctggatctcgccctcaatacaaacttttatccagccatgtttgaggatcaaaagtatgtcacgctgcttgagcgcgtggccggcgcggcgaaaaaccaggggaaagcctgcggcatcctgttgcccgacgccaaatggatccccctgttgaaaggcatgggctacacgtttattgcctgcggcacggacggcggcatggtcgccaacggcatgaaagcatctctggacgctctgcgcaggacattgtga

SEQ ID NO: 73492 - protein, 203 aa, Unknown
  Obtained from environmental sample
  DOMAIN (1)...(191): HpcH/HpaI aldolase/citrate lyase family
  misc_feature (1)..(203): Xaa is any amino acid
MLAHAHAASQYPVSVLVRIAWADRILIKRALDLGLGGIMIPYVQTAESAEEAVRYAKYMPQGERGVASFTRAAGYNVNFKNYFATANDKLLTIVQIETGRSADNAEAIAAVDGVDVLFVGPLDLALNTNFYPAMFEDQKYVTLLERVAGAAKNQGKACGILLPDAKWIPLLKGMGYTFIACGTDGGMVANGMKASLDALRRTL

SEQ ID NO: 73493 - DNA, 330 bp, Unknown
  Obtained from environmental sample
  misc_feature (1)..(330): n is a, c, g, or t
atggggttgctgcccgggatcatgaccatgctgcccaatgcggccggcccggccatgatgctctacctgttggctatgaatatctccaaggaacaattcgtgggaaccggcgcctggatatacttggccgtcaatatnttcaagatacctttcagcatcgctctgggcttgatgacgccggattctttccgcgtcaatgttatgcttctgccctgcgtcatcctggggagctttctgggggtacgcctgatgcgcaggatttccggtcctgtgtttgagaagatgatgcggttgatggtcctcctcggcgggatcaagctcttcttttga

SEQ ID NO: 73494 - protein, 109 aa, Unknown
  Obtained from environmental sample
  misc_feature (1)..(109): Xaa is any amino acid
MGLLPGIMTMLPNAAGPAMMLYLLAMNISKEQFVGTGAWIYLAVNXFKIPFSIALGLMTPDSFRVNVMLLPCVILGSFLGVRLMRRISGPVFEKMMRLMVLLGGIKLFF

SEQ ID NO: 73495 - DNA, 981 bp, Unknown
  Obtained from environmental sample
  misc_feature (1)..(981): n is a, c, g, or t
ttgacaagcttgcaacgcgaggcaaacaggcttttcggttcacgggcgcaggaaactttggactatacgcaaaatctttacgaggcgaaatatgtgacatacccgcgaaccgacgcgcagtatctgacagatgatatggcggaaacggcggagataattatcaaaattgtgcgtcaaaccgttcctatatataaaggtatggattttgcgcccgacgttacgaaaattatcaattcaaaaaaggttcaagaccattttgcggtcattccgacggtagaattcgcgaaagcggatattgccgaaatgcccgacggcgagcggaaaatccttatgcttatcgcaaacagactgctcgcggcgaccgccgataaatacgagtacgaagcggttactgccgaaattgagtgcggcggctacacgtttacggcgaaaggaaaaaccgtaattaacgacgggtggaaagcgattgaacggctgttcaggggcaagcagaccgacgacggggacgattcggaggacgaaaaatcagtagatttatcggaaaatcagatttttgacaatgtgtcgtgcgatattaccgagcatttcacgcaaccgccgcgtcattttaccgaagatactttgctttcggctatgagcaacgcgggagcggacgaaatcaccgaggaagtcgagcgttcgggaatcggaactcccgcgacaagagcggcgattattgaaaagctgataaaatcgggatttatcaggcgcgacaagaaaaatctcgtcgctactcccgagggagcggaactcattgaacttatgcccgattctgtaaagtctgcaagtttgacggcggaatgggaaaacacgcttgcaaaaatcgcaaaaggcgagtattccgacgacgtttttatgaacggaattgaaaaattcgttaccgatattatatcatcggcgaaagaaaatgtcaagtccgaatggtcgcgcgtctcgccataa

SEQ ID NO: 73496 - protein, 326 aa, Unknown
  Obtained from environmental sample
  DOMAIN (1)...(271): DNA topoisomerase
  misc_feature (1)..(326): Xaa is any amino acid
MTSLQREANRLFGSRAQETLDYTQNLYEAKYVTYPRTDAQYLTDDMAETAEIIIKIVRQTVPIYKGMDFAPDVTKIINSKKVQDHFAVIPTVEFAKADIAEMPDGERKILMLIANRLLAATADKYEYEAVTAEIECGGYTFTAKGKTVINDGWKAIERLFRGKQTDDGDDSEDEKSVDLSENQIFDNVSCDITEHFTQPPRHFTEDTLLSAMSNAGADEITEEVERSGIGTPATRAAIIEKLIKSGFIRRDKKNLVATPEGAELIELMPDSVKSASLTAEWENTLAKIAKGEYSDDVFMNGIEKFVTDIISSAKENVKSEWSRVSP

SEQ ID NO: 73497 - DNA, 594 bp, Unknown
  Obtained from environmental sample
  misc_feature (1)..(594): n is a, c, g, or t
ttgatgactccgaaacaagaacacgaccaagcgcgtgaaacctttgaacggctgtatgatgaatactatgacaaagtgtacagttatctagcgcgccgggtgaataaccagcatgacgccgaggatttgaccgccgaggtgttcttgaaggcgttttccaacccctacaacccgcagcttgcacgattttccacctatgtcttcgcgatagcggcgaacgcgctgaaaaaccgctaccgctcagccgccaaactcatcgccttatactccggcgggccggatgtggaactaaccgacaacgcagacgcccttggcgatttgattacccgtgaagaatacagagaactggcgtccacccttgccgccctgccggatcgtcagtacgaagcggtgtaccgcagatattatcttgatgaaagtttcaaggaaatcggcgttgctatgggagtcagcgaaaccaacgcaaggcagctccattttcaggcgatgacaaaattaagagagtgtttcaaaaagggattgtcaatggcgccttgcacaagcattgacgctgcttccggagcggccataatcccaaattgcagcacttcctaa

SEQ ID NO: 73498 - protein, 197 aa, Unknown
  Obtained from environmental sample
  DOMAIN (113)...(166): Sigma-70, region 4
  misc_feature (1)..(197): Xaa is any amino acid
MMTPKQEHDQARETFERLYDEYYDKVYSYLARRVNNQHDAEDLTAEVFLKAFSNPYNPQLARFSTYVFAIAANALKNRYRSAAKLIALYSGGPDVELTDNADALGDLITREEYRELASTLAALPDRQYEAVYRRYYLDESFKEIGVAMGVSETNARQLHFQAMTKLRECFKKGLSMAPCTSIDAASGAAIIPNCSTS

SEQ ID NO: 73499 - DNA, 537 bp, Unknown
  Obtained from environmental sample
  misc_feature (1)..(537): n is a, c, g, or t
atgacagattcggccgaggtccctccgcagccaatgggtataatgatgcaggacagctttattttttccggcacgataacagacaacatcaggtacagcaagttagacgccactgacgaagaagtggtcgaggcggcgaaagcggtaaaagccgacggttttatcatggaaatggaagacggctataatacggaggtaaacgagcgcgggagccggctttcggtggggcagaggcagcttatatcctttgcacgggctttgcttgccgatccaaagattctgatactcgacgaggcgacttcgagtattgacacaaagacagagcttgtggtgcagcagggccttgagcggctgttgaaaggcaggacgtccttcatcattgctcatcgtttgagcacaataaagaacgccacaagaatcatgtacatcgaccacgggacaatagtggaatccggcagccatgacgaattgatcgaggccaaaggcatgtattataagttatataaagcccagtacgcgttcctggatgttttttaa

SEQ ID NO: 73500 - protein, 178 aa, Unknown
  Obtained from environmental sample
  DOMAIN (4)...(146): ABC transporter
  misc_feature (1)..(178): Xaa is any amino acid
MTDSAEVPPQPMGIMMQDSFIFSGTITDNIRYSKLDATDEEVVEAAKAVKADGFIMEMEDGYNTEVNERGSRLSVGQRQLISFARALLADPKILILDEATSSIDTKTELVVQQGLERLLKGRTSFIIAHRLSTIKNATRIMYIDHGTIVESGSHDELIEAKGMYYKLYKAQYAFLDVF

SEQ ID NO: 73501 - DNA, 882 bp, Unknown
  Obtained from environmental sample
  misc_feature (1)..(882): n is a, c, g, or t
atgcccggttcattttacgactcaaacggcgacggcataggcgatctcaagggcatcaccatgaagctggattacctcaacgataccggcacgctgaggcatcggcacaatatggcaacgcagggcgaatgcaatgaaagcctccatgtaaacggcatctgggtcacgcccatccacccctccccttcctaccataaatacgatgtcaaagattataaggctatcgatccccaattcggcaccatggaagattttcaggaactgttaaaagaatgccacaaacggggaataaaattaattattgacatggtaatgaaccatacctccgatcagcacccctggttccagaaggcccttgaggaaatccgctccggcaagccgggccgttacgccggttattaccatttctggtacggggctaccccgccccagcgcgaatcggtggaatacggcgactggtactgggcctgggacggcgatatggattggggaaaccgtgaatttaaacctaaccgcggaatcaaaagccgtttttaccgctgctggggaaaagtaatggacggcgtatggtacgaaggaagtttctggacgggaatgcccgaccttaactgggacagccatcatctgcgtgaagaattcaaggatgtagtgaaattctggcttggagaaggcctggacggtttccggctggacgcggtccactatttctacgactggaacgaaattgggcaaatggaagaatataacgtgcccatagaaacgcatgaaaaaaacatcggaatgcttaagtggtttaacgatacctgccgcgcggttcatccgaatgtgtacctgtcggcgagtttaccgggactggatctcggccgatctgatccctgttga

SEQ ID NO: 73502 - protein, 293 aa, Unknown
  Obtained from environmental sample
  DOMAIN (1)...(292): Alpha amylase, catalytic domain
  misc_feature (1)..(293): Xaa is any amino acid
MPGSFYDSNGDGIGDLKGITMKLDYLNDTGTLRHRHNMATQGECNESLHVNGIWVTPIHPSPSYHKYDVKDYKAIDPQFGTMEDFQELLKECHKRGIKLIIDMVMNHTSDQHPWFQKALEEIRSGKPGRYAGYYHFWYGATPPQRESVEYGDWYWAWDGDMDWGNREFKPNRGIKSRFYRCWGKVMDGVWYEGSFWTGMPDLNWDSHHLREEFKDVVKFWLGEGLDGFRLDAVHYFYDWNEIGQMEEYNVPIETHEKNIGMLKWFNDTCRAVHPNVYLSASLPGLDLGRSDPC

SEQ ID NO: 73503 - DNA, 702 bp, Unknown
  Obtained from environmental sample
  misc_feature (1)..(702): n is a, c, g, or t
atggggggaaatatagccggtaccactactgttgcttctgtttatagtgccaggaaaaccaggaccataattttcaccactaccagcagttccaccagtagtagtaccaccaccaacaacaacaatacctccaacaccactattagcctcagtagtaggtttagtagtagtaccagcagtagtaccagtagtagtagtaggaggaagagtaccactataactaccagtactataatcattagtataatgactaccagtactaccagtataagtactaccagtattggcaaggagatcatagggatcaccagattccaatgtccatccagaagggtaatagtcgttgttaccttcaaaactccactttccatcggatccttgttccaatggaaaaaaactagtagtagtaggaggagaaggatgaggacgaggacgaggaggagtataaccataccaataatcggtaggaggatgataaataggagtattaccatcaccattatcatcataaggattaccaacaaatcttggatcataaggaagacgttcaggaccagagtaaaacccatctgtaaaaacaccagggccgtagaatatgatatctctcacagttacaagtatttcacctgtctctggatccagtcgatctcctattttatctatatcaacatacataaaagggacaacttcttccggtggtag

SEQ ID NO: 73504 - protein, 233 aa, Unknown
  Obtained from environmental sample
  misc_feature (1)..(233): Xaa is any amino acid
MGGNIAGTTTVASVYSARKTRTIIFTTTSSSTSSSTTTNNNNTSNTTISLSSRFSSSTSSSTSSSSRRKSTTITTSTIIISIMTTSTTSISTTSIGKEIIGITRFQCPSRRVIVVVTFKTPLSIGSLFQWKKTSSSRRRRMRTRTRRSITIPIIGRRMINRSITITIIIIRITNKSWIIRKTFRTRVKPICKNTRAVEYDISHSYKYFTCLWIQSISYFIYINIHKRDNFFRW

SEQ ID NO: 73505 - DNA, 540 bp, Unknown
  Obtained from environmental sample
  misc_feature (1)..(540): n is a, c, g, or t
gtgtttttacagatgggttttactctggtcctgaacgtcttccttatgatccaagatttgttggtaatccttatgatgataatggtgatggtaatactcctatttatcatcctcctaccgattattggtatggttatactcctcctcgtcctcgtcctcatccttctcctcctactactactagtttttttccattggaacaaggatccgatggaaagtggagttttgaaggtaacaacgactattacccttctggatggacattggaatctggtgatccctatgatctccttgccaatactggtagtacttatactggtagtactggtagtcattatactaatgattatagtactggtagttatagtggtactcttcctcctactactactactggtactactgctggtactactactaaacctactactgaggctaatagtggtgttggaggtattgttgttgttggtggtggtactactactggtggaactgctggtagtggtgaaaattatggtcctggttttcctggcactataa

SEQ ID NO: 73506 - protein, 179 aa, Unknown
  Obtained from environmental sample
  misc_feature (1)..(179): Xaa is any amino acid
MFLQMGFTLVLNVFLMIQDLLVILMMIMVMVILLFIILLPIIGMVILLLVLVLILLLLLLLVFFHWNKDPMESGVLKVTTTITLLDGHWNLVIPMISLPILVVLILVVLVVIILMIIVLVVIVVLFLLLLLLVLLLVLLLNLLLRLIVVLEVLLLLVVVLLLVELLVVVKIMVLVFLAL

SEQ ID NO: 73507 - DNA, 456 bp, Unknown
  Obtained from environmental sample
  misc_feature (1)..(456): n is a, c, g, or t
atgcgcgtttcggaattggtcaatctgaaaaacagcgatgtcaataccgctcaaaaaacgatcaaagtgctcggcaaacgcaacaaagagcgtattgtgccgttgaccgatttggcctgttcattgctgaactcctatcaacaagtcaaagcggccattgtaccgcaaagtccggagaatttgtttgtcaatctgaaaaaccgagttttgacgcgacaaaaaatttatcaaatcgtgcaccattttttgatgcaaacaccaatagacaaacgtagtccgcacgtcttgcgtcacacgtttgccacgcatttgctcaatcacggtgccgaactcaacgccgtcaaagaactgctcggacacagcagtttggcggccacacaagtctatacgcacaacacgatagagaaactgaaacgcacttatcaatccgctcatccacgagcccaactaaaataa

SEQ ID NO: 73508 - protein, 151 aa, Unknown
  Obtained from environmental sample
  DOMAIN (1)...(139): Phage integrase family
  misc_feature (1)..(151): Xaa is any amino acid
MRVSELVNLKNSDVNTAQKTIKVLGKRNKERIVPLTDLACSLLNSYQQVKAAIVPQSPENLFVNLKNRVLTRQKIYQIVHHFLMQTPIDKRSPHVLRHTFATHLLNHGAELNAVKELLGHSSLAATQVYTHNTIEKLKRTYQSAHPRAQLK

SEQ ID NO: 73509 - DNA, 321 bp, Unknown
  Obtained from environmental sample
  misc_feature (1)..(321): n is a, c, g, or t
gtgtctttcctgcggctcaactatggcgatgtgcaaataaccaaatcgggtgattttgccaagtccgctccggattccgagtctatgcctgtgcaggacatgaactggtataaagaaacaaaggctaatatgaccccaggcaacaacctacgggttttcaggcagatgcgcgaaatgacccaaaaagagcttgccgaaagaataggcgtgagcaagcaacagatttgcaatatggaaatcggtcgttccccaataggaaagaaaatggctgtacggcttggcgaggctttgaacaggccatacaataattttttttggtag

SEQ ID NO: 73510 - protein, 106 aa, Unknown
  Obtained from environmental sample
  DOMAIN (50)...(104): Helix-turn-helix
  misc_feature (1)..(106): Xaa is any amino acid
MSFLRLNYGDVQITKSGDFAKSAPDSESMPVQDMNWYKETKANMTPGNNLRVFRQMREMTQKELAERIGVSKQQICNMEIGRSPIGKKMAVRLGEALNRPYNNFFW

SEQ ID NO: 73511 - DNA, 339 bp, Unknown
  Obtained from environmental sample
  misc_feature (1)..(339): n is a, c, g, or t
ttgctgccggggattttggagagcaatccggtgcctgataatatgcaaaaattcggtatgaaactagttgacggtgttttggagagaaaagatgaatttcacgacatcttcttaaagataatcccggactggtcgccggagcggctttccataatagacaaaataatacttcaaatcgcaatggcagaaatgctcctctcagacactcctataaaagtgattttatccgaagccgtacaaatagctaacaaattttcagatgaaaattccccatcttttgtgaatggggttttgcagggttttgccaagctaaagggaatgctggcttcaaccccttag

SEQ ID NO: 73512 - protein, 112 aa, Unknown
  Obtained from environmental sample
  DOMAIN (1)...(105): NusB family
  misc_feature (1)..(112): Xaa is any amino acid
MLPGILESNPVPDNMQKFGMKLVDGVLERKDEFHDIFLKIIPDWSPERLSIIDKIILQIAMAEMLLSDTPIKVILSEAVQIANKFSDENSPSFVNGVLQGFAKLKGMLASTP

SEQ ID NO: 73513 - DNA, 804 bp, Unknown
  Obtained from environmental sample
  misc_feature (1)..(804): n is a, c, g, or t
gtgacccgaccgaccgcagttatcgactggcaagacgcaaacgcccccgccccgacaataaccgcgacaaaccccgaaaacggacacgcccacttattctatggcttacagaacccggtattgaccgccgaatataacccaaaagtgcataaaagcccgatccgttacgccgcctcgatagatgtggcaatgactaaaaaactggaagccgatccgggttattcaaagctcatttcaaaaaaccccacccataattactggaacgtgaatatatggcaaaaccagctatacgatctgccggggctggccagccatcttgacttggaaccctacacggacaaaaggattgatcttgaacctttagggcttggcaggaactgtactctattcaagtacacggcaaaatacgcttataagtcatacaggaaaggcgggtttcttaataacgaattttattggttcgatgtggaaaactacgccaaaaattacaacttgaatttttcccctccgctgccattgagggaggtttacagcattgtaaaatctgttatcaagtggactgccgcaaagcatacccagaacggttttacagagatacagaagcggagagggattctctctggaatatcgcggagggcaaaagccgatgaacggagggaaaggattatggagtatatagctttatgcccgtgggtttccaatgttgaacttgccaacatttttgaagtttcaataagcactatcaatcatctgaatttaaaaaagggatngtatgcttggattaagtacccgtacaaggcatga

SEQ ID NO: 73514 - protein, 267 aa, Unknown
  Obtained from environmental sample
  DOMAIN (3)...(215): Replicase family
  misc_feature (1)..(267): Xaa is any amino acid
MTRPTAVIDWQDANAPAPTITATNPENGHAHLFYGLQNPVLTAEYNPKVHKSPIRYAASIDVAMTKKLEADPGYSKLISKNPTHNYWNVNIWQNQLYDLPGLASHLDLEPYTDKRIDLEPLGLGRNCTLFKYTAKYAYKSYRKGGFLNNEFYWFDVENYAKNYNLNFSPPLPLREVYSIVKSVIKWTAAKHTQNGFTEIQKRRGILSGISRRAKADERRERIMEYIALCPWVSNVELANIFEVSISTINHLNLKKGXYAWIKYPYKA

SEQ ID NO: 73515 - DNA, 726 bp, Unknown
  Obtained from environmental sample
  misc_feature (1)..(726): n is a, c, g, or t
gtgaccgccaacgccctgcgggtggccgccaaggcagctagacctggggtctccatgctggaactggacaaactggccgaacactacatacgcaagcagggagcaacgcctagcttcaagggctaccacggcttcccctcgacgctctgcctttccgtgaacgacggcgttgtgcatgggataccctccaactacgtgcttcgggacggcgacgtgctagccatagactgcggggcaaagctggacggctaccacggcgacacctgccttacggtgggcgtgggcaatgtcagcggcaccgcaaaagacctcatagccaccacacagttggccatgttcttgggcgtgacttattgcagggtggggctgcgcctaggcgacatggccaccaaggtgcagagttttgccgaaagcaggggctacaacgtcgtcaggaaatacgtgggccacggcataggccgcgacctccacgaagacccacaggtgctacacgccaagcagagccccgggacgggcttcaggatggaagtcggcatgaccataaccatagagcctattctcaacgcgggcacgcacaagtgcgtggttgaccccgacggttggtcggttcgcaccgccgatggccaaatcagtgcccagtttgagcacatggtggccataacccccaacggacccgaaatcctctcctaccccgacccagagtttgaactggacgatggcctatag

SEQ ID NO: 73516 - protein, 241 aa, Unknown
  Obtained from environmental sample
  DOMAIN (1)...(230): metallopeptidase family M24
  misc_feature (1)..(241): Xaa is any amino acid
MTANALRVAAKAARPGVSMLELDKLAEHYIRKQGATPSFKGYHGFPSTLCLSVNDGVVHGIPSNYVLRDGDVLAIDCGAKLDGYHGDTCLTVGVGNVSGTAKDLIATTQLAMFLGVTYCRVGLRLGDMATKVQSFAESRGYNVVRKYVGHGIGRDLHEDPQVLHAKQSPGTGFRMEVGMTITIEPILNAGTHKCVVDPDGWSVRTADGQISAQFEHMVAITPNGPEILSYPDPEFELDDGL

SEQ ID NO: 73517 - DNA, 609 bp, Unknown
  Obtained from environmental sample
  misc_feature (1)..(609): n is a, c, g, or t
atgagttcgcggccttcaggtcaggagacccgggtcgccgggcccggcccccaccaggtaaacggtcccggtcatgggccgaccgccgcccgcattatttccgccccgccttcggccgccaagtcggcggccagttcccggcccagggcggcggcttcatccggggcggcgcgggccgggccggttttgcgccccctcaaaacccgccggcccagggggtcggcgatgagggcccttaaaagcagccggccgtcttcctcttcggccagtgcggccgccggcagttggcagccgccgccccagaaagccaggaagccgcgttccgcggccagggccaaggcggtgggttcatggtggagggggcggatgagttcggctgtcccggtatcgtcccggcggatttccagggccaggacgccttggcccacggctggcagcatctcttccggggtcaggatggcggcctgggccggggccaggcccagccgctccagcccggccgcggccactaataccgcctccacttcggcccctatttttttcaggcgggtttccaggttgccccggatggggctgatttgcaagtccggccgccgggccaggagttga

SEQ ID NO: 73518 - protein, 202 aa, Unknown
  Obtained from environmental sample
  misc_feature (1)..(202): Xaa is any amino acid
MSSRPSGQETRVAGPGPHQVNGPGHGPTAARIISAPPSAAKSAASSRPRAAASSGAARAGPVLRPLKTRRPRGSAMRALKSSRPSSSSASAAAGSWQPPPQKARKPRSAARAKAVGSWWRGRMSSAVPVSSRRISRARTPWPTAGSISSGVRMAAWAGARPSRSSPAAATNTASTSAPIFFRRVSRLPRMGLICKSGRRARS

SEQ ID NO: 73519 - DNA, 711 bp, Unknown
  Obtained from environmental sample
  misc_feature (1)..(711): n is a, c, g, or t
ttggccgtccacagcgccaaagacctgccggcccggctgcccgaaggcttgagcctgggggcgaccccggtccgggcggatttccgcgacatcctggtcgccgccgctcccgggggcctcacgggcctctcggccggggcccgggtgggcacttccggcttaaggcgccgggctcaactcctggcccggcggccggacttgcaaatcagccccatccggggcaacctggaaacccgcctgaaaaaaataggggccgaagtggaggcggtattagtggccgcggccgggctggagcggctgggcctggccccggcccaggccgccatcctgaccccggaagagatgctgccagccgtgggccaaggcgtcctggccctggaaatccgccgggacgataccgggacagccgaactcatccgccccctccaccatgaacccaccgccttggccctggccgcggaacgcggcttcctggctttctggggcggcggctgccaactgccggcggccgcactggccgaagaggaagacggccggctgcttttaagggccctcatcgccgaccccctgggccggcgggttttgagggggcgcaaaaccggcccggcccgcgccgccccggatgaagccgccgccctgggccgggaactggccgccgacttggcggccgaaggcggggcggaaataatgcgggcggcggtcggcccatga

SEQ ID NO: 73520 - protein, 236 aa, Unknown
  Obtained from environmental sample
  DOMAIN (148)...(225): Porphobilinogen deaminase, C-terminal domain
  misc_feature (1)..(236): Xaa is any amino acid
MAVHSAKDLPARLPEGLSLGATPVRADFRDILVAAAPGGLTGLSAGARVGTSGLRRRAQLLARRPDLQISPIRGNLETRLKKIGAEVEAVLVAAAGLERLGLAPAQAAILTPEEMLPAVGQGVLALEIRRDDTGTAELIRPLHHEPTALALAAERGFLAFWGGGCQLPAAALAEEEDGRLLLRALIADPLGRRVLRGRKTGPARAAPDEAAALGRELAADLAAEGGAEIMRAAVGP

SEQ ID NO: 73521 - DNA, 738 bp, Unknown
  Obtained from environmental sample
  misc_feature (1)..(738): n is a, c, g, or t
ttgaataggagccataagttggaatacgtaacattcggtaataccggaagaactgtaagtcgtcttggttttggcggcgcagccattggattgaaaaattatctcacggaatttgatcctaaagatcctaaagaccgagacagggtaaacaaagctatccaaaccgctttggatttaggggttacttattttgataccgctgcaggctatggtgatggtcaaagtgaaatgatctacggtgaaacactctcaggagtacccagagaaaaactctttatcgccaccaaactgaaatatgatggttctcccggtggagtacgccgttccgttgagggcagcctgaaacgcctgaaaacagattatgtggatctgatccagctccacggtacatcgtggaaagaagaacaagaaagagaaattctgaaacccggtggtattttggatgagatgattaagataaaagaagaaaagctggtccgtcatgtaggattcacctcagaggacaacaatcgggcagtatacaattttatagacgatggtcgttttgaaatgtatatgatctgttataattttttatttcaacattgttacgatcctaaccgtcccttcggtagtatgtttgaggcggagaaaaagaagatgggcatagtgaccatgcgagcgcccacatcggggatctttatgaggtggatgcggaagatagatccccacaacaagcgggattatcccgggatttaa

SEQ ID NO: 73522 - protein, 245 aa, Unknown
  Obtained from environmental sample
  DOMAIN (13)...(236): Aldo/keto reductase family
  misc_feature (1)..(245): Xaa is any amino acid
MNRSHKLEYVTFGNTGRTVSRLGFGGAAIGLKNYLTEFDPKDPKDRDRVNKAIQTALDLGVTYFDTAAGYGDGQSEMIYGETLSGVPREKLFIATKLKYDGSPGGVRRSVEGSLKRLKTDYVDLIQLHGTSWKEEQEREILKPGGILDEMIKIKEEKLVRHVGFTSEDNNRAVYNFIDDGRFEMYMICYNFLFQHCYDPNRPFGSMFEAEKKKMGIVTMRAPTSGIFMRWMRKIDPHNKRDYPGI

SEQ ID NO: 73523 - DNA, 390 bp, Unknown
  Obtained from environmental sample
  misc_feature (1)..(390): n is a, c, g, or t
atgtacctacttatgaatatgcgcgcgcgattgacacataataagcctatggaaaaaaagactgctaagtcaggtgtaaagaaggcggccgcctctaaaagagcccctaaaactgcccccgaaaaggccgtaaaagccgtaaaaaaagccgcaaagaaaactgcttcggcagttaaaaaaacatcaaaaaaggccgccgagataaccgtcggtgcctatgaagccgtttccgagaaggtctcggacactttcgaggccgcccgcgaagtcgctccgaaagtcgtgaaaaaggtcggaggccgcctctcgcgtatgaacgattcgttcgaggacatcctcggagactcgattagcaaagtccgctcgttccgcggctcctcacaaaaataa

SEQ ID NO: 73524 - protein, 129 aa, Unknown
  Obtained from environmental sample
  misc_feature (1)..(129): Xaa is any amino acid
MYLLMNMRARLTHNKPMEKKTAKSGVKKAAASKRAPKTAPEKAVKAVKKAAKKTASAVKKTSKKAAEITVGAYEAVSEKVSDTFEAAREVAPKVVKKVGGRLSRMNDSFEDILGDSISKVRSFRGSSQK

SEQ ID NO: 73525 - DNA, 630 bp, Unknown
  Obtained from environmental sample
  misc_feature (1)..(630): n is a, c, g, or t
gtgcttggcccactgggccaaggcgtggttcggaatagccgacggcgcccttatagtattcagcttggccttcatttcggctgtgctggcgggttccatcatattcagcttggcctccacgaggcatttggagggcaagccctgatgcgggtgtggaaggtcgactttttttcggctagggccgacaaattacagcagggtccaacaatagctacgctgggcaattttgatggagtccacgcgggacacaggcagttgctggcaaaagcagtccatttggcaaaggagcgctctctgccagccgttctagtgacattcgaccctcatcccgaaaaaatgctgtccccttccccgggcgcgtcgctgttgatgacgatgcagcaaaaattggacatctttgaaaggctgggcattgactgcgtttgggcattgcccttcgacaggggcttttccgagcttgccccccgcacattcttggacggcctgcgcgacgctatctctcccattgatctgcacgttggccaagctttccgttttgggcgcggcaaggccggggacattcattttatcaaggagtgggcggccaacaatggatgctcggtccacccgcacgcgtacaaagaccactga

SEQ ID NO: 73526 - protein, 209 aa, Unknown
  Obtained from environmental sample
  DOMAIN (67)...(209): FAD synthetase
  misc_feature (1)..(209): Xaa is any amino acid
MLGPLGQGVVRNSRRRPYSIQLGLHFGCAGGFHHIQLGLHEAFGGQALMRVWKVDFFSARADKLQQGPTIATLGNFDGVHAGHRQLLAKAVHLAKERSLPAVLVTFDPHPEKMLSPSPGASLLMTMQQKLDIFERLGIDCVWALPFDRGFSELAPRTFLDGLRDAISPIDLHVGQAFRFGRGKAGDIHFIKEWAANNGCSVHPHAYKDH

SEQ ID NO: 73527 - DNA, 903 bp, Unknown
  Obtained from environmental sample
  misc_feature (1)..(903): n is a, c, g, or t
atgcagctcatcgagggccctnccctctcaaaaataattgatgcaaatatccggttagacgctaccagcgtggcaaggctgagcatcccattgctggaggcactggcctatagccacaggcacgggattatccacagggacataaagcctgccaacattttgctgaacacggacgggcgcccgtgcttggcagactttggcatcgcaaaagccatcgatgccgccgacaccacgcagacgggcagcatgttgggaactcccgcatacatggccccagaacaggcgattggaaaacgcgtggacggcagggccgatcaatattctttcgccattactttgtacaaggccgttacaggccagctgcccttttcgtccgacgagcctatggcgacgctggtccagcggataaaagaaaaccccgagcccatagaccattacgccccaagttttccagcccctttgaaggcagtgctgatgaaagccctctcaagggagagggaagaccgctacatgacgatagacgaaatgcaaagggatatgctgtctgcctgcgaaaaatgccgcatccaatggaatttgagactagataatttcaaaggcatgtcctttcaaaggattcccattgaggatgcagacctcacggcctcagacagcaccttgatggtcccgactgctgtcaggaggggcaggccggcgaaccgcatatggggctatcgccgctgggcggccggtttagctttcctcattgctgtggccgctggggcgctggcgtactattttaagagcggaaagaaagacagcccattgctggaaccaacacaggcaagcgttgccagctccacccacaaaaaagagactcctgtggcagcctcctcagccccacccgcaactcggccgatctga

SEQ ID NO: 73528 - protein, 300 aa, Unknown
  Obtained from environmental sample
  DOMAIN (1)...(180): Protein tyrosine kinase
  misc_feature (1)..(300): Xaa is any amino acid
MQLIEGPXLSKIIDANIRLDATSVARLSIPLLEALAYSHRHGIIHRDIKPANILLNTDGRPCLADFGIAKAIDAADTTQTGSMLGTPAYMAPEQAIGKRVDGRADQYSFAITLYKAVTGQLPFSSDEPMATLVQRIKENPEPIDHYAPSFPAPLKAVLMKALSREREDRYMTIDEMQRDMLSACEKCRIQWNLRLDNFKGMSFQRIPIEDADLTASDSTLMVPTAVRRGRPANRIWGYRRWAAGLAFLIAVAAGALAYYFKSGKKDSPLLEPTQASVASSTHKKETPVAASSAPPATRPI

SEQ ID NO: 73529 - DNA, 804 bp, Unknown
  Obtained from environmental sample
  misc_feature (1)..(804): n is a, c, g, or t
ttgggtacagaaatgctgggaaacaatagaaccgctggactccccgaccatgcccgacaccccattccgcctatccatcatcgactacctgaacgccgcgccgctcaactacggcttcaagcacgggctgggcttcgagcatttccacctgaagttccaggtgccctccgtttgctcggaccagcttcgcgccggcgaggtcgacgcggggctgataagctccatcgagtacttacggacacccggcctgaggatagtcccgggcctctgcatagccagcccggagcgcgtcaggagcgtgatactgctgtgcagggtgccgccggaggcgataaagaccctggcgctggacacgtccagccgcacttcggtggtgctggcgcagatactcctgcgcgagcgctacggcgcggctcccagcgtgacgccgatgccgcccgacatagacgccatgctggccgggcacgatgcggcccttatgattggcgacaaggccatgagggtcggccgcgagggcctgatggtgctggacctcgccgaggagtggcacacgtggacgggccttccatttgtctttgccctctgggcggtccgcgccgatgcgcccgaactcgccctgccagggggcgtcgcgcctttcttccaccagagcttcgagcttggcaaaaagaacatcgagagcatcatcgacgaggcgtggcgcgccatcggctggaccaagctcgagctgcgggactacctgaccaagaacctcagccacactctgggcgaggccgaaagggaaagcctgtcgctgttctttga

SEQ ID NO: 73530 - protein, 267 aa, Unknown
  Obtained from environmental sample
  misc_feature (1)..(267): Xaa is any amino acid
MGTEMLGNNRTAGLPDHARHPIPPIHHRLPERRAAQLRLQARAGLRAFPPEVPGALRLLGPASRRRGRRGADKLHRVLTDTRPEDSPGPLHSQPGARQERDTAVQGAAGGDKDPGAGHVQPHFGGAGADTPARALRRGSQRDADAARHRRHAGRARCGPYDWRQGHEGRPRGPDGAGPRRGVAHVDGPSICLCPLGGPRRCARTRPARGRRAFLPPELRAWQKEHREHHRRGVARHRLDQARAAGLPDQEPQPHSGRGRKGKPVAVL

SEQ ID NO: 73531 - DNA, 888 bp, Unknown
  Obtained from environmental sample
  misc_feature (1)..(888): n is a, c, g, or t
atgtacactcccgcggtactgcaaaatagagttgcggcgactcatcccaatttagagttattaaacggaatcggaaagctgccccaagaggagtttctagaaatcgcccagacccaggcgtatgcgggtgaggaaaatccccatggcaggcgtttcgagggtatcgttcgctgggcagcggcggtatacaacgaaaataacgaaaaaataggctacgtaagttttgcgttgaatcacgatcatatcatggaattgattgaccatatcacgcccatggacaatcgctatacagaactgcccagcgcttatgaagggaactatgcctttatttgggactaccagtgccgcagcatcagtcatccccggcatcattccattgtcggctttgatccggaaaccggagaaccccaggttccatggcttgaatcttccattttcgataaatggcaggccagcggcattgaaaggtggactgattttatgatcaaaacaaatcagaaaacctttgataaccaaaggagaactaaagttccggcgcccgcgctcaccaaggcgggactggtcgggctggatgggcgctaccttaacaatgcccctcaatgtacaggctggatggacttgaccaaggatggcggctcaggctcgttctatattctctggagcgggctttataaactgactaccgcggcggcaattccctactatacaggacagtacgccccctctccatccaacggctattcccatcgcggtttcgggtttgtcaccattggtgcgggcctggaagattttagcaatccggccacaaaaatcggggagctgcttaggaccaccatggagaaggacctccgcgtcacgctccaaagatccctttggctctccgcttaa

SEQ ID NO: 73532 - protein, 295 aa, Unknown
  Obtained from environmental sample
  misc_feature (1)..(295): Xaa is any amino acid
MYTPAVLQNRVAATHPNLELLNGIGKLPQEEFLEIAQTQAYAGEENPHGRRFEGIVRWAAAVYNENNEKIGYVSFALNHDHIMELIDHITPMDNRYTELPSAYEGNYAFIWDYQCRSISHPRHHSIVGFDPETGEPQVPWLESSIFDKWQASGIERWTDFMIKTNQKTFDNQRRTKVPAPALTKAGLVGLDGRYLNNAPQCTGWMDLTKDGGSGSFYILWSGLYKLTTAAAIPYYTGQYAPSPSNGYSHRGFGFVTIGAGLEDFSNPATKIGELLRTTMEKDLRVTLQRSLWLSA

SEQ ID NO: 73533 - DNA, 627 bp, Unknown
  Obtained from environmental sample
  misc_feature (1)..(627): n is a, c, g, or t
atgggtattaaccagggcgaccggatggaatatctttcgtcggtatcgacgaaccagtttggcctggccctctatgctaaaaacaatttgaaagacgacgagcggatcacccagtccgagcgttacaaaatgggcgatatgaatacgacaattattcatacggctaatggaaaatccatcatggtgcagcacgacaccacctcgccgcgtccctattcgcggattcatttgatacagggtacaaacggcatggctgtcaaattcccgaacgaaagaatagccctccaacccggttcgcacgcattcttgacagaaggagcgcaacaagaaatcatggcaaaatacgaacatccgctgagcaaatacatcggcgaaaaagccaagcagataggcggccacggcggcatggatttcatcatggactggcgcttgatctattgcctgaggaatggttatccgttagaccaatcggtttatgatgcggcggcctggtcgtcgattgtcgagctgagcgagcgctccgtcttaagtaagagcgtcgtcgccgtccccgacttcacccgcggcgcttggcgcgactacaaaccttggccggtaatcgacatgaaaaacgttctgcacggctga

SEQ ID NO: 73534 - protein, 208 aa, Unknown
  Obtained from environmental sample
  misc_feature (1)..(208): Xaa is any amino acid
MGINQGDRMEYLSSVSTNQFGLALYAKNNLKDDERITQSERYKMGDMNTTIIHTANGKSIMVQHDTTSPRPYSRIHLIQGTNGMAVKFPNERIALQPGSHAFLTEGAQQEIMAKYEHPLSKYIGEKAKQIGGHGGMDFIMDWRLIYCLRNGYPLDQSVYDAAAWSSIVELSERSVLSKSVVAVPDFTRGAWRDYKPWPVIDMKNVLHG

SEQ ID NO: 73535 - DNA, 807 bp, Unknown
  Obtained from environmental sample
  misc_feature (1)..(807): n is a, c, g, or t
gtgcgttgtgtgagggagagcccggttatgaatgcggtagctccacgcattaccgcacagcctgtaaacaagaggataacagcagaaagcgccgcatcgttaaatgttacggcaagcgttaacgatggcggtacattgacgtatcaatggtatagcaacaccaccgcaagcaatagcggcggtacgaaaatcgaaggcgcaaccgacgctacctacactacgcccgcattgaccgctggaaaatattattactatgtggtcgtcaccaacaccattaccggggggggcgtgacaacggcggaaacgacgagcgaagtagcaaccgtttatgccgtgaatggagtagataaatcgaattgggacgtaatctatacgtcgtggtctggttttgatgtggggcataatggtggttatcatgatcaaaacgagccgccttataacatttcgtataatggcagctttcaatcactgtttgatgacgatttgcgtacttattggcataccgttgcagtagcaccatttgcacatgcctccgtacatggagactggatcgtcgttgattttcaggagccgcttactatttccgacgtatttattgcccacagggaggctgctacctatactggcactgcgttcttgcccaaacatcttaaattttcagtttgcgaagattggaatatgatggacgacgattgggtagaactgcttgacagggatgatatatccactacgagagcttggcaagccttagcgccggaaggaggcattacgccacaacgaggacgctacctgaaaatgaaattgtag

SEQ ID NO: 73536 - protein, 268 aa, Unknown
  Obtained from environmental sample
  misc_feature (1)..(268): Xaa is any amino acid
MRCVRESPVMNAVAPRITAQPVNKRITAESAASLNVTASVNDGGTLTYQWYSNTTASNSGGTKIEGATDATYTTPALTAGKYYYYVVVTNTITGGGVTTAETTSEVATVYAVNGVDKSNWDVIYTSWSGFDVGHNGGYHDQNEPPYNISYNGSFQSLFDDDLRTYWHTVAVAPFAHASVHGDWIVVDFQEPLTISDVFIAHREAATYTGTAFLPKHLKFSVCEDWNMMDDDWVELLDRDDISTTRAWQALAPEGGITPQRGRYLKMKL

SEQ ID NO: 73537 - DNA, 528 bp, Unknown
  Obtained from environmental sample
  misc_feature (1)..(528): n is a, c, g, or t
atggccgagagggaggctggatgtttaaatcttgtagttcgtagcagggcaggcacggtggtgaatgacccaaaagaaacattatcaatcaatacttttaacataacattgcagaaatcagaacttcatgaattactagaataccgatcaatactggaaagcgagatgtgttcgcttgccgcagcccgcatcactgatgatgaattgaataccctggctatattgcaaaaaaacatggaagctaatagggacaaccaaattttattgacgcactatgatacacaatttcattatattatcgctgaagcctcaaaaaactcattgttaaaacattcgcttgatatgatttatccgaaatatatcaagctggtattccaagctttcacagacagtaaagaattggcaaccaatgcaataatgtatcattcaaagatactggaagcgcttaatgatcgttcgcctatcttggcacgtgaagttatgaaagaacacatgagtgatgtttataagcacatcaaggaagtttaa

SEQ ID NO: 73538 - protein, 175 aa, Unknown
  Obtained from environmental sample
  DOMAIN (44)...(167): FCD domain
  misc_feature (1)..(175): Xaa is any amino acid
MAEREAGCLNLVVRSRAGTVVNDPKETLSINTFNITLQKSELHELLEYRSILESEMCSLAAARITDDELNTLAILQKNMEANRDNQILLTHYDTQFHYIIAEASKNSLLKHSLDMIYPKYIKLVFQAFTDSKELATNAIMYHSKILEALNDRSPILAREVMKEHMSDVYKHIKEV

SEQ ID NO: 73539 - DNA, 408 bp, Unknown
  Obtained from environmental sample
  misc_feature (1)..(408): n is a, c, g, or t
gtggcaaaaaaggagatatttatggcacaggaaagcaacaaaaaaattgtaaccgcagcgataaccggagcaaatcacacgccaggtatgtcgccatatttaccaattgggaaaaacggaattgtaaaaaatgcggtagatgcatttgatgccggggctgctatagtgcacatacacgcacgcgccgaagatgggcaaccaactccggatagagaccaaatgtacggcattgtatctgaaataaaaaagcagaggcctaacggtattattgccataactacaggcggtggcatgaatatgaccgttgaagaacgctattcgattgtaaaaaattttaagccggaaatggcgtcctgtaattgcggtaccatgaatttttgcgctaagcgaaatgccccgtcttattga

SEQ ID NO: 73540 - protein, 135 aa, Unknown
  Obtained from environmental sample
  DOMAIN (12)...(133): Prokaryotic protein of unknown function (DUF849)
  misc_feature (1)..(135): Xaa is any amino acid
MAKKEIFMAQESNKKIVTAAITGANHTPGMSPYLPIGKNGIVKNAVDAFDAGAAIVHIHARAEDGQPTPDRDQMYGIVSEIKKQRPNGIIAITTGGGMNMTVEERYSIVKNFKPEMASCNCGTMNFCAKRNAPSY

SEQ ID NO: 73541 - DNA, 693 bp, Unknown
  Obtained from environmental sample
  misc_feature (1)..(693): n is a, c, g, or t
atgaaactgggatttcacggtgcatcacacggttatatagcatggcgtttaaaagatttgtatggctccacatatattgctgtatcatgtcacttgggagggagttcttctttatgtgccataaaagatggcaaatcaatggccaacagttttggctttacgccgcaaacaggtatgccacattctgcccgtgtgggcgattttgatattttttctttgccttaccttatgagccttggcaaaaccttggagcagatactcgaagaactttcgcatgaagccggagtgaaaggcataagcggtatcggtactgatatgtaccaaatacaaaatgcagcagcagccggaaataagcgcgcagaacttgctgtaaatcactttgtaaatgaaattgtaaaatatattggcgcgtattacgcgtgtcttggcggcttggatgtattggtgtttacagcgggcattggcgaaaattccgttcctatccgcggcatggtgtgtgaaaaacttgtacatatgggtgttgatatggatgaagacctcaataaaaatgcccatggagaaataacaatctcaaaatccaaatctaaagtgcatatatacgtcttgcctacaaatgaggaacttatggtttccaggcaaatctataggtgtatcgcagccggcttaaaaaatgatatctggagggataattga

SEQ ID NO: 73542 - protein, 230 aa, Unknown
  Obtained from environmental sample
  DOMAIN (1)...(212): Acetokinase family
  misc_feature (1)..(230): Xaa is any amino acid
MKLGFHGASHGYIAWRLKDLYGSTYIAVSCHLGGSSSLCAIKDGKSMANSFGFTPQTGMPHSARVGDFDIFSLPYLMSLGKTLEQILEELSHEAGVKGISGIGTDMYQIQNAAAAGNKRAELAVNHFVNEIVKYIGAYYACLGGLDVLVFTAGIGENSVPIRGMVCEKLVHMGVDMDEDLNKNAHGEITISKSKSKVHIYVLPTNEELMVSRQIYRCIAAGLKNDIWRDN

SEQ ID NO: 73543 - DNA, 867 bp, Unknown
  Obtained from environmental sample
  misc_feature (1)..(867): n is a, c, g, or t
atgacaaatgctatgcagaagtgtttgattataagcttcgatttttccaaagaggaagatggatatctgcctgtttcatattcaatagcttcgattttggcaaaattcaaaaaatctgattttattgagattgagccctattcctgcgatatgaatgaatatctcgaaactccgattgaggaaattgaaacacgcatagtggatcgttttaagaataaattctccggaaaaataaatagctattcatttatcgctctttcagcttatgcgtggtctgaaaatttaatcaatacatttgttaaaacgctccgccccattttcaaaggagaaattattttaggaggatatgaaataacagcgcttaacaaagaacaacttttgaaaatatatccaaatgttgattattatatcaaaggttatgcagaaaaatctttagaaaaaattttcagacatactgcgcaagaaattattcttaatgagcaacctaacgatgaaaattttgtatcgccttatctgtctgaaacgttaccattaactacaaaaaaaatatactgggaaagtaaaagaggctgtccttttcgatgcgatttttgcgaatggggaaacgcaagagacggaaaaattatcagaattaactgtgaaaggatcgatcgtgaaattaatttgtttaaacaaaaaaaaatacagcatataaatgtattggacgcaacatttttattgaatgatgaagatataaaaacgttggaaaaattattggaaatcccaaattgcgacattcgtttgcaagttcattttaatcccataaaggcaagcttaaagaaaattctttgcgctctgtcaaaaacacagagaacgaatctttcttga

SEQ ID NO: 73544 - protein, 288 aa, Unknown
  Obtained from environmental sample
  misc_feature (1)..(288): Xaa is any amino acid
MTNAMQKCLIISFDFSKEEDGYLPVSYSIASILAKFKKSDFIEIEPYSCDMNEYLETPIEEIETRIVDRFKNKFSGKINSYSFIALSAYAWSENLINTFVKTLRPIFKGEIILGGYEITALNKEQLLKIYPNVDYYIKGYAEKSLEKIFRHTAQEIILNEQPNDENFVSPYLSETLPLTTKKIYWESKRGCPFRCDFCEWGNARDGKIIRINCERIDREINLFKQKKIQHINVLDATFLLNDEDIKTLEKLLEIPNCDIRLQVHFNPIKASLKKILCALSKTQRTNLS

SEQ ID NO: 73545 - DNA, 903 bp, Unknown
  Obtained from environmental sample
  misc_feature (1)..(903): n is a, c, g, or t
ttgagggacgcccctttggctggggtgattttaaaccagttgaagcctttaaatgaccgggggcagccgccggcccaggctcacggtttccaaggtcaattcggcccgatagacccagatttccacgccttctttcagggccgaccgcaggcgccggccccattcggggtcgatgtggtcggccgggctgaaagcttcggcgtcgccgcgctggaccaaaatgaaaagggcggcccgccggccggagcgggccagggcggccagttcctccaggtgtcgggcgccccgggccgtcaccgcatcggggaaataggccgtgccgtcccgggccagggtggaatttttcacctccaccagaaccggccggccccttggtccggtcagtttcaggtccagccggctggtcccgctccggacttcggtctccacctccgccgggccgcccaattcggccaaaaggccggtccgggccgcctgggccgccaggcggttgggtacctgagtgttgacgcccaccagggcggagggcatacggatcatttcccaggtgaagggcaggcggcgggcggggtcgggctgaggcgagagccagaccgggcggcccggttcggaacagccggtcatgcggccggtgttggccgtgtgggcggtgaccaggcggccgtcggccgactccacctcggccaggaaccttttatatctccggaccaggcggccgggcagcaaagggccccagcggagcccgccgccggggtccggggccaggtaggcggagttaaggcggtctggcctggccggcttccgattcatttcgcgcctgagcggcgtttcctgaaacgcctcgctcacccggcgcctcagcccttcatctcagtcaggccaccgcttcaatttccaccatga

SEQ ID NO: 73546 - protein, 300 aa, Unknown
  Obtained from environmental sample
  misc_feature (1)..(300): Xaa is any amino acid
MRDAPLAGVILNQLKPLNDRGQPPAQAHGFQGQFGPIDPDFHAFFQGRPQAPAPFGVDVVGRAESFGVAALDQNEKGGPPAGAGQGGQFLQVSGAPGRHRIGEIGRAVPGQGGIFHLHQNRPAPWSGQFQVQPAGPAPDFGLHLRRAAQFGQKAGPGRLGRQAVGYLSVDAHQGGGHTDHFPGEGQAAGGVGLRREPDRAARFGTAGHAAGVGRVGGDQAAVGRLHLGQEPFISPDQAAGQQRAPAEPAAGVRGQVGGVKAVWPGRLPIHFAPERRFLKRLAHPAPQPFISVRPPLQFPP

SEQ ID NO: 73547 - DNA, 801 bp, Unknown
  Obtained from environmental sample
  misc_feature (1)..(801): n is a, c, g, or t
gtgagcgaggcgtttcaggaaacgccgctcaggcgcgaaatgaatcggaagccggccaggccagaccgccttaactccgcctacctggccccggaccccggcggcgggctccgctggggccctttgctgcccggccgcctggtccggagatataaaaggttcctggccgaggtggagtcggccgacggccgcctggtcaccgcccacacggccaacaccggccgcatgaccggctgttccgaaccgggccgcccggtctggctctcgcctcagcccgaccccgcccgccgcctgcccttcacctgggaaatgatccgtatgccctccgccctggtgggcgtcaacactcaggtacccaaccgcctggcggcccaggcggcccggaccggccttttggccgaattgggcggcccggcggaggtggagaccgaagtccggagcgggaccagccggctggacctgaaactgaccggaccaaggggccggccggttctggtggaggtgaaaaattccaccctggcccgggacggcacggcctatttccccgatgcggtgacggcccggggcgcccgacacctggaggaactggccgccctggcccgctccggccggcgggccgcccttttcattttggtccagcgcggcgacgccgaagctttcagcccggccgaccacatcgaccccgaatggggccggcgcctgcggtcggccctgaaagaaggcgtggaaatctgggtctatcgggccgaattgaccttggaaaccgtgagcctgggccggcggctgcccccggtcatttaa

SEQ ID NO: 73548 - protein, 266 aa, Unknown
  Obtained from environmental sample
  DOMAIN (48)...(263): Sugar fermentation stimulation protein
  misc_feature (1)..(266): Xaa is any amino acid
MSEAFQETPLRREMNRKPARPDRLNSAYLAPDPGGGLRWGPLLPGRLVRRYKRFLAEVESADGRLVTAHTANTGRMTGCSEPGRPVWLSPQPDPARRLPFTWEMIRMPSALVGVNTQVPNRLAAQAARTGLLAELGGPAEVETEVRSGTSRLDLKLTGPRGRPVLVEVKNSTLARDGTAYFPDAVTARGARHLEELAALARSGRRAALFILVQRGDAEAFSPADHIDPEWGRRLRSALKEGVEIWVYRAELTLETVSLGRRLPPVI

SEQ ID NO: 73549 - DNA, 381 bp, Unknown
  Obtained from environmental sample
  misc_feature (1)..(381): n is a, c, g, or t
atgatcaatgccaaaacaagggccgcggcgacaatgccgataatgaggggcatgggcaaacccgtttcagtaccggctgttgtaccgggctgcgttgtagtaccgggctgcgtcgtggtgccgggctgcgtcgtggtgccgggctgcgtcgtggtgccgggctgcgtcgtggtgccgggctgcgtcgtggtgccgggctgcgtcgtggtgccgggctgcgtcgtggagccgggctgcgtcgtggagccgggctgcgtcgtggagccgggctgcgtcgtggagccgggctgcgttgtagtaccgggctgcgtcgaggtgccgggctgggtcgtggagccgggctgcgttgtagtaccgggctgggtcgaggtgccgggctga

SEQ ID NO: 73550 - protein, 126 aa, Unknown
  Obtained from environmental sample
  misc_feature (1)..(126): Xaa is any amino acid
MINAKTRAAATMPIMRGMGKPVSVPAVVPGCVVVPGCVVVPGCVVVPGCVVVPGCVVVPGCVVVPGCVVVPGCVVEPGCVVEPGCVVEPGCVVEPGCVVVPGCVEVPGWVVEPGCVVVPGWVEVPG

SEQ ID NO: 73551 - DNA, 939 bp, Unknown
  Obtained from environmental sample
  misc_feature (1)..(939): n is a, c, g, or t
atggtgatatcgactttaacgttgcgccctacaacaattattgccggctggactccaatcggaacagagacaaacccatttaaaggtactttcgactgctggggggcgggtatagttataagcaacctgtacatcagcaacaccacacaggatctgggacatatcggtctgttcgggtatgtcagcggcaacgcgagtataaagaacgtttcgctgaccaatgtaaatattacaagctccagttccaacagtaccaatgcaggcggtttggttggaacgtatgcagcaacaagtaccagtggaaaccgaatcagcaactgttatgttaccggcacagtaaaagtgattaacgggtattgcggcggcatagtgggatattttagaggcggctacagcatcaccgactgctattcttcagtaacagttggtaacatcggaactaataactggggtgatcagtcttgcggcggcattgcaggatatgcggcaagacttgtttccaaatgctatgccacaggcgagatattaggacagaacgctggtggtattgttggatatttaccttatactgcaacaatcacatcagcttctgtacaaaactgcgttgcgttaaatccgaaagtcgccggaatgatctcgggacgcattgtgggaaatagacaaaccggcgccggcggtgttggtggaactttagccgacaatcaagcctataacggcattaatactatcatggacgaaccctttgcaagcgggactcctgacggcacaaacggcgccgacataagcaaagctcaagcgaagcagcaatccacctatagcggcaaaggctgggtattcggcggcaccgaagccaacccgtggaagataaacaacggaagcagccttccgtatctgtggacgcagagtagcgcaccggcagtgccaactcggccgatctga

SEQ ID NO: 73552 - protein, 312 aa, Unknown
  Obtained from environmental sample
  misc_feature (1)..(312): Xaa is any amino acid
MVISTLTLRPTTIIAGWTPIGTETNPFKGTFDCWGAGIVISNLYISNTTQDLGHIGLFGYVSGNASIKNVSLTNVNITSSSSNSTNAGGLVGTYAATSTSGNRISNCYVTGTVKVINGYCGGIVGYFRGGYSITDCYSSVTVGNIGTNNWGDQSCGGIAGYAARLVSKCYATGEILGQNAGGIVGYLPYTATITSASVQNCVALNPKVAGMISGRIVGNRQTGAGGVGGTLADNQAYNGINTIMDEPFASGTPDGTNGADISKAQAKQQSTYSGKGWVFGGTEANPWKINNGSSLPYLWTQSSAPAVPTRPI

SEQ ID NO: 73553 - DNA, 594 bp, Unknown
  Obtained from environmental sample
  misc_feature (1)..(594): n is a, c, g, or t
ttgatcatgccgcttgccgagctgaaggtgtttgggcagcataatatcacaaacgcgctcgctgctgcggcagtatgccacgcgcttgatataccggacgcggatatccgcgccgggctcgcgaatttttccggtctcccgcatagatatgaggacgcgggcagcgtttccggggtgcgctttatcaacgattccaaggctaccacggtatccgcagttctcagtgccgtgcaatcggcgggtgcgggcgcttccattcttttggggggacgcgacaaagggctggattttgcgcccctcgcggaaccgatccgcgcgaagggccttctggttttcccgttcggagaggccggcgaaaagatccgcgcgcagcttgcttccgcccttggtgacgacgcggctctctcgcctgtggatgcacatctggaatccgcgctccggcgcgcgtacgaaagcgcgcggaatcgcggcgcgcgcgaggtattgctctctcccgggtgtacctcgtatgatgaattcgataattttgaggttcgcggagatttcttcaggaattgggtgcggaagctcggcgcggaggcaaacggtgtataa

SEQ ID NO: 73554 - protein, 197 aa, Unknown
  Obtained from environmental sample
  DOMAIN (46)...(121): Mur ligase family, glutamate ligase domain
  misc_feature (1)..(197): Xaa is any amino acid
MIMPLAELKVFGQHNITNALAAAAVCHALDIPDADIRAGLANFSGLPHRYEDAGSVSGVRFINDSKATTVSAVLSAVQSAGAGASILLGGRDKGLDFAPLAEPIRAKGLLVFPFGEAGEKIRAQLASALGDDAALSPVDAHLESALRRAYESARNRGAREVLLSPGCTSYDEFDNFEVRGDFFRNWVRKLGAEANGV

SEQ ID NO: 73555 - DNA, 918 bp, Unknown
  Obtained from environmental sample
  misc_feature (1)..(918): n is a, c, g, or t
gtgccgaaagcgcgaagcntcattcaggcaatgagccgggatctctgcattgtttttgggggctatgccagcgcccctctcctgattgcctgccggcgaagtcgtacgccctattgcgttgccgaacagaatgcctacccggggcgcgcaaacagacattttgcgaaaaaggcggcggctctctttttgaatttccggcaggcgctggatctcttttccgcgcgcgcgcgcaagcgcgccctgatcaccggaaatccggtacgtccgagctttggcagtgtgtcgcaggcggaagccctgaagcgcatgggtatcgacggcagtaaatttattcttggaattacgggcggaagtcagggcgcccgtgagctcaacaatgctttactctccattgtgcgcaggcagaaaaaagccaccgtcctctggagctgcgggcgcgataactacgaagagcttgagaaagacatcgcgggtatgaaggatgtgcatctctttccgtttgtcgatgacatggccgcttttctctccgcgtccgcgctggttatttcacgcgccggcgctacatcgctctcggaactcgccgcctgcaagacgccctctatactcgtgccctatccctatgccgcggatgatcaccagcgcaggaacgcgcgcgcctgggaagaggccggcgcggcggtggttgttacgcagggactggatttttccgatcgcctggaagaggttctggatgggttggtcaataaccgcgcggcgctgctggatatgcggaaagctgcctcccgattatatgatcccctgacgctaagccacatggcggatattgccgaggaactcgcgcgggaagcgcatacccatggcaagaaaaaaataaagccccggcagaaggaggatgcgcatacctcgtgccgattctga

SEQ ID NO: 73556 - protein, 305 aa, Unknown
  Obtained from environmental sample
  DOMAIN (111)...(279): Glycosyltransferase family 28 C-terminal domain
  misc_feature (1)..(305): Xaa is any amino acid
MPKARSXIQAMSRDLCIVFGGYASAPLLIACRRSRTPYCVAEQNAYPGRANRHFAKKAAALFLNFRQALDLFSARARKRALITGNPVRPSFGSVSQAEALKRMGIDGSKFILGITGGSQGARELNNALLSIVRRQKKATVLWSCGRDNYEELEKDIAGMKDVHLFPFVDDMAAFLSASALVISRAGATSLSELAACKTPSILVPYPYAADDHQRRNARAWEEAGAAVVVTQGLDFSDRLEEVLDGLVNNRAALLDMRKAASRLYDPLTLSHMADIAEELAREAHTHGKKKIKPRQKEDAHTSCRF

SEQ ID NO: 73557 - DNA, 492 bp, Unknown
  Obtained from environmental sample
  misc_feature (1)..(492): n is a, c, g, or t
ttgggcaacctggccttcaacatctccagcccggggcttttctgggttctgcgccaccggcgggccctttccggggcgctgttcatgctccagaaggaactggccgaaaggctgaccgcggcccccggcggccgagcctacggccggctgagcgtggccctggggctgtggttcaggctggaaaacgtgctggccgtgccggcaacggccttccatccccggccccgggtggccagcgccgtcgtgggcttccggccggtcccccccgaatccgaaccgcccgtcccccccgaagtcctgggccgcttcaccctggccgccttcggggcccgccgccagaccttgctgaacaacctgtcccgggcctacggccgggaacgggccgcccgggccctggccggcctgggcctggcccccggcctccgggccgaaaccctggccccttccgccctggccgccctggccctggccttggaaccggccgctacttaa

SEQ ID NO: 73558 - protein, 163 aa, Unknown
  Obtained from environmental sample
  DOMAIN (1)...(160): Ribosomal RNA adenine dimethylase
  misc_feature (1)..(163): Xaa is any amino acid
MGNLAFNISSPGLFWVLRHRRALSGALFMLQKELAERLTAAPGGRAYGRLSVALGLWFRLENVLAVPATAFHPRPRVASAVVGFRPVPPESEPPVPPEVLGRFTLAAFGARRQTLLNNLSRAYGRERAARALAGLGLAPGLRAETLAPSALAALALALEPAAT

SEQ ID NO: 73559 - DNA, 771 bp, Unknown
  Obtained from environmental sample
  misc_feature (1)..(771): n is a, c, g, or t
atgataaattcaaatgcaattaaagatgggaaatgtctcagatataaaaagaactggaaagaattatcatattcaaaagaaagtttattggaggatttcaaaaaaaattgtgaacttatatccgaagaccttaaaaacactcaaataacaaaagttgcaaaaatattaaaaggcgatgttagggaaaaattgaaaacaataaaagataaatttaaactttgtattacatctcctccttatcttaattcatttgattattctgatatttatagaccagaattatttttatgtaaatatgtaaaaaataacaataatttaggaaaattacgattatctacattacgttcacatatgcagattaattgggaattacccaaaaagactaagtttggaagtatttatcaaaattgttttaatgaattatcagagcgtaaaaaacttttatggaataataaaattcctataatgattcaagcgtattttgaagatattgaaaaattattgattcaattaaaaaagaaggcacaaaaatcagcgcaattatggataattgtatctacatcagcatatgcagggattgaaatcccagttgatttaattatcgcagatattggagcaagaaatgngtgggaattaaaggaaattaatattattagacacatgaggaattcaacgcanaatgcacaaaaatatttaaatggaatcggttctgtaaagaaattaaagagaagtatagttattctncagaattcagttaattattatggttaa

SEQ ID NO: 73560 - protein, 256 aa, Unknown
  Obtained from environmental sample
  misc_feature (1)..(256): Xaa is any amino acid
MINSNAIKDGKCLRYKKNWKELSYSKESLLEDFKKNCELISEDLKNTQITKVAKILKGDVREKLKTIKDKFKLCITSPPYLNSFDYSDIYRPELFLCKYVKNNNNLGKLRLSTLRSHMQINWELPKKTKFGSIYQNCFNELSERKKLLWNNKIPIMIQAYFEDIEKLLIQLKKKAQKSAQLWIIVSTSAYAGIEIPVDLIIADIGARNXWELKEINIIRHMRNSTXNAQKYLNGIGSVKKLKRSIVILQNSVNYYG

SEQ ID NO: 73561 - DNA, 666 bp, Unknown
  Obtained from environmental sample
  misc_feature (1)..(666): n is a, c, g, or t
gtggcgtcgctaacatttacggtgcttttgtcgctttttatgatttcggcgggcgagcaaaaacagcagaatatcgcaaggacgctcaccctgtcaatattttctccggcgcaattagcggtcggcgcattttatcagtttcacaatattttagatgaaaacaaagaacttcgcgagaaaatcgttagaatagaattagaaaacgccaaaatccgcaaaaaattgagcgccgtcggcgaagcgggcgaaattcctgtggacgtttcgcaaatatacggagtagttccggcggatatcgtggcgcgcgaaccgtcgtttttttatagaacggcgataataagcgtcggcgcaaatcagggaataaaaaatcttatgccagtaatatctaccgacggcgttgtcggcaaagtaatttcggtacttccttttacttcgcaaattcaaatgatttacgaaccggaagaatatgtaagcgtcgagcatgaaaaaagcggcactatggggattttgtattccaagtcggacggaacgctttttgcggacgtacgcagcgtcactataattgaaatcggcgatacgctgacgacgaccgggctcggcggaatttaccccgcggggctaaacgttgggactacaaaaaaaatagatagagtaaaagcgcggtga

SEQ ID NO: 73562 - protein, 221 aa, Unknown
  Obtained from environmental sample
  SIGNAL (1)...(21)
  DOMAIN (97)...(221): rod shape-determining protein MreC
  misc_feature (1)..(221): Xaa is any amino acid
MASLTFTVLLSLFMISAGEQKQQNIARTLTLSIFSPAQLAVGAFYQFHNILDENKELREKIVRIELENAKIRKKLSAVGEAGEIPVDVSQIYGVVPADIVAREPSFFYRTAIISVGANQGIKNLMPVISTDGVVGKVISVLPFTSQIQMIYEPEEYVSVEHEKSGTMGILYSKSDGTLFADVRSVTIIEIGDTLTTTGLGGIYPAGLNVGTTKKIDRVKAR

SEQ ID NO: 73563 - DNA, 543 bp, Unknown
  Obtained from environmental sample
  misc_feature (1)..(543): n is a, c, g, or t
ttgcctcgcgccctatttgaatcattccggaaaatgaccatcatgatggaaagagattttatggacaaagatgaaaaagacagtatagagcttgaaacgaacctagccacaacgctctatcctgacaacgattccaaggaaattcgcctccgggactcgctcttctgtgaactgccggacgagagcaagtcggagtccgtgaaaaatgcgtggcaagatctgtggagcaaggtggtcacctatctttcatttcctcagctgaatcaagttggaaaggcgttcctctacgcgggaaatgcccatgttactcaaaagcgctcgacaggagaaccctacatcattcattccatcagcgtggcggtgatcctcgcggaagtacaaatggactccgcggcgctctgcgcttcgctcctccatgacgttctggaggacacagaaacgacggtcgccgagctctccgcggctttcggggatgaggtggtgactctcgtcgacggagtgacgaagttgggaagcttcctcgtgccgctcggccgatcctga

SEQ ID NO: 73564 - protein, 180 aa, Unknown
  Obtained from environmental sample
  misc_feature (1)..(180): Xaa is any amino acid
MPRALFESFRKMTIMMERDFMDKDEKDSIELETNLATTLYPDNDSKEIRLRDSLFCELPDESKSESVKNAWQDLWSKVVTYLSFPQLNQVGKAFLYAGNAHVTQKRSTGEPYIIHSISVAVILAEVQMDSAALCASLLHDVLEDTETTVAELSAAFGDEVVTLVDGVTKLGSFLVPLGRS

SEQ ID NO: 73565 - DNA, 612 bp, Unknown
  Obtained from environmental sample
  misc_feature (1)..(612): n is a, c, g, or t
atgcccaagatgtatgacttcatcggaaaaaccggcgtcatcgtgccggataccgcggacttgcggcagagcgtggagaacgaatttcgcgaggtgttcggggacgagctgcttttgaccccggaaagcccggaaggcgtgttggtgacggcggaaacggaggcgcgggacggcattgtgcgttccaatgcgctgctggccaaccagattaaccccaacttcgccgggggtctgtttttggatgccatcgccgcgctgaccggcctggagcgccgcccggcggaaagcacactggtcaaggggctgctgcgcggcgtgccttccaccatcatcccgtccggcgcgcgagtggttacggaagccaacgatgtgtttgtcagcaaaaaagccgtggtgctggatgcaagcggccgggcggaaacctggttttacagcgaggtcaaggacgcggtcccttgtcctgtcggcggcctggtcaaaatcctcgatcccgtgctgggctgggagaccatcaccaacgaaacccccggcgtactcggacagccggtggaaagcgacgcgcgcttccgcaagcgccggcgcctgacgctgatctcggccaatctgacctag

SEQ ID NO: 73566 - protein, 203 aa, Unknown
  Obtained from environmental sample
  misc_feature (1)..(203): Xaa is any amino acid
MPKMYDFIGKTGVIVPDTADLRQSVENEFREVFGDELLLTPESPEGVLVTAETEARDGIVRSNALLANQINPNFAGGLFLDAIAALTGLERRPAESTLVKGLLRGVPSTIIPSGARVVTEANDVFVSKKAVVLDASGRAETWFYSEVKDAVPCPVGGLVKILDPVLGWETITNETPGVLGQPVESDARFRKRRRLTLISANLT

SEQ ID NO: 73567 - DNA, 870 bp, Unknown
  Obtained from environmental sample
  misc_feature (1)..(870): n is a, c, g, or t
gtgtacaattgcaaaattgaccgtgacgtttttatctcctgtaaaagcggttttattgacgaaaaggtcgcgtgggcaatcgttgacgcgcttgaaagggaaaattatgaatgttggttcttcaaacgcaacttgcgcaacaacgcgggcgacgattacgacgacgacatcgcaacggcaatagggcattgcaaattgtttgttgttttatcgtcaccccattcaatggacagcaaggccgttgaacgcgaaatggacgtggcggacgatttgggcaaaccccgattggaatacgttattgataaatcaaagcgcacaaaaacctttcaatctttctttgcgggcaagtcctatttcgacgcgacaaacgacccattgggtgcaaagaacatatcaaaattcgtcgatacggtacacaacgaaatgcttaaaataaagggcaaacgcgcacccgaacccgcccccaaacccgcgccgctggtcaagactgcgccgattgccaaggtcgccctttcgcaaatcgaccccgaacgcgcccgcctttcgggcaaggcacttgaaaattacgaatcggcaatcacgggcaacgcaaccgcccaatttaacttgggattgtattacagtaaagggcaagagggcgcacgcaaagacgtggacaaggccattttttggtacaccaaggccgccgagcaaggggatagtgatgcgcaaaacaatttggcatattgttatgaacgcggccaaggtgtcaaaaaaaacgccaagaccgccatttattggtatgaattggcggcggcgcaagggaatgaattggcaaaaaagaatttactggaattggaaaaggcacaagaaaacaaatccattttttaa

SEQ ID NO: 73568 - protein, 289 aa, Unknown
  Obtained from environmental sample
  DOMAIN (197)...(233): Sel1 repeat
  misc_feature (1)..(289): Xaa is any amino acid
MYNCKIDRDVFISCKSGFIDEKVAWAIVDALERENYECWFFKRNLRNNAGDDYDDDIATAIGHCKLFVVLSSPHSMDSKAVEREMDVADDLGKPRLEYVIDKSKRTKTFQSFFAGKSYFDATNDPLGAKNISKFVDTVHNEMLKIKGKRAPEPAPKPAPLVKTAPIAKVALSQIDPERARLSGKALENYESAITGNATAQFNLGLYYSKGQEGARKDVDKAIFWYTKAAEQGDSDAQNNLAYCYERGQGVKKNAKTAIYWYELAAAQGNELAKKNLLELEKAQENKSIF

SEQ ID NO: 73569 - DNA, 852 bp, Unknown
  Obtained from environmental sample
  misc_feature (1)..(852): n is a, c, g, or t
atgttccttgacggttatgtggaagtttcgcaggaagaatatcctgaattttccgaaaaatggataaaagaagcggcaagagttttacgacccggaggaagtatatatatgttttccggatattcacaacttaggcacattcttaacgctttggcaaagaccgagttacaagaaaaaaaccatattatttggaaatataattttggggtttacgcatcaaaaaaatacatctcttcgcactatcatattttgtattacgtaaaaaaaggcggtgatataactttcaataccaatgcgttttatgccgattgtgaaaagtcgaaaaatggtgggtcaatgaattatattgaccgcgaagacgtttggattataaatagagaatataaaccgggacaaataaaaaataaaaacgagttgccaaaatcgctgttgacaaaaatgattttatattcaagcaatgaaaacgatatggtttgcgatttctttttgggaagtttttctaccgcaaaggtcgcaatcggattaaatcgtaaagcatgtggttttgaacttaataaaaatgcttttgattatcaaattaaagaaacagaaaaagtaaaatttggagaattactttacgaactaaggcaagtcccagaaaataaactgacaaacaaggggaaaccgttattgcaagaagaaataaatcaaatttctatagaatttacacagcttactagtaaaggaatttcgcaaaggaacgcttgtgatattatttccgacaaatacggacgcggttactggtctatattaaaattggtttcatcttccaaaaatagttttcctaaaatgcaagtatcaatgtttgactga

SEQ ID NO: 73570 - protein, 283 aa, Unknown
  Obtained from environmental sample
  DOMAIN (9)...(195): DNA methylase
  misc_feature (1)..(283): Xaa is any amino acid
MFLDGYVEVSQEEYPEFSEKWIKEAARVLRPGGSIYMFSGYSQLRHILNALAKTELQEKNHIIWKYNFGVYASKKYISSHYHILYYVKKGGDITFNTNAFYADCEKSKNGGSMNYIDREDVWIINREYKPGQIKNKNELPKSLLTKMILYSSNENDMVCDFFLGSFSTAKVAIGLNRKACGFELNKNAFDYQIKETEKVKFGELLYELRQVPENKLTNKGKPLLQEEINQISIEFTQLTSKGISQRNACDIISDKYGRGYWSILKLVSSSKNSFPKMQVSMFD

SEQ ID NO: 73571 - DNA, 843 bp, Unknown
  Obtained from environmental sample
  misc_feature (1)..(843): n is a, c, g, or t
gtgtttacccatgacgcgcgcgtggaaacctggatccgtaaaaacattgaaattacttctttatatgatcccctgctggccaaactgatagttaaaggcaatgaccgcgctgaggcgatgcggaagctaaagcaggcgttggagcagacaaaaatattcggcattaccgccaacctgaattacctgcgcaaattgctggaggaagacagttatcaaaacggcgaactccggacaaaaatgctggaaaattttcacccggaagaaaacgcgctggaagtgctggacggaggcattcaaaccacggtacaggattatcccggaatgattggttactggacggtaggcgttccgccctgcggagtttttgacgctcgcagtttccgccttggcaaccggctgctgggcaatacggaaaacgccccgggactggaatttacgctgcgcggcggtagctataaattccgcacggccgccagtttttgtctgaccggcgcggagatggacgccagactggataatgttccggtggcgtattatacagtagtgcaggcggcgcccggacagaccctccggctgggtaattgccggacaggtatgcgcgcttatttgactgttgccggcggactgcagacgcccaaaataatgggcagcagcgccacctttattgacggcaagttcggtggacataacgggcgcgcgctgcgcgtgggcgatgtattgcagctggccgggcattgccgtaccgactccgcggcggttttgccagccggacagcggcctgagattacaaacaactggacgatcggcgttctgccaggtccgcagccgaccggcgaatactaa

SEQ ID NO: 73572 - protein, 280 aa, Unknown
  Obtained from environmental sample
  DOMAIN (2)...(82): Biotin carboxylase C-terminal domain
  misc_feature (1)..(280): Xaa is any amino acid
MFTHDARVETWIRKNIEITSLYDPLLAKLIVKGNDRAEAMRKLKQALEQTKIFGITANLNYLRKLLEEDSYQNGELRTKMLENFHPEENALEVLDGGIQTTVQDYPGMIGYWTVGVPPCGVFDARSFRLGNRLLGNTENAPGLEFTLRGGSYKFRTAASFCLTGAEMDARLDNVPVAYYTVVQAAPGQTLRLGNCRTGMRAYLTVAGGLQTPKIMGSSATFIDGKFGGHNGRALRVGDVLQLAGHCRTDSAAVLPAGQRPEITNNWTIGVLPGPQPTGEY

SEQ ID NO: 73573 - DNA, 840 bp, Unknown
  Obtained from environmental sample
  misc_feature (1)..(840): n is a, c, g, or t
ttgttcccaaaatctgttgaaagagagaaagtggaagaggcggtgaatagtgtcgcggagatggcattcccctctattcttgaatcattagtacaaggaattaaagggcggaaaacaaaaattaaatccgttatatcagaagggtttgaccctttcgatcttgaaaagcgaaaaacgacattggtttatcaacacagaatgcattctgaaatttcaaagttccccagagaacagtattacaaaagtacagatgctctcaaagaccttgaaatgccttttcacattgatatgtcaagaaactggacttacaaccgctatccatcccgcagtgtatgggttaatgttgacggcaaaacggaaagaggccgcaatataaatatacaggaagtggacattttaatggaacatctccatgaattaattaattatgcgaaaaataaccctcaccctggaaaaaaggaatgggagattgcgtgtcttaccttctatcgaggacaggaaaaccgtattcgggtaagattgcaggctttatgcaagcaggaaaataaaatttctaatttttcatccaaagatagcaatagtaaaacaataaaaataaagcttcatacagtagataaatttcagggacatgaagcggatattgtatttctgtcaatggtgttgacagatcgtgttggttttttggataatccaaatcggctgaatgtggctattatccgcgcaagatttcaattggttgtatgcgaaaaacacagaagattttttaaatcaatcggcttccgatgcttgaagagaattgcaataaaattacggtgtgataaagcatctcggccgatctga

SEQ ID NO: 73574 - protein, 279 aa, Unknown
  Obtained from environmental sample
  misc_feature (1)..(279): Xaa is any amino acid
MFPKSVEREKVEEAVNSVAEMAFPSILESLVQGIKGRKTKIKSVISEGFDPFDLEKRKTTLVYQHRMHSEISKFPREQYYKSTDALKDLEMPFHIDMSRNWTYNRYPSRSVWVNVDGKTERGRNINIQEVDILMEHLHELINYAKNNPHPGKKEWEIACLTFYRGQENRIRVRLQALCKQENKISNFSSKDSNSKTIKIKLHTVDKFQGHEADIVFLSMVLTDRVGFLDNPNRLNVAIIRARFQLVVCEKHRRFFKSIGFRCLKRIAIKLRCDKASRPI

SEQ ID NO: 73575 - DNA, 609 bp, Unknown
  Obtained from environmental sample
  misc_feature (1)..(609): n is a, c, g, or t
ttggatatttttagtgtgtttgtgaatgtcaatataagcactgccgaacagcctgctcccagcctttgggagcagtgcctttcggtatttttagaactaaaccccaaagaatccctcagtttaaagtggttatctgccataaagcatttgtctgctcaaaacggggttctaagcatagaaacgccaagcgaattagccagagaatggtttttggggcatttttacgaaccctttttgaaaattgcccaaggcatagacaaaagcataaagcaaatttccatatctgccccaaaagaagaaaacaaagttatagcaggggcaccagagttaaaaagccccgaaaaaattaaacacagccatttctgcaaaaaatacacccttaacaattttatagccggaacctccaacgaaatggcttttgaaagcgcaaaattcatcgctgctatgccaagagaacaagaaaactttctaatcatcagaggagctgccggtcttggcaaaacgcatctgctgcacgccattgggcgcgaggctgtggctaattgggcaaagaaagccgttttatgggattccgaccgctttttcaaagaaaacgcaggggcaatttag

SEQ ID NO: 73576 - protein, 202 aa, Unknown
  Obtained from environmental sample
  misc_feature (1)..(202): Xaa is any amino acid
MDIFSVFVNVNISTAEQPAPSLWEQCLSVFLELNPKESLSLKWLSAIKHLSAQNGVLSIETPSELAREWFLGHFYEPFLKIAQGIDKSIKQISISAPKEENKVIAGAPELKSPEKIKHSHFCKKYTLNNFIAGTSNEMAFESAKFIAAMPREQENFLIIRGAAGLGKTHLLHAIGREAVANWAKKAVLWDSDRFFKENAGAI

SEQ ID NO: 73577 - DNA, 885 bp, Unknown
  Obtained from environmental sample
  misc_feature (1)..(885): n is a, c, g, or t
atgatttcgacgaggcccgccagaccgccaaccgaaggcttcgggcagcgggttggtgagcggactgaggttcgcttccggcgcttgcggcacgtcggactcgccggtcaggattgtgtagagccgatcctccaaggcctcaaacgcggcggacttgcggtcgcgcggccgggggaggtcgatgaccacctcggcgaggatgtggccagggttcgaaccgagcacgatggctcggtcggcgagcagcacggactcttctacgttgtgcgtcacgatgcagatgcacttggttgggaagtccggctgcgcccacatggacacgatctcattacgcaggttctcgctggtcagcacgtcgagcgcggagaagggctcgtccatcatcagcacgtcgggttgcaacaccagcgcgcgggcaaagccgacgcgctgccgcatcccaccggacagctcgcgcggataggcgctctcgaagccgtcgaggccgatctggtcgatggccgccagcgcgcgcgcgtggcgctcggcctcgggcacgccctgggccttgagcccgagctccacgttgtcttgcaccgtcagccacggcatcagcgcgaaagactggaacaccatggcgacgccggggtttgcgccctccagtcgcgcgccgcgatagaggacctcgccgctggtgggagcgatcaaccccgccagacagcgcaagatggtcgacttgcccgaaccggacttgccgagcagcgcgacgatctcaccggagtacagcgtcaggttgatgtcgtcaagcacttgcagcgtagagccgtcggcagccgcgaaggacttatagacgtgcttggcctcgatcagggggatccggccctcggtggtgctcggcatttttag

SEQ ID NO: 73578 - protein, 294 aa, Unknown
  Obtained from environmental sample
  misc_feature (1)..(294): Xaa is any amino acid
MISTRPARPPTEGFGQRVGERTEVRFRRLRHVGLAGQDCVEPILQGLKRGGLAVARPGEVDDHLGEDVARVRTEHDGSVGEQHGLFYVVRHDADALGWEVRLRPHGHDLITQVLAGQHVERGEGLVHHQHVGLQHQRAGKADALPHPTGQLARIGALEAVEADLVDGRQRARVALGLGHALGLEPELHVVLHRQPRHQRERLEHHGDAGVCALQSRAAIEDLAAGGSDQPRQTAQDGRLARTGLAEQRDDLTGVQRQVDVVKHLQRRAVGSREGLIDVLGLDQGDPALGGARHF

SEQ ID NO: 73579 - DNA, 309 bp, Unknown
  Obtained from environmental sample
  misc_feature (1)..(309): n is a, c, g, or t
ttgcggtcgcgcggccgggggaggtcgatgaccacctcggcgaggatgtggccagggttcgaaccgagcacgatggctcggtcggcgagcagcacggactcttctacgttgtgcgtcacgatgcagatgcacttggttgggaagtccggctgcgcccacatggacacgatctcattacgcaggttctcgctggtcagcacgtcgagcgcggagaagggctcgtccatcatcagcacgtcgggttgcaacaccagcgcgcgggcaaagccgacgcgctgccgcatcccaccggacagctcgcgcggatag

SEQ ID NO: 73580 - protein, 102 aa, Unknown
  Obtained from environmental sample
  misc_feature (1)..(102): Xaa is any amino acid
MRSRGRGRSMTTSARMWPGFEPSTMARSASSTDSSTLCVTMQMHLVGKSGCAHMDTISLRRFSLVSTSSAEKGSSIISTSGCNTSARAKPTRCRIPPDSSRG

SEQ ID NO: 73581 - DNA, 768 bp, Unknown
  Obtained from environmental sample
  misc_feature (1)..(768): n is a, c, g, or t
atgacgtcgttgaaaaaattcttaacaatcgcgggaagtgattgctgcggcggcgcgggcgtgcaagccgatttgcgcgttgcggccctgcacggtctgctttcaatgagtgttatcaccgcgttgaccgcgcaaacacgaagcggagtgcggagtgttatattaacgcatccagaatttgtcgcggagcaattggacgcggtattcgccgaccgtacccctgacgcggtaaaaatcggtatgcttgggaatgaaaaaatcgccggtgttgtggcgaggaaactttatgaatataacgcggtgaatgttgttttggacactgtttttatgtcgtcaagcgggtatgagttattaagcggggaaggcattgcggttttgaaaaaaaaattgctgcccatatgttactgttacacgcccaatatccccgaagcggaaattttatccagtatgcggataaaaaataaaatggatatggaaaaatgcgcggtcaaactatcaagtgaatacgccgccggcatcgtgatcaccggcgggcatttggaaaatgagtgcgacgacttattgtttaccggtggcaaaatgacgtggtttaccggtgaaaagataaaatccgggaacacgcatgggacaggctgtgtgttttcatcgtgcctggcatgtaatctaggtttggggcgaagcctgacggagagcgtgaaaattgcgaaggattatgtcgcggcgcggatttataatgaaagaaatgaaggagatttatacggttattga

SEQ ID NO: 73582 - protein, 255 aa, Unknown
  Obtained from environmental sample
  SIGNAL (1)...(23)
  DOMAIN (14)...(245): Phosphomethylpyrimidine kinase
  misc_feature (1)..(255): Xaa is any amino acid
MTSLKKFLTIAGSDCCGGAGVQADLRVAALHGLLSMSVITALTAQTRSGVRSVILTHPEFVAEQLDAVFADRTPDAVKIGMLGNEKIAGVVARKLYEYNAVNVVLDTVFMSSSGYELLSGEGIAVLKKKLLPICYCYTPNIPEAEILSSMRIKNKMDMEKCAVKLSSEYAAGIVITGGHLENECDDLLFTGGKMTWFTGEKIKSGNTHGTGCVFSSCLACNLGLGRSLTESVKIAKDYVAARIYNERNEGDLYGY

SEQ ID NO: 73583 - DNA, 831 bp, Unknown
  Obtained from environmental sample
  misc_feature (1)..(831): n is a, c, g, or t
atgctgtgtattgtcggaacacagcacgccggcattgtgattgagataattaaagcgcggctcaaagaagacgaaggcaacatggcggaggctaaacccgtgtcgcttctcgcgaagtggctgccgtcacctaacacatcctcaaaagacaccgtcgccaaagcgcgggaaatcattaaactgctcggcatgagcgaagcccggtatcgaaaaacgctctccaaactgcgtaaatatatcgacattgtggaagttaaaatgtcgggtaatcaatggggcgaaatcaaatacgaggctgttccgtcacgggcgaaccttatttacaaaaacgctttcctgcgtaacgacgaggaaaggcgcaaggcatacctggcggcgctggagaagggcgaaaccaagataaacgcgtccgtgctttatccgcatgacatcgttcatatgtacggcggcgggagtattaacaatttacatgataaggacgccgttcttgaagaactgtggaaagcgctgcccgatattgtaaacgaaaacggcaatacgattgtggtcgccgacggaagcggcagcatgatgatgaaccgtatcggcaatactaatatacccgctttatccgccgccaacgcgcttgcgatatactttgccgaaagaagcggcggtcagttcaaggataagtacataactttcagcgagaaaccgcaattggttgatttcagcggatgctcctcgttacgcgagaagatagagcttgctttacggtataatgaggtagcgaacacaaacattgaagcggtcttcgatttaatactgacaaccgccgtaaaaagaatatga

SEQ ID NO: 73584 - protein, 276 aa, Unknown
  Obtained from environmental sample
  misc_feature (1)..(276): Xaa is any amino acid
MLCIVGTQHAGIVIEIIKARLKEDEGNMAEAKPVSLLAKWLPSPNTSSKDTVAKAREIIKLLGMSEARYRKTLSKLRKYIDIVEVKMSGNQWGEIKYEAVPSRANLIYKNAFLRNDEERRKAYLAALEKGETKINASVLYPHDIVHMYGGGSINNLHDKDAVLEELWKALPDIVNENGNTIVVADGSGSMMMNRIGNTNIPALSAANALAIYFAERSGGQFKDKYITFSEKPQLVDFSGCSSLREKIELALRYNEVANTNIEAVFDLILTTAVKRI

SEQ ID NO: 73585 - DNA, 822 bp, Unknown
  Obtained from environmental sample
  misc_feature (1)..(822): n is a, c, g, or t
atgcccaagatcaacgaatccgagcttcaaacccaaaaccgcgtcctgatgatgtttcagcgcgacatgggctacgcctgctacggcaacctgcgcgacagcataaacagcaacatcatggaggacaagctggcggcctggctgatggggcacggctacagcgaaagcctgtccgcaagggccatcaatgagctaaagggggcggctggcaatttgcagcagggcctgtacaaggccaaccaggacgtttactcgctcttgaaatatggcgcgaagatagccgagaacccaggcgagccgccacgggacgtgcatttcattgactggaaccattcgcacaacaacgagtttgccattgccgaggaagtgacgatcaagcacaacagtgaacgccgccccgaccttgtggtttacatcaacggcattgccgttgcggtgatcgagctaaaaaaggcaaccgtctctgtgtcccacggcattaggcagaatatctccaatgagcatttcaacaaaccctttttcaccaccatccaattcgtaatggccgggaacaacagcgagggcctgcgatatggcacgatagagacaaaaaaggaaaagtattacctagagtggaagaacgatgcttgcaacactgcggcgcagccccttgacgacgtctcgatagacataaacgaaagatgcgccctgctgcccgacaagctggactggcaactgttcagcatgtttcacaagcggcgcttcctagacatcatccacaactttatcgtgttcgacaaaggcatcaaaaaggtgtgccgccacaacaatatttcggcgtaa

SEQ ID NO: 73586 - protein, 273 aa, Unknown
  Obtained from environmental sample
  DOMAIN (5)...(199): Type I restriction enzyme R protein N terminus (HSDR_N)
  misc_feature (1)..(273): Xaa is any amino acid
MPKINESELQTQNRVLMMFQRDMGYACYGNLRDSINSNIMEDKLAAWLMGHGYSESLSARAINELKGAAGNLQQGLYKANQDVYSLLKYGAKIAENPGEPPRDVHFIDWNHSHNNEFAIAEEVTIKHNSERRPDLVVYINGIAVAVIELKKATVSVSHGIRQNISNEHFNKPFFTTIQFVMAGNNSEGLRYGTIETKKEKYYLEWKNDACNTAAQPLDDVSIDINERCALLPDKLDWQLFSMFHKRRFLDIIHNFIVFDKGIKKVCRHNNISA

SEQ ID NO: 73587 - DNA, 780 bp, Unknown
  Obtained from environmental sample
  misc_feature (1)..(780): n is a, c, g, or t
atgagccaggcaccttttgaaatagcggccaatgccggcgaaatcgaaaaagagccttccccggccccccttggcggccaagagttagcaagttcagagcggcctgagattgtttatcgtgaggctgatttgccggccattgttgagatggtcgaaaatggcctggtcgagtggaacaaagttgacgggggaaccctggtactacagcacgccggtgaagccgtccgaattgtgcccgggggacaggcccggccacggcgaggggtcaaagttacccccaaggctccggtgaagttcgctctcaacattccgtatctgcggaactatttgacgaaacgaataaaattcctcacccacgaccgccgaaaaggcggcgacggcttgaaagagatagcctgccccaaactggtggccgagacatttttaagccagaccggcgaatacaaacggctgccggttttgaacggcattctgacccaccccacgttgaaccttaagggggaactattggatcggccgggcttcgatgagaaaagcggccttttacttgatttcggggggcggggattcccttccattccggcctttctggaccgggccgcggccctcctggccctcaaagcgatacaggaactgttccaggaatttccgttcaagacgccggccgacgcctcagcggctctggccctttttctgaccgttctggttcggtggctgttggacacctgccccggtttcgcagtttcagcgaacgccaggggcacgggcaaacgcttctga

SEQ ID NO: 73588 - protein, 259 aa, Unknown
  Obtained from environmental sample
  misc_feature (1)..(259): Xaa is any amino acid
MSQAPFEIAANAGEIEKEPSPAPLGGQELASSERPEIVYREADLPAIVEMVENGLVEWNKVDGGTLVLQHAGEAVRIVPGGQARPRRGVKVTPKAPVKFALNIPYLRNYLTKRIKFLTHDRRKGGDGLKEIACPKLVAETFLSQTGEYKRLPVLNGILTHPTLNLKGELLDRPGFDEKSGLLLDFGGRGFPSIPAFLDRAAALLALKAIQELFQEFPFKTPADASAALALFLTVLVRWLLDTCPGFAVSANARGTGKRF

SEQ ID NO: 73589 - DNA, 924 bp, Unknown
  Obtained from environmental sample
  misc_feature (1)..(924): n is a, c, g, or t
atggcagttagtagctctagtaaaaaaatcancaatttatgcgcaaatgttctttctcaaaaacgtccagtattactttcggctcttatgatttgcttacatgaagttaagcaaaattctgacaattatataaatggtttccctaaccattatacaacttatcaacccacagaaataattaccaatatgcttgatactgtaaaaagggtgcttaaagtagagggtattcccgatgaaaaattgcaggcattgagcgcagagctggcatttttgacaatagacccaatattgaataatagcaatatattgagagatattttaattgaattggatgcaaacgttattccattatttaaaaaaaacaattttgcaactaattctaattacgatattatcggaaaattttatgaagaatttttgaaatacgcaggagtttcaaatgtaaaaaaaggcatagtactaactcaaagacacattgctactctttttacaaaacttattgatttaaaggacaatgataaaattgtggatatttgttgcggcacaggagcgttccttattgcaggaatgaatgcgttgattgctaaaatcggtagcagtaatcgttctgataaagacgaggctattaaaaaagtaaaagaaaaacaattacttggttttgaacaagatcccacaatgtacatttgtgcaatttcaaatatgttgtttcgtggcgatggtaaatcttcaatttttaattatgattcgataaaaagttcaaaaacgcaagaagaattaaatcgttttcaagcaactgttggttttatcaatccaccttacagcggaaaagaaagcaatgataacccaacaccaaaagaaattacatttttagtcaagttattagataactgctcaaggtacggtgtaatgatgccctcgcgataa

SEQ ID NO: 73590 - protein, 307 aa, Unknown
  Obtained from environmental sample
  misc_feature (1)..(307): Xaa is any amino acid
MAVSSSSKKIXNLCANVLSQKRPVLLSALMICLHEVKQNSDNYINGFPNHYTTYQPTEIITNMLDTVKRVLKVEGIPDEKLQALSAELAFLTIDPILNNSNILRDILIELDANVIPLFKKNNFATNSNYDIIGKFYEEFLKYAGVSNVKKGIVLTQRHIATLFTKLIDLKDNDKIVDICCGTGAFLIAGMNALIAKIGSSNRSDKDEAIKKVKEKQLLGFEQDPTMYICAISNMLFRGDGKSSIFNYDSIKSSKTQEELNRFQATVGFINPPYSGKESNDNPTPKEITFLVKLLDNCSRYGVMMPSR

SEQ ID NO: 73591 - DNA, 399 bp, Unknown
  Obtained from environmental sample
  misc_feature (1)..(399): n is a, c, g, or t
atggcatggactgacagttgcgaggaactgcaaggcatcaaaaatgacgttggcagccagttggcgttaatggaatgcaaaccgcgccataatacagttgatactccaactttgtattgggcgggtattccgggtaatgaagccgattttcctgccgaagaaagtttttacactttcatcgaacaggcgttgtgttttttcaccgagataatcacaaaccgtaacatgtttatacttgtacaatcaggcagtggaaaatcgtttttcaccaatcacatggtacgtcagtattacgagcagggggcgcatatcgtgctggttgatacaggtaattcatatcagggactttgcaacctcattaaccgcaaaacagaaagcaatcaatgttttgccctataa

SEQ ID NO: 73592 - protein, 132 aa, Unknown
  Obtained from environmental sample
  misc_feature (1)..(132): Xaa is any amino acid
MAWTDSCEELQGIKNDVGSQLALMECKPRHNTVDTPTLYWAGIPGNEADFPAEESFYTFIEQALCFFTEIITNRNMFILVQSGSGKSFFTNHMVRQYYEQGAHIVLVDTGNSYQGLCNLINRKTESNQCFAL

SEQ ID NO: 73593 - DNA, 903 bp, Unknown
  Obtained from environmental sample
  misc_feature (1)..(903): n is a, c, g, or t
atgacagatcggccgancgttgaggcattttatcatcaacagttttttatgccgcatcccgcgcttgaatcggaatatctgagcgaggtcgaaaaatatttttccgcgttcggcgccgtcgtttcgtataacggcctgcggtttgacgcgccgctgcttgcgatgcgcgccgctcggcagcgcaagagaccgttcctgcccgcatcccattacgatctgctctacggcgcgcgcgcgttctgggctgaaaattacgagaattgccggctcaaaactctggagcgcgaggtctgctccttcgcgcgggcaacggacgatattgacggcggaaggatcccggacatctatatccaatggctgcgtgacgggaacgccgcgccgctcgaacccgtattcgagcataaccgcgccgatctgatcgccctcctgcatctcgccgcgcatatggctgtcattaccgccgagacggacgcccaatcggattccgctccgggaaactgggcgccgccgaccacccaggcgcttatctggcttgccgaacgcgcccgcagagccggtaaagaagcgcgcgcgcgtattcttttgcagaaggcggcggagcgtaccggtccggaaaatatgcgtatccgcgcggcgctcctgcttacgcggatgctgcggaggaacggcgggcatcaaaatgcggcggaacttctggaggcactgcatactgatggcgtccgcaatgcgctgagcgtcattactcttgcatggatatatgagaggtatctccatgataacaagagagcgtatgcgctatacacggagtgccgggaaatgcttacgcatcatggcgcggacataccgcgctctctcggaaaacgctgcgagcgggcgctcgcgcgattgcgtccccggctttga

SEQ ID NO: 73594 - protein, 300 aa, Unknown
  Obtained from environmental sample
  misc_feature (1)..(300): Xaa is any amino acid
MTDRPXVEAFYHQQFFMPHPALESEYLSEVEKYFSAFGAVVSYNGLRFDAPLLAMRAARQRKRPFLPASHYDLLYGARAFWAENYENCRLKTLEREVCSFARATDDIDGGRIPDIYIQWLRDGNAAPLEPVFEHNRADLIALLHLAAHMAVITAETDAQSDSAPGNWAPPTTQALIWLAERARRAGKEARARILLQKAAERTGPENMRIRAALLLTRMLRRNGGHQNAAELLEALHTDGVRNALSVITLAWIYERYLHDNKRAYALYTECREMLTHHGADIPRSLGKRCERALARLRPRL

SEQ ID NO: 73595 - DNA, 819 bp, Unknown
  Obtained from environmental sample
  misc_feature (1)..(819): n is a, c, g, or t
atggatttgacgatttttgggttcaggcagttaaaaccggttgaaccgtcaaacgccaccgataaacgggtaacatggtcgtccagcgacccggacgtggtgtctgtttccagtgacggaataataaccgctctaaagtttacagacactgaaacatacacgggtcaggctgttataaccggcacaaccgctgacggcggttttaccgatacctgcgtcgtaacagtcaccatggatgcccaggagcatataaacgacattaagccccttaaagattcgtttgggggttttttcatgatgggcaatatcttcgatccgggcgatgtatccgccgaagagccgtatacgataaataaatcctggcttacctaccactataatatccttacccctcaaaaccaaatgaagcctcaatatatgagcggcaggaactcgaccactcccggtgtatatgacgaggccaacattgcgacagcgaaaagtatgatcgcggcggcccgcgccaacggcattaaagtccagggccactgcctgctctggcacagccagcttcccgcatggcagaacaacctccgtacaagcgctgactcccaagagcaggttctcgcttacatgagggagtatgtaacttatattgtaaatgaattcaaaggcactatttacgcgtgggacgtattgaacgaggtcttccccgacggcgtcgtcgccaccgataactggaaaaacgcgatgaggaccggcagcgaaggtaatccctggtacatgaagctgggcgcggattttgtttacgaagggtttctcgcccccccgcctggctga

SEQ ID NO: 73596 - protein, 272 aa, Unknown
  Obtained from environmental sample
  DOMAIN (5)...(74): Bacterial Ig-like domain (group 2)
  misc_feature (1)..(272): Xaa is any amino acid
MDLTIFGFRQLKPVEPSNATDKRVTWSSSDPDVVSVSSDGIITALKFTDTETYTGQAVITGTTADGGFTDTCVVTVTMDAQEHINDIKPLKDSFGGFFMMGNIFDPGDVSAEEPYTINKSWLTYHYNILTPQNQMKPQYMSGRNSTTPGVYDEANIATAKSMIAAARANGIKVQGHCLLWHSQLPAWQNNLRTSADSQEQVLAYMREYVTYIVNEFKGTIYAWDVLNEVFPDGVVATDNWKNAMRTGSEGNPWYMKLGADFVYEGFLAPPPG

SEQ ID NO: 73597 - DNA, 342 bp, Unknown
  Obtained from environmental sample
  misc_feature (1)..(342): n is a, c, g, or t
ttgtggtcacatattgaaaacactcccaagggcgtcaccatacaccgcgtggatgccggtattgatacgggagatattttgctgcagcgggaagtgccgattgatctggaaaaagatactctgcgcagctcccatgaaaaactgtcacgcgccatagaagagcttttcaccagccatgccgaggcactcttggtcaatgccattccagccgttatgcagagcggcgccggcagtttccattgcgccaaagataaatcgatgtttccgcagtttatcggtcggctggactttgatatacaactggtcgagattgtagataaattccgccagggaggaccgtaa

SEQ ID NO: 73598 - protein, 113 aa, Unknown
  Obtained from environmental sample
  misc_feature (1)..(113): Xaa is any amino acid
MWSHIENTPKGVTIHRVDAGIDTGDILLQREVPIDLEKDTLRSSHEKLSRAIEELFTSHAEALLVNAIPAVMQSGAGSFHCAKDKSMFPQFIGRLDFDIQLVEIVDKFRQGGP

SEQ ID NO: 73599 - DNA, 429 bp, Unknown
  Obtained from environmental sample
  misc_feature (1)..(429): n is a, c, g, or t
atgaaatctgccatggaactaataccttgggagtcaaagccgggctcatgctggattgtggctgaaatttccgccaaccacaaccaaagcctggagcgggccgaagccatcatccgggccgccgctgcggccggggcggatgcggtcaagcttcaaacttataccgcctataccatgaccataccctgcgaaaatgaatatttccgaatcaagggaaccttgtgggaaggccgaaccttgcacgagctttaccaggaagcttatacgccttgggaatggcacccgcgtctcatgcggctggcgaacgatctggggctcacctgtttttccacgccctttgattcgaccgccgtggactttctggaaagcctncangtgccctgccataaaagtggcctctttttgagtggtggacattcccccctctga

SEQ ID NO: 73600 - protein, 142 aa, Unknown
  Obtained from environmental sample
  DOMAIN (37)...(141): NeuB family
  misc_feature (1)..(142): Xaa is any amino acid
MKSAMELIPWESKPGSCWIVAEISANHNQSLERAEAIIRAAAAAGADAVKLQTYTAYTMTIPCENEYFRIKGTLWEGRTLHELYQEAYTPWEWHPRLMRLANDLGLTCFSTPFDSTAVDFLESLXVPCHKSGLFLSGGHSPL

SEQ ID NO: 73601 - DNA, 879 bp, Unknown
  Obtained from environmental sample
  misc_feature (1)..(879): n is a, c, g, or t
ttgggggcaaaccttatccactctcctgttttggatgttaacaccaaccctgacaatccggaaatagggccccgttcatattcgtcggatccggatgtagtcgctgcatacgcgctcaagtcattaaaggggtataatgatgccggtatagcgtgtaccgggaaacatttccccggcagaggggcgtccgacgctgacgcgcatttcggtctgccgacaattgatttatcaagagatgaaatgttcagcacccacctgaagccgttcaaggcgttaattgataacggcctgcaatgtatcatggcggcatttacggcatatccgcatttgggaggcgtcgatatgccggcggcggccagccgcgcaatagtaaccgatattttgaggggagagatggggtttaagggcgttgttaccaccgacaatatgcaaatgaaaggcttacttgacaaatacgaggttggagaagccgccgtccggtgtttattggccggatgcgattttattctgttcagaagcgaatcccccgccacgatttatgttatcgaaaaagttttagaggcggtaaaaaacggcagataccccgaaagtatgctcaatgaatcggtaaaacgcatactggccatgcggtatgatatggggctgcatattaacggcggaaaggttgacgcaagccgcgcaggagaactgtttaacgatgactttattgtaaaaaccgcgaatgacgcggcgctgctgtcaactaaaataataaaaaacaaggataacgtaattcccgttgacaaaaataaaaaagttctcctgatcgaacagattcaccattttcattccttaataatgatacgtatgtacacgccggtgttttgtgggaagaaatga

SEQ ID NO: 73602 - protein, 292 aa, Unknown
  Obtained from environmental sample
  DOMAIN (1)...(171): Glycosyl hydrolase family 3 N terminal domain
  misc_feature (1)..(292): Xaa is any amino acid
MGANLIHSPVLDVNTNPDNPEIGPRSYSSDPDVVAAYALKSLKGYNDAGIACTGKHFPGRGASDADAHFGLPTIDLSRDEMFSTHLKPFKALIDNGLQCIMAAFTAYPHLGGVDMPAAASRAIVTDILRGEMGFKGVVTTDNMQMKGLLDKYEVGEAAVRCLLAGCDFILFRSESPATIYVIEKVLEAVKNGRYPESMLNESVKRILAMRYDMGLHINGGKVDASRAGELFNDDFIVKTANDAALLSTKIIKNKDNVIPVDKNKKVLLIEQIHHFHSLIMIRMYTPVFCGKK

SEQ ID NO: 73603 - DNA, 300 bp, Unknown
  Obtained from environmental sample
  misc_feature (1)..(300): n is a, c, g, or t
atgaaaaagtttttctttaccctttttcttttattggttatcggcggcgttatttttatgattggctgggcccaatataaagttcctcccggttattatggtataataacctcaaaaacccacggaattgacccaaaaccggtaaaatcaggtgaattccgctggatatggtacaaattgataccttcaaatgtagaaatagccgtttttcgtcttgagccggtaaaacaaaacataaatttcaacagttccctgccttccggggatgtttatgcgtcttttgcggggcttagcggttaa

SEQ ID NO: 73604 - protein, 99 aa, Unknown
  Obtained from environmental sample
  SIGNAL (1)...(24)
  misc_feature (1)..(99): Xaa is any amino acid
MKKFFFTLFLLLVIGGVIFMIGWAQYKVPPGYYGIITSKTHGIDPKPVKSGEFRWIWYKLIPSNVEIAVFRLEPVKQNINFNSSLPSGDVYASFAGLSG

SEQ ID NO: 73605 - DNA, 996 bp, Unknown
  Obtained from environmental sample
  misc_feature (1)..(996): n is a, c, g, or t
ttgaagatcgatcccgaaaaatacgcttccattgtcggggatgacggcgtaggctggctccacgatttttaccggaatcccgatgtagccaaccacgcccaaaaacacgttattgaacatccgcgccttggaataccggcgatttttgtcgaggaggcgctgcgcggcctgtgcaagcctggcgctacctcattccccagccagtcggcgctggcttcgacctttaatccggagcaggcgtacaaaaccggccgggtaatcgcggtggaatcgcgcgcgacaggcgttcactgcgtgctcgcgccgaccatggatttaaccgttgatccccgctggggaagggttgaggaaagctacggcgaggacacgtttcttgccgcccaaatggcgaaggaaatggtgcggggaatgcagggcgagggcattgacaaaagcgacgcggtcatggccgagcccaagcattttgccgcccacggatcgccgtacgctgggcttaacggcgggcccgccatgacgaccggcaggcgcgccctgtacaatgcggctctgccggtttttgaagctgccatacgggaaggcggcgcgtataacgccatgtgctcgtataactcaatcgacggcattccctgcgccaacaacgaggagctgcttaccggcgtgctgcgcgatctctggggaatgaggggagtggtcatctgcgatttgggcagcgtcgaaaacacgttcagcatccaccggtcggtagccagccacaacgaagcagtcgccgcttcgtggaacgccggcgtcgatgtccagttctatgatttcaagcacgataaattcatttccatgatggaagaagaactgaagtcaggcgcattaaagcaaagcgccttcgagcgggcggtaaaaaccgtactgaaattaaagtttcttctcggcctctttgaaaatccgtatatgaagacgaaagcctattctccaaaatatccgccagcgactcggccgatctga

SEQ ID NO: 73606 - protein, 331 aa, Unknown
  Obtained from environmental sample
  DOMAIN (37)...(268): Glycosyl hydrolase family 3 N terminal domain
  misc_feature (1)..(331): Xaa is any amino acid
MKIDPEKYASIVGDDGVGWLHDFYRNPDVANHAQKHVIEHPRLGIPAIFVEEALRGLCKPGATSFPSQSALASTFNPEQAYKTGRVIAVESRATGVHCVLAPTMDLTVDPRWGRVEESYGEDTFLAAQMAKEMVRGMQGEGIDKSDAVMAEPKHFAAHGSPYAGLNGGPAMTTGRRALYNAALPVFEAAIREGGAYNAMCSYNSIDGIPCANNEELLTGVLRDLWGMRGVVICDLGSVENTFSIHRSVASHNEAVAASWNAGVDVQFYDFKHDKFISMMEEELKSGALKQSAFERAVKTVLKLKFLLGLFENPYMKTKAYSPKYPPATRPI

SEQ ID NO: 73607 - DNA, 324 bp, Unknown
  Obtained from environmental sample
  misc_feature (1)..(324): n is a, c, g, or t
atgattagaaggcttgacaaaaacggcgattgggtgtttggtaatggcaagggtgcttatataggcgatttggcggggctttgcctaaggcttgaaacgcagcttagggaatggactggggactgcttctttgctcttgcaaggggcatagactggcatttgatggataagagagaggctatagtaactaggcaggtcagaaactctataatgcgaaacagcgaagtcaaggcaattacaggaatgactatagaaaaaacggcaaaaagagaatggaagccgagaataagcatcgtaactgaatatggggaggctagtctatga

SEQ ID NO: 73608 - protein, 107 aa, Unknown
  Obtained from environmental sample
  misc_feature (1)..(107): Xaa is any amino acid
MIRRLDKNGDWVFGNGKGAYIGDLAGLCLRLETQLREWTGDCFFALARGIDWHLMDKREAIVTRQVRNSIMRNSEVKAITGMTIEKTAKREWKPRISIVTEYGEASL

SEQ ID NO: 73609 - DNA, 309 bp, Unknown
  Obtained from environmental sample
  misc_feature (1)..(309): n is a, c, g, or t
ttgcaaaatataatagacaagatcaacatagcctttgacggtaaatttgacgaaggagaccgtgtaatcgttgaggcgatttacaacaaaattataacttccgataacaaacagctaaaacgccaagccaaaaacaattcagtagaaatgtttacttcaagcatattccccaaaacctttgaagaaacagcaatggactgttacaacaaccagacagaagcctttaccaaactttttgaaaacaaacagttctttgaaactgtaatgaatgtattaggaaacgccctatacaatagtctaaggcagtaa

SEQ ID NO: 73610 - protein, 102 aa, Unknown
  Obtained from environmental sample
  misc_feature (1)..(102): Xaa is any amino acid
MQNIIDKINIAFDGKFDEGDRVIVEAIYNKIITSDNKQLKRQAKNNSVEMFTSSIFPKTFEETAMDCYNNQTEAFTKLFENKQFFETVMNVLGNALYNSLRQ

SEQ ID NO: 73611 - DNA, 681 bp, Unknown
  Obtained from environmental sample
  misc_feature (1)..(681): n is a, c, g, or t
ttgcccgcaactcataaaagcgtattatacaaatccattgacgcgcctaaccccttccaggaaggcggcgataaagcgtatgccgacctcttacaaaaccagattaatgagacagcctggtggcgccgcgtcgccgcgttctcgctgattttgtttatcatcaacttctgcttcttcattgcagctataaaacagcagaaaacagtccccgtcctcgttaatgtcatgccaacaggagaagcccaatacctgaacgaagtccgccagaacggagaattgcaaatccccgaagcggccatcaactaccaaatgcgcaagtttatcgccaatctgcggtccatctccaccgattaccaggtgttatacgacaacatcgacgattgctttaacatggttaccgcgaactatgcccctattatgcgtaaaatgattctggataattccccctttgatctggtcggaaaaacccgcagaaccgtatcaatcgaaagcgttctgcacgtcaccgggcgcagctaccagattaactggatcgaaaatacgctcgatacatcttcaaaccagaaaaccaccaaaatgagagcggtgataactatccggttgattactccaaccgatactaccattaaaaagaatcccctggggatttatatcgaaaattgcgagatgaccgaattatga

SEQ ID NO: 73612 - protein, 226 aa, Unknown
  Obtained from environmental sample
  DOMAIN (57)...(224): VirB8 protein
  misc_feature (1)..(226): Xaa is any amino acid
MPATHKSVLYKSIDAPNPFQEGGDKAYADLLQNQINETAWWRRVAAFSLILFIINFCFFIAAIKQQKTVPVLVNVMPTGEAQYLNEVRQNGELQIPEAAINYQMRKFIANLRSISTDYQVLYDNIDDCFNMVTANYAPIMRKMILDNSPFDLVGKTRRTVSIESVLHVTGRSYQINWIENTLDTSSNQKTTKMRAVITIRLITPTDTTIKKNPLGIYIENCEMTEL

SEQ ID NO: 73613 - DNA, 501 bp, Unknown
  Obtained from environmental sample
  misc_feature (1)..(501): n is a, c, g, or t
ttgaggctgggcacgcacggccgaggagtttgggaaatgaccgggatcactgaagaatacgccccccgcatcgtcgcccagccacatccatcgccaaccatgaccgccttggtcggcatcagaattaacctgaacgtcggagccgtgggcctgcccaccccaacgtaccaatggcagcattcaacagacaacggggccacttggacaaatatccctggggctacagagaaaacccattcatttacagcatacgcagcagacaaagggcggctatatagggcatcagtcacaaattcaaaggggactgccacaagcaaccctgtcgcgatagacctaaacccatacgacattgacggcatcttggggctggacgtctatgacctgctgaaattcatggccctatttggcagcacgaaagccgaggatattttgtatgcagatttcaatggcgacggcaagatcgatgatgccgaccttgcgctcattcttggcgcattttga

SEQ ID NO: 73614 - protein, 166 aa, Unknown
  Obtained from environmental sample
  misc_feature (1)..(166): Xaa is any amino acid
MRLGTHGRGVWEMTGITEEYAPRIVAQPHPSPTMTALVGIRINLNVGAVGLPTPTYQWQHSTDNGATWTNIPGATEKTHSFTAYAADKGRLYRASVTNSKGTATSNPVAIDLNPYDIDGILGLDVYDLLKFMALFGSTKAEDILYADFNGDGKIDDADLALILGAF

SEQ ID NO: 73615 - DNA, 468 bp, Unknown
  Obtained from environmental sample
  misc_feature (1)..(468): n is a, c, g, or t
ttgatgttgggggctgaaatgaaaacgcgattttatttgcctgttttccttggggcagccattgcggctgtttttttggcctgcggcggcagcaaaaaaaccccaattccagtagccagcgtagagctggacgtaaccacacaccagaacatctacgtgggccaaacgctgacatttacggctaccgttaagccatcgaatgcggacaacccaaccgtgtggtggagcagcagcaaccagtccatcgccacagtctcaggtagcggccaaaatggcagcataggcaccgtccgaggcgtggcccctggcacagctactataaccgccaatgcnggcgcaggcaagacggccacatgcgaagtcaccgttgtggttgagtcgcgcatactaaactaccaagacccctctggcgtaggctaccgattcaagttcataaagaacaaaacgctagcacaccgacccccttag

SEQ ID NO: 73616 - protein, 155 aa, Unknown
  Obtained from environmental sample
  SIGNAL (1)...(27)
  DOMAIN (37)...(121): Bacterial Ig-like domain (group 2)
  misc_feature (1)..(155): Xaa is any amino acid
MMLGAEMKTRFYLPVFLGAAIAAVFLACGGSKKTPIPVASVELDVTTHQNIYVGQTLTFTATVKPSNADNPTVWWSSSNQSIATVSGSGQNGSIGTVRGVAPGTATITANAGAGKTATCEVTVVVESRILNYQDPSGVGYRFKFIKNKTLAHRPP

SEQ ID NO: 73617 - DNA, 612 bp, Unknown
  Obtained from environmental sample
  misc_feature (1)..(612): n is a, c, g, or t
ttgacaattccatggcggcatgtatgtcgctctcgcgggccatacggcgactcttcagatgtaggcgcgctctctattcttgcccttaatgacggtcccttcttaactatggtagcgtttggcgcaaccgggatggccaatattcccgttatgtatctgatctccgcaattattccgctgatcctggggtttattcttggcaatttggatgaagatttcagaaagctcttttcaggcggcaacttccttattcccttctttgcgttcccgcttggagcggccctggatatcaaagccgtgttcaacgccggtgcctccggaatacttctgggccttatcagcactttcgtaaccggttttatatgctatttagcgacccggttttacggcaaaaagctctctgccgttggcgcggcagttggcacgacagcgggaaacgcggttgctaccccagcggctttagccgcggcggatccctcccttgcgggctatgtatcaggcgcaaccgcccagatagccgcggcagttatcataaccgcaatctgctgcccgctttttgtttccatgcttgccaaaatgcagaataaaaaacctaccgcggcagcggcctaa

SEQ ID NO: 73618 - protein, 203 aa, Unknown
  Obtained from environmental sample
  DOMAIN (1)...(195): 2-keto-3-deoxygluconate permease
  misc_feature (1)..(203): Xaa is any amino acid
MTIPWRHVCRSRGPYGDSSDVGALSILALNDGPFLTMVAFGATGMANIPVMYLISAIIPLILGFILGNLDEDFRKLFSGGNFLIPFFAFPLGAALDIKAVFNAGASGILLGLISTFVTGFICYLATRFYGKKLSAVGAAVGTTAGNAVATPAALAAADPSLAGYVSGATAQIAAAVIITAICCPLFVSMLAKMQNKKPTAAAA

SEQ ID NO: 73619 - DNA, 555 bp, Unknown
  Obtained from environmental sample
  misc_feature (1)..(555): n is a, c, g, or t
ttggacaaatccggcgttcgtgttgttgttgattttgcccatactcccgacggtcttgaaaaggttttggacaccgcaaaaagcgtgctaaatgtgcctcaaaaagtagggaaattatcgaaaaaaacagggaattcagaggttttaacagggaaattaataacaattttcggctgtggcgggaaccgcgacgtcatgaaacgcccaataatgggtaaaattgccgtggaaaaatctgatataaccattgtcacaagcgacaatccgcgccacgaacccccaatgtcaattctctatcaaattgaagccggcattaaaacggtcgacggtgttataaaatttgaaccaactgacaccgtgccaaatgaaaaatcctataccatgattgccgaccgccgtgccgcgacgcattttgcacttggcattgcgcgtgcgggggatatggtcgtaatttgcggcaaaggtgcggaacaaacccaagaaatcgacggtatatcgtatccgtataacgatgccaatattgtgagagaatactatcgaggtaaaaaatcttga

SEQ ID NO: 73620 - protein, 184 aa, Unknown
  Obtained from environmental sample
  DOMAIN (1)...(98): Mur ligase family, glutamate ligase domain
  misc_feature (1)..(184): Xaa is any amino acid
MDKSGVRVVVDFAHTPDGLEKVLDTAKSVLNVPQKVGKLSKKTGNSEVLTGKLITIFGCGGNRDVMKRPIMGKIAVEKSDITIVTSDNPRHEPPMSILYQIEAGIKTVDGVIKFEPTDTVPNEKSYTMIADRRAATHFALGIARAGDMVVICGKGAEQTQEIDGISYPYNDANIVREYYRGKKS

SEQ ID NO: 73621 - DNA, 465 bp, Unknown
  Obtained from environmental sample
  misc_feature (1)..(465): n is a, c, g, or t
atgacgaaaaggagtaaaaaaatgaaaaaaataataaatcgaatgaaattggaaatcaccgccgaaagtgtgaacgagggctttgcccgctcggtcgtcgcggcttttgcgtcgcaacttgacccgacgattgacgaaatcgccgatttaaaaaccgcggtttcggaagccgttacaaattgcatcgttcattccaatacggaacgcgtccttattgaatcttcaatttggaataacgcaaaagacaattcgcgcggtatatctgtaaaaatcaccgactttggcatgggaattgccaacattgaaaaggctcttgaaccattttataccaccaaacccgaacaagaacgcagcggtatgggctttacggtaatgcaatcttttatggatacattgcgggttattaatggcaaagattgcggcaccattgttgaaatgacaaaaacgtttggcatcggggggtga

SEQ ID NO: 73622 - protein, 154 aa, Unknown
  Obtained from environmental sample
  DOMAIN (45)...(151): Histidine kinase-, DNA gyrase B-, and HSP90-like ATPase
  misc_feature (1)..(154): Xaa is any amino acid
MTKRSKKMKKIINRMKLEITAESVNEGFARSVVAAFASQLDPTIDEIADLKTAVSEAVTNCIVHSNTERVLIESSIWNNAKDNSRGISVKITDFGMGIANIEKALEPFYTTKPEQERSGMGFTVMQSFMDTLRVINGKDCGTIVEMTKTFGIGG

SEQ ID NO: 73623 - DNA, 723 bp, Unknown
  Obtained from environmental sample
  misc_feature (1)..(723): n is a, c, g, or t
atggagaattgtcggacgttcatgaaagttgaagtggacggcaaggtattcgcaagggacaaaaacggcaattttcaacgtgtcctttacgagccggaagcggacagtttgggaattcataccctgaccgggcttattgattttatcagggccaatgtggacaagttggatttcaaaaagcatcttgccgttgttaaatccccaatagaggtgcttttagtatccgcgcttttcggggaaaaccgtgtccgtgatttaatcgttagcgtagacgttgacgaaaaaatgaggacattcgattttgggcgctacctcccgattgaagaattcatcataaacctgacttccctctttgaggaaacagccgaccgggaaaaggttatcaaattcgtttccagggttacgggcgggggaacttttacccttgcagatgacggcgtttcgcagaatgtcgaagtcaaaaacagcgtttccggcgcacttaccgccaacgaaacagcgccgaaaatcgtaaatctgcggccttaccgcacattccgtgacattgaccagccggaaagccaattccttctccgtgtaaaactcattgatgaaacccaaaaggttgttggggctgccctctttgaggccgatgggggacggtggagaaatacggctattaagggtattcaggaattcctggagaaaaaccttaccaaagacggaatcacggtgatcgcctaa

SEQ ID NO: 73624 - protein, 240 aa, Unknown
  Obtained from environmental sample
  misc_feature (1)..(240): Xaa is any amino acid
MENCRTFMKVEVDGKVFARDKNGNFQRVLYEPEADSLGIHTLTGLIDFIRANVDKLDFKKHLAVVKSPIEVLLVSALFGENRVRDLIVSVDVDEKMRTFDFGRYLPIEEFIINLTSLFEETADREKVIKFVSRVTGGGTFTLADDGVSQNVEVKNSVSGALTANETAPKIVNLRPYRTFRDIDQPESQFLLRVKLIDETQKVVGAALFEADGGRWRNTAIKGIQEFLEKNLTKDGITVIA

SEQ ID NO: 73625 - DNA, 906 bp, Unknown
  Obtained from environmental sample
  misc_feature (1)..(906): n is a, c, g, or t
atgtcccacatacatgggcccgactttccgggcggcggcctcatgctcggcaccgaaggggtcatggatgcataccggacgggccgtggaaggtgcctcgtccgcgccaagtcccacatagaaactgtcagggtaaaaaacaaaggcgaagtcgagcagctagtgttcaccgagctgccctaccaagtgaacaaggcgaacctgacagaaaaaatcgccgacctagtgagcgaaaaaaagctggagggcatcgcagacctgcgggacgaaagcgaccgcgagggcatgcgcctagtagtggagctgaaaaaaaatgagccgtccgacatagtgctgaaccagctattccaccagactcaactgcagaacagcttttcaataaccatgctctgcatcgttaatgggcagcccagaatatgcacgttaaaagaggtgctgtccgaatttttgggcttccgccgcgaggtggtcacaaggcggacgatgttccagctgcgaaaggcagaggagcgccaccacatactgctgggcctcaagatcgccctcgacaacttggatgccgtgatcaaactgatccgcgcctcaaaaacgccagaggacgctaagtcggggcttacgtccaaattcggccttagcgacaaacaggctgcggccatcttggacatgcgcctgcagcgcctgacggggctggagcgggaaaagattttggaagagctggctgcgatagaggcggagatagcgcgcctaaaggccatactcagcgatgatgcgttgcttatgtccgtcatacgcggagagatacaaagcatggcagaacagttcggcaaccccaggaggacagagatcgttggcatcagcggcgaaataaaaatggaggacgtggtacccgagacccactcgccataa

SEQ ID NO: 73626 - protein, 301 aa, Unknown
  Obtained from environmental sample
  DOMAIN (1)...(275): DNA gyrase/topoisomerase IV, subunit A
  misc_feature (1)..(301): Xaa is any amino acid
MSHIHGPDFPGGGLMLGTEGVMDAYRTGRGRCLVRAKSHIETVRVKNKGEVEQLVFTELPYQVNKANLTEKIADLVSEKKLEGIADLRDESDREGMRLVVELKKNEPSDIVLNQLFHQTQLQNSFSITMLCIVNGQPRICTLKEVLSEFLGFRREVVTRRTMFQLRKAEERHHILLGLKIALDNLDAVIKLIRASKTPEDAKSGLTSKFGLSDKQAAAILDMRLQRLTGLEREKILEELAAIEAEIARLKAILSDDALLMSVIRGEIQSMAEQFGNPRRTEIVGISGEIKMEDVVPETHSP

SEQ ID NO: 73627 - DNA, 708 bp, Unknown
  Obtained from environmental sample
  misc_feature (1)..(708): n is a, c, g, or t
ttggcggccccagcgaataaacggaggtatttaagtatgttgacaatttacctcacggcccaggaaaaatttgattgggatgaggacgaaaactcgaaagtcatagtcctaaaccccaaggaagagcgaacgctccaggaattttacgaggccaaccaatattactcgaattggtttttcctgggtcagggcgccgttttcggccccgggctggaagcccaggacgggcatttgacggaactgagcactttcagttctgtcgcccgacaattggaatatctgccaactttcagcaagttgcggcgcttgaaactgaacatggaaaataaaggcgatattgcccctctcagccaattgaccgaactggccgaattagagattcatggcgatagagtccaggatctatcccctctggccgccttaaaagaattacagcgtttggttgtatccagcgacatgatggacgaccttacccccctggcgaacttgaattccttgaaatatcttcgcctgcacggtgaccgcctgaacgatcttaaccccttgggcggcttgaccggcctggttaagctgtctttggagtttgagcagcccttaatggatttaggaccattggccggcttgcactcccttgagagccctcacttggcggaaagcagggtccgagatctgaggcccctggccggcctctccgccttgacagcttga

SEQ ID NO: 73628 - protein, 235 aa, Unknown
  Obtained from environmental sample
  misc_feature (1)..(235): Xaa is any amino acid
MAAPANKRRYLSMLTIYLTAQEKFDWDEDENSKVIVLNPKEERTLQEFYEANQYYSNWFFLGQGAVFGPGLEAQDGHLTELSTFSSVARQLEYLPTFSKLRRLKLNMENKGDIAPLSQLTELAELEIHGDRVQDLSPLAALKELQRLVVSSDMMDDLTPLANLNSLKYLRLHGDRLNDLNPLGGLTGLVKLSLEFEQPLMDLGPLAGLHSLESPHLAESRVRDLRPLAGLSALTA

SEQ ID NO: 73629 - DNA, 612 bp, Unknown
  Obtained from environmental sample
  misc_feature (1)..(612): n is a, c, g, or t
atgcgcgaaggtcatatcatcatagccgaggccaaagaaatagcggttctccaggaattctacgaaaccaacaaactggatgaagaatggatttttctgggccgccaggccatccacgcgcccggcgtgactgcccggggtggacaaattaccgagttgtcggttaatggccgaataaccaacctggaacctttgaccgccctccccgccttgcaagaactggaaatggagcatggcgtaatcagcgatctggggctcttgggcaagttgaccaacctgaccagattggggctccactcaaaccatgtccgtgacctttcgcccctggcgggtttgaggcgtttgaccagtttgggtttggacgggaattggatagaagaccttagccctttagccaatttaaccgccttgacttccctctgtttgaacggcaacgtgattagtgacctggcccccttgaaaaatctggccggcctaacctatttggggcttgattataactgtttggctgatttggagcccctggcccacctggtaacctggaaagtttacaattggaaaataatagctgtcttattgatctggccccgctggttcgcctgcctcgcttga

SEQ ID NO: 73630 - protein, 203 aa, Unknown
  Obtained from environmental sample
  misc_feature (1)..(203): Xaa is any amino acid
MREGHIIIAEAKEIAVLQEFYETNKLDEEWIFLGRQAIHAPGVTARGGQITELSVNGRITNLEPLTALPALQELEMEHGVISDLGLLGKLTNLTRLGLHSNHVRDLSPLAGLRRLTSLGLDGNWIEDLSPLANLTALTSLCLNGNVISDLAPLKNLAGLTYLGLDYNCLADLEPLAHLVTWKVYNWKIIAVLLIWPRWFACLA

SEQ ID NO: 73631 - DNA, 747 bp, Unknown
  Obtained from environmental sample
  misc_feature (1)..(747): n is a, c, g, or t
atgggaacgctcacacttggcaagaagataccctcaacggcggccaaatccggcgcggtcgcggtagaggtgataaaaaagcgccgcgcgcgcacgcccgaagaggccgcgctggacggggccgctcgcccgaacgtccaggcggacaagcttaaaaccatactcgaaaaggccaaggcgcgcgaggccgtagcgaaagagggcgcaagggcgctccgcgccgcggaagaggcccgcctggccgcgatgggagacgcgcgcccaacgcccgcggatagcgcgagggccgcgccaacgccctcggaatccgctccgtcctccgcccgcaaaaaacgcgcccccgcgcgcggcgggggtcaggactatgacgaatcctcggagcgcggcaaggggaaaaagtccgccggccgcggcaaaatcaacttctccgacatcgtggtttccgcgtccgacatggactacgaggacgaggaccgctcgaccgaggtttcgcgctcgcttgaatccgcgatggaattcgtgggcacgcacgcgcaccgccgctcggtcgcctcgataaagcgccagcgcgagaagaactaccgcaaattcgtggagcgcacttccagccagggcgcgggcgcggcggcggctgcaaagactgcgcgagaggtccgcctgcccgaaacaatctcggtcaaggagcttgcaatccgcatggcggaaaaatcctcggacgtgataaaggccatgatgaagctcggataa

SEQ ID NO: 73632 - protein, 248 aa, Unknown
  Obtained from environmental sample
  misc_feature (1)..(248): Xaa is any amino acid
MGTLTLGKKIPSTAAKSGAVAVEVIKKRRARTPEEAALDGAARPNVQADKLKTILEKAKAREAVAKEGARALRAAEEARLAAMGDARPTPADSARAAPTPSESAPSSARKKRAPARGGGQDYDESSERGKGKKSAGRGKINFSDIVVSASDMDYEDEDRSTEVSRSLESAMEFVGTHAHRRSVASIKRQREKNYRKFVERTSSQGAGAAAAAKTAREVRLPETISVKELAIRMAEKSSDVIKAMMKLG

SEQ ID NO: 73633 - DNA, 864 bp, Unknown
  Obtained from environmental sample
  misc_feature (1)..(864): n is a, c, g, or t
atgattttccaggcgatcatcaatggtatacttttcggggctgtctacgcgatgataggaatcggcttttccctggtatggggggtcatgaaaattgttaatctggcccatggttccttcattatgataggagcctatatcgcgtttacccttttcaaggcgtatggcctggacccctttttagcggtgcctatagtcatggccgtcctgtttattgtggcatactgtattcagcgcttgctgatcaacaggattgtcacggggccttcctttataacactcacctttaccttcgggctgcagattcttgtcgcgaacatttgcctgcttatatggaaggcggatctgcgcagcgccaagctcagctattcggccgactcgttttttgaaaacggtaccattgtcattccgctgattcgcttcgggattttcgtatcggcaattgttctgacggttctgttctatttatttatgcgcaaaaccaaggtgggcattgccataaatgccacggcgctgaattgcgagggagcccggacagtgggggtcgatgttggcaatatatatgcaataacgtttgcgctgagcgcggcgttggccggggcggcaggggctctgatgctgcccattaccagcatgaatccgtttttcgggggaaacatcattaacaaggcctttgttatctccgttctgggcggactgggcagtaccgcgggtgccctggtcggcggcatgaccctcagcctcgcggaaaccctgggcacggtatggcttccctcggcggcgcaggaacttatcgggtttgtattttttatcctggttctggtatttcggccccagggcttgttggggagaaagttttattaa

SEQ ID NO: 73634 - protein, 287 aa, Unknown
  Obtained from environmental sample
  DOMAIN (5)...(274): Branched-chain amino acid transport system / permease component
  misc_feature (1)..(287): Xaa is any amino acid
MIFQAIINGILFGAVYAMIGIGFSLVWGVMKIVNLAHGSFIMIGAYIAFTLFKAYGLDPFLAVPIVMAVLFIVAYCIQRLLINRIVTGPSFITLTFTFGLQILVANICLLIWKADLRSAKLSYSADSFFENGTIVIPLIRFGIFVSAIVLTVLFYLFMRKTKVGIAINATALNCEGARTVGVDVGNIYAITFALSAALAGAAGALMLPITSMNPFFGGNIINKAFVISVLGGLGSTAGALVGGMTLSLAETLGTVWLPSAAQELIGFVFFILVLVFRPQGLLGRKFY

SEQ ID NO: 73635 - DNA, 765 bp, Unknown
  Obtained from environmental sample
  misc_feature (1)..(765): n is a, c, g, or t
gtgagtgacgttattctgcgcggaaccggcgtaacaaaacaattcggcgccctgaaagcccttaccgacgttgactttaccgtacaaaagggcgaagtcctgggtataattgggccgaatggcgcgggcaagacaacctttctttcgataattaacggaacccttcccctgacccggggtgaaatctattttaaggatgaaaaaatttcgggccttaagccgtatcaaatcgccgagcgggggatatctcgcacttttcaggtagtaaaaccgttccccggcatgactgtactggaaaatgtatccattggcgccctgttcggaaaagacaaaatcaaaaacgctcacttggcccgggaaaaaacgcgctcaattctgggcagggtaaacctggacagcaaggcggatttaccggtagaaagccttaacatttccgaacgcaagcgccttgaagtcgcccgggctttggccatggatccggaagttctcctcctggacgaagtcatggcgggcctgaaccaggcggaaattgactcagtcatggaacttatacttcagcttaaccggcaggaaggccggacaattctggttatagaacatgtaatgaaagccattatgggcctgtcccaccgagtgatagtgctgcaccacggcgaaaaaattaccgaaggttcgccggaaactgtcacctccgacgagcgtgtaatttccgcctatctgggggaacgttacgcgaaaacaaggagcaagaatgctcagggttga

SEQ ID NO: 73636 - protein, 254 aa, Unknown
  Obtained from environmental sample
  DOMAIN (31)...(218): ABC transporter
  misc_feature (1)..(254): Xaa is any amino acid
MSDVILRGTGVTKQFGALKALTDVDFTVQKGEVLGIIGPNGAGKTTFLSIINGTLPLTRGEIYFKDEKISGLKPYQIAERGISRTFQVVKPFPGMTVLENVSIGALFGKDKIKNAHLAREKTRSILGRVNLDSKADLPVESLNISERKRLEVARALAMDPEVLLLDEVMAGLNQAEIDSVMELILQLNRQEGRTILVIEHVMKAIMGLSHRVIVLHHGEKITEGSPETVTSDERVISAYLGERYAKTRSKNAQG

SEQ ID NO: 73637 - DNA, 903 bp, Unknown
  Obtained from environmental sample
  misc_feature (1)..(903): n is a, c, g, or t
ttggaaaattatataaaaggaatacttgctacccatactgttatatttatgggatattcctttaatgacattgatattaagcatattattaagtgggtgcaaaacagatcaacataccgtcctccaatgtatattacatctttcgaagaaaacagaagccagataaagtatcttgaaaattatcgtattaagaccttatttcttgaaatggagaaaaccgaattatctgataaaaactattcgaaaaccgaaatattatatcattttttaaatttacttaaccaaaagaatattatatatcatccatcatctgatgatgaaattattaatttcatatacaataagataattatatttaatgagttacaaagtattttatttagccaattagaatcatcgctttctaattgtaaaattgaatttcaaaatggaattcctctattaatgttctttagtaaccctgcatttaatgattataacaaagaaattcgggaagtttataaaaaatttattggcattttaaataaatgttgtaaagatggaaatttttcaagcataaaacaacaagacaaattttcaggtattctggaaatattttttaaaacgggtataaaaggcatcatgttatctgacatggttaataacaattattatgttaatttaaccgaatgtttccatgattttaaatttgaatttgcagaaaaaataatcaattttgattttactgacaaacaggaagataagtcaaattccacgcataaaatgcttgaaaaaacttttcttctttatcaacaggaaaaatatgaagaaatattgcctatactggataatataatttctaattgccgttcaaataaattatggacattattgtttatttcaatgctgaataaaaatatataa

SEQ ID NO: 73638 - protein, 300 aa, Unknown
  Obtained from environmental sample
  misc_feature (1)..(300): Xaa is any amino acid
MENYIKGILATHTVIFMGYSFNDIDIKHIIKWVQNRSTYRPPMYITSFEENRSQIKYLENYRIKTLFLEMEKTELSDKNYSKTEILYHFLNLLNQKNIIYHPSSDDEIINFIYNKIIIFNELQSILFSQLESSLSNCKIEFQNGIPLLMFFSNPAFNDYNKEIREVYKKFIGILNKCCKDGNFSSIKQQDKFSGILEIFFKTGIKGIMLSDMVNNNYYVNLTECFHDFKFEFAEKIINFDFTDKQEDKSNSTHKMLEKTFLLYQQEKYEEILPILDNIISNCRSNKLWTLLFISMLNKNI

SEQ ID NO: 73639 - DNA, 426 bp, Unknown
  Obtained from environmental sample
  misc_feature (1)..(426): n is a, c, g, or t
gtgggtggaacacaggttgttgacccaaaatctttggaaggctacagccgctacaatgcagaggaaatagaaaaaatcctgcaaatgggcgtaaaatcttccagtttggatgccccaataggcgaagacggcgacaccagcctcataagcataaccccagacccttcggacgatgcttcaagcgtatttttccaaaaaagcaaaaaaggtttgataaaaaagctactttctgagtatttaaccccaacggagttaaaggtaatagacctattttacggttttgactccggtgcaaaaaacaatttgcaggaaattgcccaaaccacaggcttaacaaaggaaaaagtccgtcaatatagggaatctgctatggcaaagctccgtacggcaaaagatttgaaagatattttgaccgaggcatcataa

SEQ ID NO: 73640 - protein, 141 aa, Unknown
  Obtained from environmental sample
  DOMAIN (76)...(129): Sigma-70, region 4
  misc_feature (1)..(141): Xaa is any amino acid
MGGTQVVDPKSLEGYSRYNAEEIEKILQMGVKSSSLDAPIGEDGDTSLISITPDPSDDASSVFFQKSKKGLIKKLLSEYLTPTELKVIDLFYGFDSGAKNNLQEIAQTTGLTKEKVRQYRESAMAKLRTAKDLKDILTEAS

SEQ ID NO: 73641 - DNA, 447 bp, Unknown
  Obtained from environmental sample
  misc_feature (1)..(447): n is a, c, g, or t
atgaaaatgaattttcgggaagtattccccatgaggggagtcttcaccatgcgggtttaccggaaggggaaacttattgaggtgtatacagacaacaatcttttagtcaacggagccaaagatgccgccacacatcttctggctggagactcggaaggaaagcacatctcaaaaataggttttgggactagcggcaatattccaacgccagatgatacggcgatcagttcgccttttgtgaaaaacatatctgctgtcggatatcccgcattgggtcacgcagagtttagctggaggcttgcggaatcggaagcgaacggcaagctcattatggagttcggtcttttctgcgaagacggaacgctttttgcccggaaggttcgggagaaagcgataccgaaggaatcggacattgcccttgaaggggaatggatcattatattctaa

SEQ ID NO: 73642 - protein, 148 aa, Unknown
  Obtained from environmental sample
  misc_feature (1)..(148): Xaa is any amino acid
MKMNFREVFPMRGVFTMRVYRKGKLIEVYTDNNLLVNGAKDAATHLLAGDSEGKHISKIGFGTSGNIPTPDDTAISSPFVKNISAVGYPALGHAEFSWRLAESEANGKLIMEFGLFCEDGTLFARKVREKAIPKESDIALEGEWIIIF

SEQ ID NO: 73643 - DNA, 342 bp, Unknown
  Obtained from environmental sample
  misc_feature (1)..(342): n is a, c, g, or t
atgcagcaccctgaacctctgcaaatgcgcatcggcagcaaacggctgtttgtgggcttaatctgcggcgcttccacagtactctgcctgggactgatcttcggctggggcattccctacatcggcttcggcaacatccaccccgccctgccctatatcaccggcagcctgcttattctcaccgtgaccctgatcgcttggagcgccttcagtctggtgctgcagatcctcaccggcaaaaatcttttcggcggcagaacccgcgccctggccgccaaaatctttctccccatcagcgaagcgctggggcgcatcctgggcatctctcgtgccgaattctga

SEQ ID NO: 73644 - protein, 113 aa, Unknown
  Obtained from environmental sample
  misc_feature (1)..(113): Xaa is any amino acid
MQHPEPLQMRIGSKRLFVGLICGASTVLCLGLIFGWGIPYIGFGNIHPALPYITGSLLILTVTLIAWSAFSLVLQILTGKNLFGGRTRALAAKIFLPISEALGRILGISRAEF

SEQ ID NO: 73645 - DNA, 525 bp, Unknown
  Obtained from environmental sample
  misc_feature (1)..(525): n is a, c, g, or t
gtgatctacgaagcccaggcgctgctcgccccggcggccaacgcgctcctcaaatccctggaagaaccgggaaccggcacggtcttcgtgctgaccgccccgcagcgggagaggctcctgcctaccctggtttcccgctcctggacgctgaccctgccctggcccaaaacccgccaggatgaagacgaccggcttccggaatggctttcagccttggaagctttcatgcggaccggccaaggctggatggggcgcactgcttccaggggggctatggacgaacggctggccggggagctgaccctcgtggtccagcgttccctggcgcaagcgatgaaaggcgaggaaacacccctggagaccctgcgcggcctgagcccgaaaaacctcaggcttttatacgaagccctggccgaatgccaggaaagtctcaggtacagggtaaatcccagcctggtggcggattggctggcgacccgcctctttcttatgtacgcccaggacagggaacatgcagcaccctga

SEQ ID NO: 73646 - protein, 174 aa, Unknown
  Obtained from environmental sample
  misc_feature (1)..(174): Xaa is any amino acid
MIYEAQALLAPAANALLKSLEEPGTGTVFVLTAPQRERLLPTLVSRSWTLTLPWPKTRQDEDDRLPEWLSALEAFMRTGQGWMGRTASRGAMDERLAGELTLVVQRSLAQAMKGEETPLETLRGLSPKNLRLLYEALAECQESLRYRVNPSLVADWLATRLFLMYAQDREHAAP

SEQ ID NO: 73647 - DNA, 699 bp, Unknown
  Obtained from environmental sample
  misc_feature (1)..(699): n is a, c, g, or t
gtgcggttcaaaaaagaagtggatacattaattgtaaaagaagtaaaaaaagacgaagcgatttttcaaacgttacggaaatttattgaagaatcaaaaaccatctgcttcgaaggaaacggctacagttccgaatgggcaaccgaagccgccaagcgcggattgcgcagtgtaaaaaatgcacccgaagcattcaaggcattcttagagcctgcatcggtcaagctttttacgggcaatggcgtgctcaccgaaaacgaaataaaaggtcgttatgaaatttttaatgaaatttatgtaaagaaaattcagattgaggcgcgggtagcgggcgatttggctatcaaccacattatcccgacggccattcgctaccaaaacagtttgattgaaaacgtgcgtggattaaaggaaattctgagtaccgaagaatacaacgaattggctgcgccgcaactgcaatccattaagaaaataggcggttacatcaaaaacatacgcgaactggtgagcgctatggtggccgaacgtaagaaagcaaacgaaataaacgatttcccaaaacgcgccaaaatctacaccgacaacgtattgccctacatggcagacatacgcttcaacgccgacaagctcgaacgtattattgacgacgaaatgtggccgttgcctaagtaccgcgagttgatgtttatacggtag

SEQ ID NO: 73648 - protein, 232 aa, Unknown
  Obtained from environmental sample
  misc_feature (1)..(232): Xaa is any amino acid
MRFKKEVDTLIVKEVKKDEAIFQTLRKFIEESKTICFEGNGYSSEWATEAAKRGLRSVKNAPEAFKAFLEPASVKLFTGNGVLTENEIKGRYEIFNEIYVKKIQIEARVAGDLAINHIIPTAIRYQNSLIENVRGLKEILSTEEYNELAAPQLQSIKKIGGYIKNIRELVSAMVAERKKANEINDFPKRAKIYTDNVLPYMADIRFNADKLERIIDDEMWPLPKYRELMFIR

SEQ ID NO: 73649 - DNA, 801 bp, Unknown
  Obtained from environmental sample
  misc_feature (1)..(801): n is a, c, g, or t
atgcaccagaattcaaataacaataccactacttggcttgcgcaagaaaaggattttgtgtttcagggtgattttccgcttgagaacggagaaattttgccagaacttcgcattcgctacgaaacttatggggattttaaatctggcgcagctcatattgtgtggatttgcacccctctaacaatggatgcccacgcagcgggattgcaaagagaagatgacccaaaatcgctgggctggtgggacgacctcataggtcctggcaaacccataaataccgatatattttttgtggtttgtagcaatatactaggcggctgcaagggaaccacaggtccctcttccatagacccgcgcacaggaaagccttatggctcaaaattcccacgcataaccataacagatatggtgaatgctcaaaaaaaactcgcagactatttgaacattaaaaaaatctttgccgttataggcggctcaatgggaggttttcaggcatttgagtgggcacttcaatacccagattttgtggaaagatgtgccgttatagccagcgggacaaaactctcctctcaagctcttgcctttgaaatagtgggtcgccacattgttttagacgatgccgcanaggggcttgccaatgccagaaaaatggcgcacatcacatacctctctgccgagtccatgaaaaaccgttttgatgcagcagagcttatgccaagcgaccccgaaaaattttacacaggtttttcccttgaaaattatttgaacaaacaaagtggaagggttgttgaaacgctttga

SEQ ID NO: 73650 - protein, 266 aa, Unknown
  Obtained from environmental sample
  misc_feature (1)..(266): Xaa is any amino acid
MHQNSNNNTTTWLAQEKDFVFQGDFPLENGEILPELRIRYETYGDFKSGAAHIVWICTPLTMDAHAAGLQREDDPKSLGWWDDLIGPGKPINTDIFFVVCSNILGGCKGTTGPSSIDPRTGKPYGSKFPRITITDMVNAQKKLADYLNIKKIFAVIGGSMGGFQAFEWALQYPDFVERCAVIASGTKLSSQALAFEIVGRHIVLDDAAXGLANARKMAHITYLSAESMKNRFDAAELMPSDPEKFYTGFSLENYLNKQSGRVVETL

SEQ ID NO: 73651 - DNA, 723 bp, Unknown
  Obtained from environmental sample
  misc_feature (1)..(723): n is a, c, g, or t
ttgcatccacaaaaatgtaaacgaccgattgcggctggcatcatttctgtgaagactgcttacgttatgatggctatttgtctaatgatgtctttagggattctcatcattttctttgacggaaatgcgcgttatacgataatgacgttaattctatcttattacgtaattaattttgcatattgtgttaaactaaaacaatacgccattatagacatagtgattatttctattggatttgcaattcgagtttttgttggtgggactgcttctggtatcgtttgttcagagtggggtattataatgacttttttacttgcactattcttagttttaggtaagaggcgcgatgatgtggttttgtacatgaatataggtatttcgcaccgccaaagtaccgatatatataacttgacgtttgtgaatcaagtaatgactgtcgtagcaaccattgtcatagttgcttatgttatgtgcacactttcgccggatgtggttgagcgatttaacagcaagtatctttatctaacgacaatatttgtgttgatggcgatgtttagatatttgcagattactattgtagatgcgaaaagtggtagtcctacaaaaattttattgcatgaccggtttatacaaggttgtattgtcgggtgggtagtgatgttttttataatcatttatttagaaaaggttattacgatattcaggggggttgttttatga

SEQ ID NO: 73652 - protein, 240 aa, Unknown
  Obtained from environmental sample
  misc_feature (1)..(240): Xaa is any amino acid
MHPQKCKRPIAAGIISVKTAYVMMAICLMMSLGILIIFFDGNARYTIMTLILSYYVINFAYCVKLKQYAIIDIVIISIGFAIRVFVGGTASGIVCSEWGIIMTFLLALFLVLGKRRDDVVLYMNIGISHRQSTDIYNLTFVNQVMTVVATIVIVAYVMCTLSPDVVERFNSKYLYLTTIFVLMAMFRYLQITIVDAKSGSPTKILLHDRFIQGCIVGWVVMFFIIIYLEKVITIFRGVVL

SEQ ID NO: 73653 - DNA, 717 bp, Unknown
  Obtained from environmental sample
  misc_feature (1)..(717): n is a, c, g, or t
atgaacggcggcaatattcatctatcccatatttcaaagagctttcccggcgtgaaagctcttgacgacgtatcgctcaccttgaacaagggcgaaactcacgcgattatgggtgaaaacggcgcgggtaaatcgactctcatgaagattctctccggcatttatcacgccgacaagggcgagattgaaattgacgggcgccgtgttcacatttcaaacccgcttgacgcgaaaaagctggggatttccattatccaccaagaacttacgccaataccggatatgacggttgccgaaaatatatacctccgcagggaaccgatcaataagctgcgctttatcgattggcggaggcttcataaaatgaccgcggaattgtttgaaaaaacgggaattgagggcatcgacccaaaatcgtacatgagggagctgagtgttgccaaaacacagcttgtcgaaatcgcgaaggcggcttcgttcgacgcgcaatatatcatcatggacgagccgacaagcgcgataagcgagcgcgaagtagagaacctgtttaaactcatcaaaaatttttgtgaaaaaaatattggcgtgatctatatatcgcacaaaatggacgaaatattccagatctctcacaaaatctccgtcatgcgggacggcaggctcatcgacacccggccgctcgaaaaatttgacaggaaaacgctcaatccagagtaa

SEQ ID NO: 73654 - protein, 238 aa, Unknown
  Obtained from environmental sample
  DOMAIN (31)...(219): ABC transporter
  misc_feature (1)..(238): Xaa is any amino acid
MNGGNIHLSHISKSFPGVKALDDVSLTLNKGETHAIMGENGAGKSTLMKILSGIYHADKGEIEIDGRRVHISNPLDAKKLGISIIHQELTPIPDMTVAENIYLRREPINKLRFIDWRRLHKMTAELFEKTGIEGIDPKSYMRELSVAKTQLVEIAKAASFDAQYIIMDEPTSAISEREVENLFKLIKNFCEKNIGVIYISHKMDEIFQISHKISVMRDGRLIDTRPLEKFDRKTLNPE

SEQ ID NO: 73655 - DNA, 420 bp, Unknown
  Obtained from environmental sample
  misc_feature (1)..(420): n is a, c, g, or t
gtgagagatctggaatatttcgtccattttgtgcgatatatagatcacgccaatatttttttcacaaaaatttttgatgagtttaaacaggttctctacttcgcgctcgcttatcgcgcttgtcggctcgtccatgatgatatattgcgcgtcgaacgaagccgccttcgcgatttcgacaagctgtgttttggcaacactcagctccctcatgtacgattttgggtcgatgccctcaattcccgttttttcaaacaattccgcggtcattttatgaagcctccgccaatcgataaagcgcagcttattgatcggttccctgcggaggtatatattttcggcaaccgtcatatccggtattggcgtaagttcttggtggataatggaaatccccagctttttcgcgtcaagcgggtttga

SEQ ID NO: 73656 - protein, 139 aa, Unknown
  Obtained from environmental sample
  misc_feature (1)..(139): Xaa is any amino acid
MRDLEYFVHFVRYIDHANIFFTKIFDEFKQVLYFALAYRACRLVHDDILRVERSRLRDFDKLCFGNTQLPHVRFWVDALNSRFFKQFRGHFMKPPPIDKAQLIDRFPAEVYIFGNRHIRYWRKFLVDNGNPQLFRVKRV

SEQ ID NO: 73657 - DNA, 834 bp, Unknown
  Obtained from environmental sample
  misc_feature (1)..(834): n is a, c, g, or t
atgtttggaatgtacggagtaacgccgtctggattcagaagaaaacgcatggacgaagtgataatcagcctgcacgataacttgtctcgggaatggtcggttgacacgcggcaaaatccgcaatcttatattaacgttctgcttacaaactttgcggataagatagcggaactgtgggaagttgcggagtcggtttattttaatatgtatccggagagcgcgagcgggataaaccttgactccgccgtaagttttatggcgttgcgccgcgaaccggagcgatcggctgtgtattatctcgattgcaagtgtatcgacggaacgattatcccaaaaaattctatagtcaaaacaaacacaaatcccgcaataactttatattgcatgaacgacgttcaaattgaccgtagcggcttcactgaagcggttataaaggttgtggcgactgataacaattacactgtagccattgacggcgagacttatacgggttcgagcttgctggacatagcggagcagatcaataacaaatgcccgcgggcttccgcaaacgtttcaggctccatgcttaccgtctccgcgtcggggttggcgttgccgctgagtctgacgttgagtccgtcgctgacaaccgaaacggtcgcggcggctgcgccgtttgccgtctccgaacccggtataatagaaattgccgacggggcgattaattctatcgttacggcggttccaggatttttgtccgttaataatactataccgccgataacaggcagattaagagaaaccgattcccgaataaaggcgctcgtatatatcaaaaatattcgcggatag

SEQ ID NO: 73658 - protein, 277 aa, Unknown
  Obtained from environmental sample
  misc_feature (1)..(277): Xaa is any amino acid
MFGMYGVTPSGFRRKRMDEVIISLHDNLSREWSVDTRQNPQSYINVLLTNFADKIAELWEVAESVYFNMYPESASGINLDSAVSFMALRREPERSAVYYLDCKCIDGTIIPKNSIVKTNTNPAITLYCMNDVQIDRSGFTEAVIKVVATDNNYTVAIDGETYTGSSLLDIAEQINNKCPRASANVSGSMLTVSASGLALPLSLTLSPSLTTETVAAAAPFAVSEPGIIEIADGAINSIVTAVPGFLSVNNTIPPITGRLRETDSRIKALVYIKNIRG

SEQ ID NO: 73659 - DNA, 621 bp, Unknown
  Obtained from environmental sample
  misc_feature (1)..(621): n is a, c, g, or t
ttggaaaagcgccgcgccgcattggagcagcatatattgccagcgcttggaaacaaacggcttagagagctgaatccggccatattcacggcacattttgcccagttgcgcaggggcgcggggttatccgcgttatatgtaaacaacatacgcgtctacgttagcgcggtttttagctctgccatcaagaacggtataatggcgacgaacccgttgaaaggcgtggacaagctccgcgttgagcgcaaagaacagccggtattatctccgacgcaagtggggacgtttattagtaggcttcgcgaagtggatcatatcggggtgcgcggcgcgttgttgacgcaattatttaccggggcgcgtccgtctgaaatccgtgcacttacatggagcgacatcaactttgagaagaggcttattgatatcaataaatccgtcgatattaaaggacgcttaggccccccaaaaagtaaaagcagtaaacgtatactgtctatcgatccgctccttttgagcttcttaatccgacacaaggagagcgttgagaacctcgccgaanatatggggtcggcgtggacggataaaaatttggtttttccaacacgcgcggcgactatataa

SEQ ID NO: 73660 - protein, 206 aa, Unknown
  Obtained from environmental sample
  misc_feature (1)..(206): Xaa is any amino acid
MEKRRAALEQHILPALGNKRLRELNPAIFTAHFAQLRRGAGLSALYVNNIRVYVSAVFSSAIKNGIMATNPLKGVDKLRVERKEQPVLSPTQVGTFISRLREVDHIGVRGALLTQLFTGARPSEIRALTWSDINFEKRLIDINKSVDIKGRLGPPKSKSSKRILSIDPLLLSFLIRHKESVENLAEXMGSAWTDKNLVFPTRAATI

SEQ ID NO: 73661 - DNA, 1002 bp, Unknown
  Obtained from environmental sample
  misc_feature (1)..(1002): n is a, c, g, or t
ttgatcagatcggccgagatacggcaaagcgtctttttcgacctcgccgattccagcggccggctccaggtctatctccgccgccagcccgggccggcggaagcggccttggaccttttcaagaaaatggatctcggggacctggtgggcgtctccggccgcctcttcaaaaccaggaccggggaattgacccttctgcccggccacctggaactggtgaccaaggccctgtggcccctgccggaaaaatatcacgagctgagcgtggaaatgcgctaccgccggcgctacgtggacctcatcatgaacgaggacagccgccgggttttccgcctccgggcccaggtcgtctccgccctccgggaattcctggcggcccacggtttcctggaggtggagacgcccatgatgcaggccatccccggcggcgcctcggccaagcccttcgagaccttccaccacgccttgaaccggaaactctatctccggatcgccccggaactccatctcaagcgcctcctggtgggcggtttcgaccgtgtctttgaaatcaaccgctgcttccgcaacgagggtatcagcgttcagcacagccccgagttcacgactttggaattttaccaggcctacgccgatttccacgacctcatggacctgaccgaggagatgttcacggaggtggccctgaaggtcaagggcgccgccgccttcacctaccagggaaggacggtggatttcaaaaggccctggcggcggctgcgttttcatgaggccctggaaaagggcggcgcgccgccggaagttctgaccgaccgccaggcggccttggagcatcttaaaaaactgggcggcgaanaatcagaccangatcctctgggcaagatccagccaaaatcttcgaccttacggntgagcccgaactgggcgatcccaccttcatcacccactatccggccgatatcacccccctggcccgccgcagcgaaaaagacctcctcttaa

SEQ ID NO: 73662 - protein, 333 aa, Unknown
  Obtained from environmental sample
  DOMAIN (1)...(73): OB-fold nucleic acid binding domain
  misc_feature (1)..(333): Xaa is any amino acid
MIRSAEIRQSVFFDLADSSGRLQVYLRRQPGPAEAALDLFKKMDLGDLVGVSGRLFKTRTGELTLLPGHLELVTKALWPLPEKYHELSVEMRYRRRYVDLIMNEDSRRVFRLRAQVVSALREFLAAHGFLEVETPMMQAIPGGASAKPFETFHHALNRKLYLRIAPELHLKRLLVGGFDRVFEINRCFRNEGISVQHSPEFTTLEFYQAYADFHDLMDLTEEMFTEVALKVKGAAAFTYQGRTVDFKRPWRRLRFHEALEKGGAPPEVLTDRQAALEHLKKLGGEXSDXDPLGKIQPKSSTLRXSPNWAIPPSSPTIRPISPPWPAAAKKTSS

SEQ ID NO: 73663 - DNA, 384 bp, Unknown
  Obtained from environmental sample
  misc_feature (1)..(384): n is a, c, g, or t
gtgtttgtatgggctgatatgaacgaatccgtggttaaatggagttccgagccgttcgcgatcgaatatcaggacctttccgacaaggacaggcttgtcaggagatatttccccgacgtgatggctgtggtcaaggggaaggacggaagcaccgtcaaatacctgattgaaatcaagcccaagaaccaatgccctcagtattcgccggacggcaggctgatattgcctcccctgcccaagaagaaaagctcgaaggcgatgaataattggcacggaaaggtcaagacaatcgtgatgaatcattgcaagtggaaggcggctcaggctttctgcaagaagaacggatatgtgtttaaggtaatcaccgaggacaatgtcttctga

SEQ ID NO: 73664 - protein, 127 aa, Unknown
  Obtained from environmental sample
  misc_feature (1)..(127): Xaa is any amino acid
MFVWADMNESVVKWSSEPFAIEYQDLSDKDRLVRRYFPDVMAVVKGKDGSTVKYLIEIKPKNQCPQYSPDGRLILPPLPKKKSSKAMNNWHGKVKTIVMNHCKWKAAQAFCKKNGYVFKVITEDNVF

SEQ ID NO: 73665 - DNA, 882 bp, Unknown
  Obtained from environmental sample
  misc_feature (1)..(882): n is a, c, g, or t
gtggaaagcaacgcctccaagcatttcgatctggggcaaagcgttgtccagaaaatacttccttacaccggaaactcggtcagggtcggcataacgggcgtacccggagcgggcaaaagcacttttatcgaggctttgggaacatggctntgcgccaaaggcagcaaagtggcggttctggccgttgaccccagcagcagccttagcaaaggaagcattctgggcgacaaaacgcgcatggagaaactcgcgaaagagccgaacgcgtatatacgcccctcgccgtccaagggaacgctggggggcctgacaaggaaaagccgggaaaccctgcttctgtgcgaggccgccggatacgacgttattctggtggaaacggtgggcgtcggccagagcgagacaacggtgcggtcaatggtggattttttcctgcttctggtcattaccggcgcgggagacgaccttcagggcatgaaaaaaggagtcatggagctcgcggacgcgattctcgtcaataaagcggacggccacaacaaaataaaagcggagtctacaagggtagagtacgacagaatgctgcactacctccgcccggcaacggaaggatgggtaacccacgcctactcctgttcggcgcttgacggtacgggcatagaagaaatctggaacgtcattgggcagttcatgcaatacgttaagagcggcggcttgttcgatgagcgccgcaagcgccaaaccttgtcatgggtttacggaatggtcgaggaacagctcctcgtaaacttctacgataacccggcggttgccgcaaatcgcgatggcatagaaagcaaggttttaaagggcgaactttcggcgacgctggcggcgcaaaggctatga

SEQ ID NO: 73666 - protein, 293 aa, Unknown
  Obtained from environmental sample
  DOMAIN (27)...(201): CobW/HypB/UreG, nucleotide-binding domain
  misc_feature (1)..(293): Xaa is any amino acid
MESNASKHFDLGQSVVQKILPYTGNSVRVGITGVPGAGKSTFIEALGTWLCAKGSKVAVLAVDPSSSLSKGSILGDKTRMEKLAKEPNAYIRPSPSKGTLGGLTRKSRETLLLCEAAGYDVILVETVGVGQSETTVRSMVDFFLLLVITGAGDDLQGMKKGVMELADAILVNKADGHNKIKAESTRVEYDRMLHYLRPATEGWVTHAYSCSALDGTGIEEIWNVIGQFMQYVKSGGLFDERRKRQTLSWVYGMVEEQLLVNFYDNPAVAANRDGIESKVLKGELSATLAAQRL

SEQ ID NO: 73667 - DNA, 936 bp, Unknown
  Obtained from environmental sample
  misc_feature (1)..(936): n is a, c, g, or t
atgacccagagaggaactacaacatccactgcatttacgataaccggactgacatccaatacactttattacatcacggtatcggcaacgaatgattccggtgagggcaataaagcaactccgattacggtaactacattacttactgctccaaccgggttagccgcaaatcctatcgccgcaagcaacacgattcaactttcatggaatgcgcttaccggcgctgatttgtataaagtgtaccgttctaccagcgatacaggaacatataccagtataagcactactaatggtacatcatataacgataacaccggaattacggctggaaacaattattactacaaagtaagagcccttaccagtggaaatgttgaaggtgagttgtctggttctgttgtaggaaagattcctatgacaacaaaagacataacacaattccggtttgccgatttctcggttaacggaaccataaacggaaccaatatcagcgttacagttccgaatatcgtaaaccttactatgcttgctccgaccattacccacaacggtgaatcgatcaacccggcatcgggtgtggcgcaggactttaccagtccgaaacagtacacggtaacggcggaagatggtacaacgcaagcctacactgtaacagtaacggttaccaataacactcttgctacggcatttacgtggattaacgataaatacgtaaacggcaagacttatacgattgtcgcccaaaccgacgaatcacttgcgccaactacgattgacgtatataccagtaataacataattcttagtggcggaacaacagaaaaaaccatcagtctgagcagtaacggttcgttgtttacgataaaatatggaacacttactctggaaaataatattactcttcaaggactaagttctaataacgcttcgtggtaa

SEQ ID NO: 73668 - protein, 311 aa, Unknown
  Obtained from environmental sample
  DOMAIN (48)...(130): Fibronectin type III domain
  misc_feature (1)..(311): Xaa is any amino acid
MTQRGTTTSTAFTITGLTSNTLYYITVSATNDSGEGNKATPITVTTLLTAPTGLAANPIAASNTIQLSWNALTGADLYKVYRSTSDTGTYTSISTTNGTSYNDNTGITAGNNYYYKVRALTSGNVEGELSGSVVGKIPMTTKDITQFRFADFSVNGTINGTNISVTVPNIVNLTMLAPTITHNGESINPASGVAQDFTSPKQYTVTAEDGTTQAYTVTVTVTNNTLATAFTWINDKYVNGKTYTIVAQTDESLAPTTIDVYTSNNIILSGGTTEKTISLSSNGSLFTIKYGTLTLENNITLQGLSSNNASW

SEQ ID NO: 73669 - DNA, 903 bp, Unknown
  Obtained from environmental sample
  misc_feature (1)..(903): n is a, c, g, or t
gtggaattgaaaaagcatgaattgcttttggtttccgaaaggcagaaattgacggaagaacagaaaaatatcgcctctatagtcaaaaaaatcgagcaatacaaagcgcaattgttggacttgctgaattttgaagtggcgagttcttctatggagtcggcggcaaaagaaaaattgctttcggtcgacggatggattcccaaagataaaaaggcggaaacgaaaaagattcttgacgaattttcgtgctgttacgagtttagagagccgatggaaaacgaagacgtacccgtaaaattcaataacaatccggtcgcgcaaaaatacgagacgattacgaaactttttacgcttcccaaatactgcgaaatcgacccgacgccgttttttgcgccgttctatgcgtttttctttgggctttgcgtaggcgacatcggttacggaacgattattttggcggctgcggtcgcggcgtatgtgaaagcgggcaaaggtttcaaaccggttgcgattttgggaatgatgcttggattttcaacgattatcggcggattcttgctaaacggatttttcagcatgccgattttcaattcggctgacggaagcggactgctgggcgacgccggaggtttgggaatgtattcgcttttgaaatccacttcggtacatgttatagaaaacggaaggttggcggaaaaagtcataatgcctatgattccgttcgcgttgtttttgggcgtaattcanattttgttcggaatgtttctaaaaacgattaacanaattatgtcaaacgacgggcagataaaatacgctttatttccatcggcacgatgtttttacggttgcggcgactttggctgtgataaaaatgaatttcttggatatgggttcgttttttga

SEQ ID NO: 73670 - protein, 300 aa, Unknown
  Obtained from environmental sample
  misc_feature (1)..(300): Xaa is any amino acid
MELKKHELLLVSERQKLTEEQKNIASIVKKIEQYKAQLLDLLNFEVASSSMESAAKEKLLSVDGWIPKDKKAETKKILDEFSCCYEFREPMENEDVPVKFNNNPVAQKYETITKLFTLPKYCEIDPTPFFAPFYAFFFGLCVGDIGYGTIILAAAVAAYVKAGKGFKPVAILGMMLGFSTIIGGFLLNGFFSMPIFNSADGSGLLGDAGGLGMYSLLKSTSVHVIENGRLAEKVIMPMIPFALFLGVIXILFGMFLKTINXIMSNDGQIKYALFPSARCFYGCGDFGCDKNEFLGYGFVF

SEQ ID NO: 73671 - DNA, 429 bp, Unknown
  Obtained from environmental sample
  misc_feature (1)..(429): n is a, c, g, or t
atgatcagatggccgaggtcggggccccgtggcgggcgccctggtcaggatatcgggcccgaacctgctcgtgccgagggaggccacatcggacgcgaacggccgctacgccttccgcctggtgcttccgggccaggtccgcgtccagttcagcaggcagggcttcataggcggctaccaggcaataacggtgacgtcgggctcgacgcagacggccaactttgtgctgagggcgatgggggttgcgtccgaggaggtggaggtcaccgccggagcggacaacccgataatcgacaagacagagaccaaggtgacgtcaacgttcacggcaagggacctgttcaaccttcccaacgtagtcggctccggaatgtacgccgcaatgtacttggcgcctggcgtcacgggaggtcttcctggaagcggtaa

SEQ ID NO: 73672 - protein, 142 aa, Unknown
  Obtained from environmental sample
  misc_feature (1)..(142): Xaa is any amino acid
MIRWPRSGPRGGRPGQDIGPEPARAEGGHIGRERPLRLPPGASGPGPRPVQQAGLHRRLPGNNGDVGLDADGQLCAEGDGGCVRGGGGHRRSGQPDNRQDRDQGDVNVHGKGPVQPSQRSRLRNVRRNVLGAWRHGRSSWKR

SEQ ID NO: 73673 - DNA, 354 bp, Unknown
  Obtained from environmental sample
  misc_feature (1)..(354): n is a, c, g, or t
atgtctttggacgggaaaatcggccgcctggccacccaagaaaaaaccgtagtcaccggggaccacccggccgtgctgctctccgggcgcatcattaccgggatcgatatctggcccggggggaccatcctgacccgggtcatcgctggcggtgcgctgaccccctggggcggagaaccggatttgccgcccgcgggcgtcctcaccgacgacgtcgattcggtcaccgccggcgcggccgtctatctggcccacggcacggtggccctcacggccctccggctgaacggcggcgcggccccggggagcgagcaaattgacgccctggcccgggccggcatctacgcggtgtaa

SEQ ID NO: 73674 - protein, 117 aa, Unknown
  Obtained from environmental sample
  misc_feature (1)..(117): Xaa is any amino acid
MSLDGKIGRLATQEKTVVTGDHPAVLLSGRIITGIDIWPGGTILTRVIAGGALTPWGGEPDLPPAGVLTDDVDSVTAGAAVYLAHGTVALTALRLNGGAAPGSEQIDALARAGIYAV

SEQ ID NO: 73675 - DNA, 627 bp, Unknown
  Obtained from environmental sample
  misc_feature (1)..(627): n is a, c, g, or t
atggcctcggtgaccgccaccaccggcaagctctcctggcccagccgcctggaagggggcgcggcggaaacctacgaactggatttcggccagcccaaccggctggacctcacggccgccacggcctgggacggcgcggacccgcctaagctggccgaggtctataaccacctcaccaagctggacctggaagtcacggaaaacggcgggggcggcaacctggccttcctggccgggcgggacgccttcagcgccctgatccgcctggccgagcgctggcaatccacagccgggggcgggcccatcaacctgaaattggacaacggggccgtgaccataggcggctacgagatcaagcgcctggtggagcgctacctttcgcccctggacaacacttgggtcgagaagattccgcccaatgttctcctgggctacagccgggaccagaagggggccatcttttacctggccgtggacagcctcagcctggacggccaggcccggcccttccacgtggtggccgagccggcgcccggggacgcggccatccacctcatcgcccaggccaagccggtgccggcccgggcgccccgggggatgatcctcagccaggtggtttccttctaa

SEQ ID NO: 73676 - protein, 208 aa, Unknown
  Obtained from environmental sample
  misc_feature (1)..(208): Xaa is any amino acid
MASVTATTGKLSWPSRLEGGAAETYELDFGQPNRLDLTAATAWDGADPPKLAEVYNHLTKLDLEVTENGGGGNLAFLAGRDAFSALIRLAERWQSTAGGGPINLKLDNGAVTIGGYEIKRLVERYLSPLDNTWVEKIPPNVLLGYSRDQKGAIFYLAVDSLSLDGQARPFHVVAEPAPGDAAIHLIAQAKPVPARAPRGMILSQVVSF

SEQ ID NO: 73677 - DNA, 315 bp, Unknown
  Obtained from environmental sample
  misc_feature (1)..(315): n is a, c, g, or t
gtgacgcttcgagctgtttgtggcggggatggagttggccacgcctattccgagctgaacgaccccatagtccagctgaagcgcttccaggaccagttggccgagcgcgaggcgggcaacgatgaagccatgctgctcgacatggatttcatcgccagtcttgagcatggcttcccccccaccggtgggctgggcatgggcattgacaggctggtgatgttgatgacgggcaataccagtatccgggacgtgatcctgttccccctaatgcgcccgcagttgcacaaggcggaccaagggcaggacggggcataa

SEQ ID NO: 73678 - protein, 104 aa, Unknown
  Obtained from environmental sample
  misc_feature (1)..(104): Xaa is any amino acid
MTLRAVCGGDGVGHAYSELNDPIVQLKRFQDQLAEREAGNDEAMLLDMDFIASLEHGFPPTGGLGMGIDRLVMLMTGNTSIRDVILFPLMRPQLHKADQGQDGA

SEQ ID NO: 73679 - DNA, 900 bp, Unknown
  Obtained from environmental sample
  misc_feature (1)..(900): n is a, c, g, or t
atgaaacttccgatacataggtggttcagatattctgcgggtttttccgcaaagtgggtagaaacaaccatcgttaaaacccttaaacaaaaaaaaatatccattgacaatcaaactgattttcttgttttcgacccgtttgcgggttctggcactacgttacttgtagccgatcagattggtgtaagaggaataggttatgaatcccacccgttaataacaaaaattgcctctataaagcttttatgggatacagatattgtttcttttagaaaagttgctaatgatatcattagactagctcaaaatatttcaaagaaattagattcatatccagccattatacatcgatgttacggtgaggataacttaattgctcttgacaatctaaaatattcacttaaacaattagctgatgattcaaacgaatataaactctcttggcttgcgtttttgtcaatactccgttctacatctcatgccggaacggctcaatggcagtatattttgcccaataaatctaaaacacgagtattaaatgtttttgacgcatataacaagcaagtggatttaatgtgtgaagacctttttatattttcgtcttgtgcgaatgcctctaaaacaaaaataaggagttccatctttcagcacgatgcacgaataaaacttgataatttatccaacgctgttgatttgataataacatcaccgccatatgcaaacaactatgattatgcagacgcaacgcgattggaacttagcattcttggagatataaatggatggggtgatttgcaatctgttatacgggattccctaatacgttcatgtacgcagcatgtatccaaagaaaaaaacatacgtatgattatcttgacgaaccttttctcccgtcgataa

SEQ ID NO: 73680 - protein, 299 aa, Unknown
  Obtained from environmental sample
  misc_feature (1)..(299): Xaa is any amino acid
MKLPIHRWFRYSAGFSAKWVETTIVKTLKQKKISIDNQTDFLVFDPFAGSGTTLLVADQIGVRGIGYESHPLITKIASIKLLWDTDIVSFRKVANDIIRLAQNISKKLDSYPAIIHRCYGEDNLIALDNLKYSLKQLADDSNEYKLSWLAFLSILRSTSHAGTAQWQYILPNKSKTRVLNVFDAYNKQVDLMCEDLFIFSSCANASKTKIRSSIFQHDARIKLDNLSNAVDLIITSPPYANNYDYADATRLELSILGDINGWGDLQSVIRDSLIRSCTQHVSKEKNIRMIILTNLFSRR

SEQ ID NO: 73681 - DNA, 600 bp, Unknown
  Obtained from environmental sample
  misc_feature (1)..(600): n is a, c, g, or t
ttgagacgaacccccaaaagaattttgtccattggcaataaatgccataaagaaaaaaatgagaacgaaagagaatggtgtttttttgaacatggcgaagaaagattaaaaaaagaccaagattttttgcaaagatacaaaaaaaaacgaaacctgagggttcattttttttttacacaattttttttgtacttttgcaacatgaaaaaattatcccaacaagacgttttcgatatcattgcctcgcaatttccgtttgagccgacgggcgaccaaacgttgatggtcgagcgtttgagcgaatttttaattcggtttcgagagccgtcattgtttgtgttgaagggttatgccggaacgggaaaaaccaccgtagtcggggcattcgtgagagccttgccgaatttcaacctgcgtgcgatgttgcttgcgccgacaggtcgcgcagccaaagtgttgggaaactactcggggcaacaggcttttactattcacaaaaaatctacaaaaccacttctgacgaatttngcggacacaaaaccatttttgcacccantccgcaccgtaacacgatgtttattgtggacgaggcatcgatga

SEQ ID NO: 73682 - protein, 199 aa, Unknown
  Obtained from environmental sample
  misc_feature (1)..(199): Xaa is any amino acid
MRRTPKRILSIGNKCHKEKNENEREWCFFEHGEERLKKDQDFLQRYKKKRNLRVHFFFTQFFLYFCNMKKLSQQDVFDIIASQFPFEPTGDQTLMVERLSEFLIRFREPSLFVLKGYAGTGKTTVVGAFVRALPNFNLRAMLLAPTGRAAKVLGNYSGQQAFTIHKKSTKPLLTNXADTKPFLHPXRTVTRCLLWTRHR

SEQ ID NO: 73683 - DNA, 648 bp, Unknown
  Obtained from environmental sample
  misc_feature (1)..(648): n is a, c, g, or t
gtgggcgtactggatcggggcaggcatcagtcggggcgtttcatcacatgcgaagccgaacatcaggccctggtcgccggcgccgcctgggtcaacacccatggcgatgtcgggcgactgcctgtctatcgccaccagaaccgagcaagtccgccagtcgaagcccttgatgtggtcatcgtagccgatgtccctcaccacgccccttgccacttccgccacgggtatgtacgtgttggtggttatttcgccggccacaaggatcaggcccgtggcaagcagcgtctcgcaggcgacgcggctggcggtgtcgtccttcagtgccgcgtccaagacagcgtccgatatctggtcggccattttgtcgggatggccctccgtgacgctttcggatgtgaacaggtgctttctcggcgtgtccatgtggtctccgttggaaggtttcagacaactactattgtagcgcagtcgcccttgacagagttggcgccgccggatttcttgaattatgatggctttgtgatcggagaaatctcatgggcatttcgacttgcttcaggtgcgttgcgtttctggctgccgccgtgcttgcttccaccctcgcctgcaataaggagagccagcaggaaacggaaatcaaggacctga

SEQ ID NO: 73684 - protein, 215 aa, Unknown
  Obtained from environmental sample
  misc_feature (1)..(215): Xaa is any amino acid
MGVLDRGRHQSGRFITCEAEHQALVAGAAWVNTHGDVGRLPVYRHQNRASPPVEALDVVIVADVPHHAPCHFRHGYVRVGGYFAGHKDQARGKQRLAGDAAGGVVLQCRVQDSVRYLVGHFVGMALRDAFGCEQVLSRRVHVVSVGRFQTTTIVAQSPLTELAPPDFLNYDGFVIGEISWAFRLASGALRFWLPPCLLPPSPAIRRASRKRKSRT

SEQ ID NO: 73685 - DNA, 501 bp, Unknown
  Obtained from environmental sample
  misc_feature (1)..(501): n is a, c, g, or t
atggacacgccgagaaagcacctgttcacatccgaaagcgtcacggagggccatcccgacaaaatggccgaccagatatcggacgctgtcttggacgcggcactgaaggacgacaccgccagccgcgtcgcctgcgagacgctgcttgccacgggcctgatccttgtggccggcgaaataaccaccaacacgtacatacccgtggcggaagtggcaaggggcgtggtgagggacatcggctacgatgaccacatcaagggcttcgactggcggacttgctcggttctggtggcgatagacaggcagtcgcccgacatcgccatgggtgttgacccaggcggcgccggcgaccagggcctgatgttcggcttcgcatgtgatgaaacgccccgactgatgcctgccccgatccagtacgcccacacgctcaccaagaagctgacccgagtgcgcaaaccggcaagctgccgtggctcangcccgacggcaagagcccagtga

SEQ ID NO: 73686 - protein, 166 aa, Unknown
  Obtained from environmental sample
  DOMAIN (111)...(165): S-adenosylmethionine synthetase, central domain
  misc_feature (1)..(166): Xaa is any amino acid
MDTPRKHLFTSESVTEGHPDKMADQISDAVLDAALKDDTASRVACETLLATGLILVAGEITTNTYIPVAEVARGVVRDIGYDDHIKGFDWRTCSVLVAIDRQSPDIAMGVDPGGAGDQGLMFGFACDETPRLMPAPIQYAHTLTKKLTRVRKPASCRGSXPTARAQ

SEQ ID NO: 73687 - DNA, 612 bp, Unknown
  Obtained from environmental sample
  misc_feature (1)..(612): n is a, c, g, or t
gtggctggccagttccgccgccagaacacgggtgaacccgttgatggcccacttggatacggaatacggcccgtgcccggccacagggatgacggaggtgaaggaagcggcgttgacgataactccgccgccttggcgtatcatctgtcgggccgccagcttgctgcccacaaaggcggcccgcacattgacgtccatgaccctgtcccattcttcgagagacagatccagaaagggtttcagtacgccgaccccggcgttgttgtaccagatgtccagacggccgaaacgttggaccgtggcgttgacaaagccttccagggctacggggtcagccacgtccgccgcatggcagaacacatccgcatagcccaaggccgcgcattccgccgcgaaggtgtcgagcttgctctgtgtgcggccgcacacggcgagcttgcacccctcttgcaaatactgcaacgaacaggcccggcctatgccggtggctccgccggtgatgcccacgattttgccgctcaagtgcaaatccatacgacaacctcacagtgcgctttgggtatagaaccgtcaattccggcggaagtgggggtcagcccatctcctgcatga

SEQ ID NO: 73688 - protein, 203 aa, Unknown
  Obtained from environmental sample
  misc_feature (1)..(203): Xaa is any amino acid
MAGQFRRQNTGEPVDGPLGYGIRPVPGHRDDGGEGSGVDDNSAALAYHLSGRQLAAHKGGPHIDVHDPVPFFERQIQKGFQYADPGVVVPDVQTAETLDRGVDKAFQGYGVSHVRRMAEHIRIAQGRAFRREGVELALCAAAHGELAPLLQILQRTGPAYAGGSAGDAHDFAAQVQIHTTTSQCALGIEPSIPAEVGVSPSPA

SEQ ID NO: 73689 - DNA, 801 bp, Unknown
  Obtained from environmental sample
  misc_feature (1)..(801): n is a, c, g, or t
atggccggcggccgagcgacatgtcctctttttcctggggcccatcctggccatgttccccatgttcctggtctttctggtcatccccttcggcccctggctgaccggccgggaagaagacctgggcgtcctcctgataatggccttcgtcggcttcgagggcctggccgtcttgataggcggctgggcctcgaacaacaaatacagcttaatcggcgcggcccgcgccgtcagccagaccgtggcctacgagatacccctcatcctggccgtcctggccgtggccttccagtgcggcaccttaaacctcacccgcatagtggaggcccagggggactggcccgggcaatggttcatggtccgccagcccctggccttcatcatcttcctcgtctgcatgttcggggagaccaaccgggcccccttcgacctgcccgagggggaatccgaactcaccggcggctaccacaccgaatattccggcatgggcttcgctctctacttcatggccgaatacacctccatgctcctggtttcctttctggcggccgtcttcttcctgggcggttccggcggtcccctggccccgggggtgtggtggaccttcatcaaggcgggctgcctgatgaccctcatgatctgggtccgctggacctatccccgggtgcgcttcgaccaactgctgaacctcaactggaaatggctgctccccttgggccttttgaatctctggctcacggccctggccatgaagtttttctaggcttcaaggattttggctatgttcaaagctgtcgttga

SEQ ID NO: 73690 - protein, 266 aa, Unknown
  Obtained from environmental sample
  misc_feature (1)..(266): Xaa is any amino acid
MAGGRATCPLFPGAHPGHVPHVPGLSGHPLRPLADRPGRRPGRPPDNGLRRLRGPGRLDRRLGLEQQIQLNRRGPRRQPDRGLRDTPHPGRPGRGLPVRHLKPHPHSGGPGGLARAMVHGPPAPGLHHLPRLHVRGDQPGPLRPARGGIRTHRRLPHRIFRHGLRSLLHGRIHLHAPGFLSGGRLLPGRFRRSPGPGGVVDLHQGGLPDDPHDLGPLDLSPGALRPTAEPQLEMAAPLGPFESLAHGPGHEVFLGFKDFGYVQSCR

SEQ ID NO: 73691 - DNA, 711 bp, Unknown
  Obtained from environmental sample
  misc_feature (1)..(711): n is a, c, g, or t
atgttccccatgttcctggtctttctggtcatccccttcggcccctggctgaccggccgggaagaagacctgggcgtcctcctgataatggccttcgtcggcttcgagggcctggccgtcttgataggcggctgggcctcgaacaacaaatacagcttaatcggcgcggcccgcgccgtcagccagaccgtggcctacgagatacccctcatcctggccgtcctggccgtggccttccagtgcggcaccttaaacctcacccgcatagtggaggcccagggggactggcccgggcaatggttcatggtccgccagcccctggccttcatcatcttcctcgtctgcatgttcggggagaccaaccgggcccccttcgacctgcccgagggggaatccgaactcaccggcggctaccacaccgaatattccggcatgggcttcgctctctacttcatggccgaatacacctccatgctcctggtttcctttctggcggccgtcttcttcctgggcggttccggcggtcccctggccccgggggtgtggtggaccttcatcaaggcgggctgcctgatgaccctcatgatctgggtccgctggacctatccccgggtgcgcttcgaccaactgctgaacctcaactggaaatggctgctccccttgggccttttgaatctctggctcacggccctggccatgaagtttttctag

SEQ ID NO: 73692 - protein, 236 aa, Unknown
  Obtained from environmental sample
  DOMAIN (1)...(234): NADH dehydrogenase
  misc_feature (1)..(236): Xaa is any amino acid
MFPMFLVFLVIPFGPWLTGREEDLGVLLIMAFVGFEGLAVLIGGWASNNKYSLIGAARAVSQTVAYEIPLILAVLAVAFQCGTLNLTRIVEAQGDWPGQWFMVRQPLAFIIFLVCMFGETNRAPFDLPEGESELTGGYHTEYSGMGFALYFMAEYTSMLLVSFLAAVFFLGGSGGPLAPGVWWTFIKAGCLMTLMIWVRWTYPRVRFDQLLNLNWKWLLPLGLLNLWLTALAMKFF

SEQ ID NO: 73693 - DNA, 948 bp, Unknown
  Obtained from environmental sample
  misc_feature (1)..(948): n is a, c, g, or t
gtggcacattatggatccgctcaggaagacaagcgtatcttcggcctgcatcaacccgtgctggaatggcacaagaaacacgaaacctatctttataaccggaggcccgtcgcgaatatcggccttgtctggagccaggacaatgtggagtttggcggcggccttcttaaaaaaaaccgcgtccaggacgcgtggcggggcatggtaatggcccttacccgcgcgggccttcctttcctcccggtaaatgccggtgatttgaacacccaaaccaaagaaatggatcttctgattctaagcgaattcgcggttgtaggcgatgaagaagcgaaggccctggaagcctttgtagaacgagggggcagtattttcgcctgcggcgagacaggggtttttggcaaaggcggggatgagcgcaaggatcctgcccttgaaagtttgttcggccttcacttcggccctgtggcggcaggcccggtcggggaatcgaattttgagaatcctattttccacaattacctgagaattgaggcggcagacagccccgtcttcaatggttttgaaaataccgcgatgctgcccatgggcggcgcgctcaaagagatcgatttaggtaaagaattgggtaaaggagcgcgggcgttggcgacgtatattcccagtttccccatgtacccgccggaattcgtctggacagaggagcccaaaaccgataagcccgtactcaccgagtattctcatcccaaaggcggcaaggcaatatacgcggcatgggatttagacgccatgtacggtctcgcggctcatcctgatcatggggatctgattgccaatatcgttaagtaccttcttggagacaaggttccggttcttgtggaatgtgatgcctatatcgacttcaaaatataccgccaggaaaaaaggctatcatcactcatccggcgataa

SEQ ID NO: 73694 - protein, 315 aa, Unknown
  Obtained from environmental sample
  misc_feature (1)..(315): Xaa is any amino acid
MAHYGSAQEDKRIFGLHQPVLEWHKKHETYLYNRRPVANIGLVWSQDNVEFGGGLLKKNRVQDAWRGMVMALTRAGLPFLPVNAGDLNTQTKEMDLLILSEFAVVGDEEAKALEAFVERGGSIFACGETGVFGKGGDERKDPALESLFGLHFGPVAAGPVGESNFENPIFHNYLRIEAADSPVFNGFENTAMLPMGGALKEIDLGKELGKGARALATYIPSFPMYPPEFVWTEEPKTDKPVLTEYSHPKGGKAIYAAWDLDAMYGLAAHPDHGDLIANIVKYLLGDKVPVLVECDAYIDFKIYRQEKRLSSLIRR

SEQ ID NO: 73695 - DNA, 333 bp, Unknown
  Obtained from environmental sample
  misc_feature (1)..(333): n is a, c, g, or t
gtgggaaaagagaacatgggtatctgtctggataccgggcacctcaatcttgcggggggcaatcaagctggttttgtactggaagcgggttcccttcttcacgcccttcatatcgcggataacgaggggtattatgatcaacatctgatgcctttttttggcaggactacgatcccttggggggagttaatgaaagccctgagcagcagcggctatgatgggctcttcaattttgaaattcccggagaatgtgccaccacaccaattgaagtcctgcgtatgaaacttcgctaccttaaagagctggcggcttatttacagagtttagcttaa

SEQ ID NO: 73696 - protein, 110 aa, Unknown
  Obtained from environmental sample
  misc_feature (1)..(110): Xaa is any amino acid
MGKENMGICLDTGHLNLAGGNQAGFVLEAGSLLHALHIADNEGYYDQHLMPFFGRTTIPWGELMKALSSSGYDGLFNFEIPGECATTPIEVLRMKLRYLKELAAYLQSLA

SEQ ID NO: 73697 - DNA, 630 bp, Unknown
  Obtained from environmental sample
  misc_feature (1)..(630): n is a, c, g, or t
atgattattgaatcccttgtcggcacgataggcggcttcgtcggcaccgccatcacggcctataccaatttcaaaatgaagcagcttgaagccgaggaaaacaaggccaaacgcggacatgagcttgccatggtacaggccgaatctgaggcccgcatcgctgaagtgcaggcgcaaatccaggtcgcgcaggcgcaaaccgaaggcgcgatctcactggaagaagcccgcgcctacacagaaagccaacgccaaggcaacaggcgtgtttttgagagcgaatgggtaaacatactcttggcccgcaaagactcactgcgctatgtcaccgtgccaatcgccatactgctgtgcgtcatattcgggctgtccgatgccgtccagtctctcatgcgtccgtccctcacgctgtacagcgtcggtatcgcatcgtgggtgactttgagggaatgggagcttctacagagggccggagtggaggcccttactgtaacacaggccctagcgcagtgngatgtcgctacgagcgtactctacacgctgaccgtcacgcttgtgacttggtggtttggagatcgcgggctggcaggnaacctcgctcatcaagaggcaatgggaaataagcgatga

SEQ ID NO: 73698 - protein, 209 aa, Unknown
  Obtained from environmental sample
  misc_feature (1)..(209): Xaa is any amino acid
MIIESLVGTIGGFVGTAITAYTNFKMKQLEAEENKAKRGHELAMVQAESEARIAEVQAQIQVAQAQTEGAISLEEARAYTESQRQGNRRVFESEWVNILLARKDSLRYVTVPIAILLCVIFGLSDAVQSLMRPSLTLYSVGIASWVTLREWELLQRAGVEALTVTQALAQXDVATSVLYTLTVTLVTWWFGDRGLAGNLAHQEAMGNKR

SEQ ID NO: 73699 - DNA, 303 bp, Unknown
  Obtained from environmental sample
  misc_feature (1)..(303): n is a, c, g, or t
gtgaacaccatgcttaacgaaagaataaaagatttacgtctttctatgaaattaaaccaaactgaaatggctgaaaaattgaatgtctcaaagcaaactgttagtaattgggaaaataataatatacagccttctattgatactcttgtgaaaatagcggaattttttggcgcaagcgttgattaccttttaggaatagaanataaaaggagtggttttttagatacatcagcattaacggatgaagaaataaatgatattcaaaaaaatatcaatcatatccgtaaaaacagacaaagttaa

SEQ ID NO: 73700 - protein, 100 aa, Unknown
  Obtained from environmental sample
  DOMAIN (7)...(70): Bacteriophage CI repressor helix-turn-helix domain
  misc_feature (1)..(100): Xaa is any amino acid
MNTMLNERIKDLRLSMKLNQTEMAEKLNVSKQTVSNWENNNIQPSIDTLVKIAEFFGASVDYLLGIEXKRSGFLDTSALTDEEINDIQKNINHIRKNRQS

SEQ ID NO: 73701 - DNA, 609 bp, Unknown
  Obtained from environmental sample
  misc_feature (1)..(609): n is a, c, g, or t
gtgatgaaggatatcgacctgggaacctacccgtatgtcacgtcgtccaacccggtggcggcatacgcggccgtgagcgggggcttcccggtttccaaaatcgaccgcatctatggggttgcgaaagcattttcgtcagccgtgggcgccgggccattcccgacggaatcggacgaggcggcggaattgctgcgcggcagcggcgaaaaccccgacgacgaatacggcgccacgaccggcaggccgagaaggatcggctggctggatttgccaatgctcagatacgcccatatggtgaacggcttcaccgacctgatcctgacgaaattggacaagcttgacgggctggcttccgtccgcgtatgcaccggctacatgcttgacggaaagcgcgtcggcggtatgccggaaacagaggatctgtaccgcgtcgaacccgtctaccacagcttggacggctgggagaagaacaccgcagggattggaagctatgcgcggctgccggacaacgccaaaaaatacatagaatttatcgaggaacagacaggcgtccccgttgcctacatcggaaacggcccggcgcgggagcatataatatgtaggaattaa

SEQ ID NO: 73702 - protein, 202 aa, Unknown
  Obtained from environmental sample
  DOMAIN (1)...(200): Adenylosuccinate synthetase
  misc_feature (1)..(202): Xaa is any amino acid
MMKDIDLGTYPYVTSSNPVAAYAAVSGGFPVSKIDRIYGVAKAFSSAVGAGPFPTESDEAAELLRGSGENPDDEYGATTGRPRRIGWLDLPMLRYAHMVNGFTDLILTKLDKLDGLASVRVCTGYMLDGKRVGGMPETEDLYRVEPVYHSLDGWEKNTAGIGSYARLPDNAKKYIEFIEEQTGVPVAYIGNGPAREHIICRN

SEQ ID NO: 73703 - DNA, 714 bp, Unknown
  Obtained from environmental sample
  misc_feature (1)..(714): n is a, c, g, or t
gtgctgttcgaagagctgacaaaggcgttcgcccacatcgagacggcagagcgcaaactgggcagcctgttgaacctcgacagcgggcgcgtctccctcagcgcgggcgatacggtatgcaattattacctgatgccgatgatgtccgctttttcaaaaaaacatccttccattaattttgagataacgaatcggacatcccccgaaaccctcgatctcgtccgcgcgcgcaaggttgagatcgggtttgcgaacatttgcccggacggcgacgtttttacgatttcgagatgcatcatgctgacgcccctgctgaccggcggcagcaaatacgcgcatctgtccgaacggaccctgcctttgccctcggtcgtcgagtatccgctgatcatgctggagcgaaaaagcaacgggcgtgtccagctggataaattcatggaaagcgtcggtgtcacgctgagaccgatctacgaattgggcagcgtcgacctggtgctgaatttcgtaagaaacaaccacggtctgacattcgttcacgaagagctctgcggacgcctaatcgacggggaaaggctgtttgggatcgaaacggatccaaggccgccgcaaagcgagctgctgatgatcgagctgaagggcgtgccgatttcccacgcggcgaacagcttcaagcagtttgtcctcgaaaacggaaaattacttgcgctgagttga

SEQ ID NO: 73704 - protein, 237 aa, Unknown
  Obtained from environmental sample
  DOMAIN (24)...(232): LysR substrate binding domain
  misc_feature (1)..(237): Xaa is any amino acid
MLFEELTKAFAHIETAERKLGSLLNLDSGRVSLSAGDTVCNYYLMPMMSAFSKKHPSINFEITNRTSPETLDLVRARKVEIGFANICPDGDVFTISRCIMLTPLLTGGSKYAHLSERTLPLPSVVEYPLIMLERKSNGRVQLDKFMESVGVTLRPIYELGSVDLVLNFVRNNHGLTFVHEELCGRLIDGERLFGIETDPRPPQSELLMIELKGVPISHAANSFKQFVLENGKLLALS

SEQ ID NO: 73705 - DNA, 795 bp, Unknown
  Obtained from environmental sample
  misc_feature (1)..(795): n is a, c, g, or t
atggacgatctgatccagaccgctctcctgcacgccgaggctctcaagatattcgatccgctccgcggcgctcatgtcgatcagctcctcttcgatcttggcgcagatcttgacgacgagccccgaatttcctgcgagccccgcgctggagccagtactttctgcgagcgcgcgcagtgcccgcacgtaaacattatcctcagcaagcgaagcctcgtccacgttggcgccgtagatcaccggcttgcccgagagaaagcgcatctcctggttcaggttcgcgtactcctcgcttgcggcgtccttgaaggacgaagcgggcgcgccggtatcaagatgcgcgaagagccgtttcgcgagatccaactggggcgccagttttttatccgtgcgcgcctgcttatccaaacgctcgatccgcttctcgagggattgcagatctgcaaggatgagctcggtgttgatcaccgcgacatcgcgcgcgggatccactccgccatccacgtggatcacgttggcgtcgtcgaaacagcgtaccagatgcaggatggcggcgcattcgcgtatattcgcgaggaactgattgccgagcccctcgcccttcgacgcgcccgcgaccagaccggcaatatcggtgaacgaaaccagggcgggaatgatctccttgggtttcactatcgctgccagagcgccgaggcgcgcgtccgccacgggaacaagcgccgaatgcgcgttgatcgtacaaaacgggataattcgccgcctcggcattccgcgccgaggtcaaggcgttaa

SEQ ID NO: 73706 - protein, 264 aa, Unknown
  Obtained from environmental sample
  misc_feature (1)..(264): Xaa is any amino acid
MDDLIQTALLHAEALKIFDPLRGAHVDQLLFDLGADLDDEPRISCEPRAGASTFCERAQCPHVNIILSKRSLVHVGAVDHRLAREKAHLLVQVRVLLACGVLEGRSGRAGIKMREEPFREIQLGRQFFIRARLLIQTLDPLLEGLQICKDELGVDHRDIARGIHSAIHVDHVGVVETAYQMQDGGAFAYIREELIAEPLALRRARDQTGNIGERNQGGNDLLGFHYRCQSAEARVRHGNKRRMRVDRTKRDNSPPRHSAPRSRR

SEQ ID NO: 73707 - DNA, 828 bp, Unknown
  Obtained from environmental sample
  misc_feature (1)..(828): n is a, c, g, or t
ttgtttacatccagagcgttacgcaatatagacattcttattgaaaacattaaaaaatatcctgagccattacagcgagctttgtatttgactctaacatctgcgtcagggcaaatgacatcaatggtttttgctataactaacagaggaaaaactaaaaatatcgttagtgataaaatagaagttggaagctgggtgattggattttggagaccaaaattacattttgaaattaatgtttggaattgttttgaaaataaagcaaataaactttataaagcgttaaaaaaaatttcagaagaaaaatgtatactctatgataaagtaaatgatttaattatgtctaaagaaggggcttgtattattaatagtaattgtcttaatgttttaaaatccatacctgataattccattcagcttatttgtactgatccgccgcatagcgatcgaattccttatcttgaattaagtgaaatttggaacgccatccttaatagtaatgtcttttttgatgatgaaattgttgtatcaaatgctaaagaacgcaataagaataaaatcaattatacaagagatatggaaatatttattcgggaagtgaatagaatattaaaaacagaagggatatttttactttattttaacgctcgggataaagaaagttggaactttctggaagtgctaaaatcatctggcgacttagaattttccggactctttccgatggaatattctactaattctgttgttcaggataatagaaaaggcggattgaaacatgattatgttctggtaataaagcatanaaaattcatctgttttatctag

SEQ ID NO: 73708 - protein, 275 aa, Unknown
  Obtained from environmental sample
  misc_feature (1)..(275): Xaa is any amino acid
MFTSRALRNIDILIENIKKYPEPLQRALYLTLTSASGQMTSMVFAITNRGKTKNIVSDKIEVGSWVIGFWRPKLHFEINVWNCFENKANKLYKALKKISEEKCILYDKVNDLIMSKEGACIINSNCLNVLKSIPDNSIQLICTDPPHSDRIPYLELSEIWNAILNSNVFFDDEIVVSNAKERNKNKINYTRDMEIFIREVNRILKTEGIFLLYFNARDKESWNFLEVLKSSGDLEFSGLFPMEYSTNSVVQDNRKGGLKHDYVLVIKHXKFICFI

SEQ ID NO: 73709 - DNA, 780 bp, Unknown
  Obtained from environmental sample
  misc_feature (1)..(780): n is a, c, g, or t
atggttctcaaattggatgagagtacacctcgcattgcgttgtacggtataaacggtggcgtcggtgtttgggctgaggaaggcaaaccatttgcctacttccgtggctatggcgttcaaacttggaatggaaaaatcattgtgaatgcaaccggtcgtccgttagcggcaacgacggaatctgaaatgggaagcagtcaacacgactacaccatgggattcaacacatctgccagctacaaaggattttatttttcggcacaatttgatttccgtaaaggtggattattcttttccagaacggccagcattaatgactttatcggaaacaacatccgcacattgtacaacgaccgtaatccgtttatcgttcctaactctgtaatggtcaatccggcttataatgcaaacgacccgaattcaggtattccgcaatacatcgaaaacacgattgctatagataaaacccgttacaacgagttctggaattatggcggtttctcaaacaatgcaaacaacttgattgacaaaacatcgttccgtgctcgcgaaatagtattgggctaccgcttgccgcttcaatatctctcaaaaacaccattcacagcgattgatctcagcattgtgggtcgtaatttgtttgtttgggtgccttcatccaacatgtatatcgacccggatgtaactaccgccggtaatggcgttggagcgcaattcggtgaattttcgggatatccgactacacgcagttggggtttctctcttaaagcatccttttaa

SEQ ID NO: 73710 - protein, 259 aa, Unknown
  Obtained from environmental sample
  misc_feature (1)..(259): Xaa is any amino acid
MVLKLDESTPRIALYGINGGVGVWAEEGKPFAYFRGYGVQTWNGKIIVNATGRPLAATTESEMGSSQHDYTMGFNTSASYKGFYFSAQFDFRKGGLFFSRTASINDFIGNNIRTLYNDRNPFIVPNSVMVNPAYNANDPNSGIPQYIENTIAIDKTRYNEFWNYGGFSNNANNLIDKTSFRAREIVLGYRLPLQYLSKTPFTAIDLSIVGRNLFVWVPSSNMYIDPDVTTAGNGVGAQFGEFSGYPTTRSWGFSLKASF

SEQ ID NO: 73711 - DNA, 807 bp, Unknown
  Obtained from environmental sample
  misc_feature (1)..(807): n is a, c, g, or t
ttgaaactaaaattgtatctgcgtcaaacaaacgctaatccgagcgtagccaatgccggtatcaccgcttgtttggccgacccaatcggttttgtaaccgaagccaaagttgctgtttttacaagcgccaacggaaaatacaatcctttttatggaaccaacattgcgtcgaccggtttgggcattcacaaccacagagccagcaacaccatggttaatttcctaaaggataatgccgataccaaccgtctcaaggcattctacacagcaggttcatctgcaggtggacaactccttggattggaccaaggcgactttaacaacaccactccgggttcaacttactttgcaaccggcaaatggggtacaaccgaaccggtctatttcttctccgaacctcaagtgaaattcatgcttgcagaggctaaagaacgtatcggacaagacggtaaaaccgactatgaggcaggcgttttggcatcgttcaccatgcgcaatgctgaaggcggcagcacgtttattgctcccggcggcgtttatgaatatccgaccgatgcaacggccaaaattaaagcgatcatcacacaaaaatgggtggcctcttgtttaatcagtacctgtatcgaatcgtggtttgaccattctcgcaccggttaccccgacttctggaccgtatcgaaaaactccgtactgccgaacagcgaagcgctacccaaacgctttatctatccgctcagagaagtgaataataatcctaatacacctgctcttgtggctgtgtatgttcccgtatggtgggcaaaataa

SEQ ID NO: 73712 - protein, 268 aa, Unknown
  Obtained from environmental sample
  SIGNAL (1)...(26)
  misc_feature (1)..(268): Xaa is any amino acid
MKLKLYLRQTNANPSVANAGITACLADPIGFVTEAKVAVFTSANGKYNPFYGTNIASTGLGIHNHRASNTMVNFLKDNADTNRLKAFYTAGSSAGGQLLGLDQGDFNNTTPGSTYFATGKWGTTEPVYFFSEPQVKFMLAEAKERIGQDGKTDYEAGVLASFTMRNAEGGSTFIAPGGVYEYPTDATAKIKAIITQKWVASCLISTCIESWFDHSRTGYPDFWTVSKNSVLPNSEALPKRFIYPLREVNNNPNTPALVAVYVPVWWAK

SEQ ID NO: 73713 - DNA, 510 bp, Unknown
  Obtained from environmental sample
  misc_feature (1)..(510): n is a, c, g, or t
ttgatggccgagccgcatatttgcatgaacaaccgcgtagccaaagccaaagttttatttgccacacattatcatgaattgaatgatatggcagaccaatttccgcgtattaaaaattaccatgtttctgtgaaagaaattgacaatcgtgtcatatttctgcgcaaactgaaacccggcggtagcgaacacagtttcggaatccatgtggcacgcatggccggcatgccgcaacgtgtattgacacgtgcagaagaaattttgaaatggttggaaaagtcgcatgaaacatccgttggaaatgaaaaaacatccgttgtagaggcacaaaattttgtgcctctacaaccccaatccctggattaccaattatcgttcatccaattggacgatccgttattggaggaaatcaaaaacgatattttgaataccaacatcgataccctcacgccggttgaggctttgatgaaattacacaccataagaggtttattacaacgaaaaaattaa

SEQ ID NO: 73714 - protein, 169 aa, Unknown
  Obtained from environmental sample
  DOMAIN (2)...(94): MutS domain V
  misc_feature (1)..(169): Xaa is any amino acid
MMAEPHICMNNRVAKAKVLFATHYHELNDMADQFPRIKNYHVSVKEIDNRVIFLRKLKPGGSEHSFGIHVARMAGMPQRVLTRAEEILKWLEKSHETSVGNEKTSVVEAQNFVPLQPQSLDYQLSFIQLDDPLLEEIKNDILNTNIDTLTPVEALMKLHTIRGLLQRKN

SEQ ID NO: 73715 - DNA, 795 bp, Unknown
  Obtained from environmental sample
  misc_feature (1)..(795): n is a, c, g, or t
ttgaaaaattcatcaaatttgtacaaaatgatgatcatggcagttgaattctgtctcaaaaggcataaagaagaaaaaaatgctaaatcgcatgaaaaagatatagttaaacaacttggattctctcctaaagaaaatgaatcaggggtattctgtaagaaatataataatggatatataattgaagttgattttgaaaatgaatcaattaattatgggaaaaaaataaaagccgaaagcaaaaccacgcagaatttttcacagccagaaaactttgttgtgcttgaatgtgtgaatagattgttggaaaaagggtacaaacctgaaaatattattcttgaaaaaacgtatcctttggggcatggctccgggcgattggatatacttgttacacgcgaaaatggagccgcttatttgatgattgagtgcaaaacttatggcaaagagtttgacaaggaattaagaaatactcaaaataacggcggacaactctttagttattttcagcaaaataccaaaacagaactattgatgctttatgcctcagaaatcaaggggaataatattgcatacaggaatgaaataataaaaatagaagacgattatcgtgtgggcaatgttaaggatttttacgaaaaatggaacaaattaaccaaggacaatggggtgtttgatgaatgggtaaagccctattgttttaaaagtaaagcattaactatcaatgaacttgaagatataaaacttgaagacagcggttttatttttaaccgggtttttggaaattttacgtcataa

SEQ ID NO: 73716 - protein, 264 aa, Unknown
  Obtained from environmental sample
  misc_feature (1)..(264): Xaa is any amino acid
MKNSSNLYKMMIMAVEFCLKRHKEEKNAKSHEKDIVKQLGFSPKENESGVFCKKYNNGYIIEVDFENESINYGKKIKAESKTTQNFSQPENFVVLECVNRLLEKGYKPENIILEKTYPLGHGSGRLDILVTRENGAAYLMIECKTYGKEFDKELRNTQNNGGQLFSYFQQNTKTELLMLYASEIKGNNIAYRNEIIKIEDDYRVGNVKDFYEKWNKLTKDNGVFDEWVKPYCFKSKALTINELEDIKLEDSGFIFNRVFGNFTS

SEQ ID NO: 73717 - DNA, 324 bp, Unknown
  Obtained from environmental sample
  misc_feature (1)..(324): n is a, c, g, or t
ttgaaggagcacggataccacgcgcacaagcagatctcctcatcgggagcgctggcgaggataatagggcagttgaaaaacggcgagttcggcagacacaacgtcctgctcgacagcctgctccaccacaacgacaaatacatgacgctggccgatttcgcaagctatctgcgggcgcacgagagcgccgagaagctctacgcgaaccaaaccgaatgggcgcggagcgcactcgtcaacatcgcgaactgcggctatttctcgagcgaccgggcgatcgcgggatacgcgaaggacatttgggaaatcgaggaggttcgatga

SEQ ID NO: 73718 - protein, 107 aa, Unknown
  Obtained from environmental sample
  misc_feature (1)..(107): Xaa is any amino acid
MKEHGYHAHKQISSSGALARIIGQLKNGEFGRHNVLLDSLLHHNDKYMTLADFASYLRAHESAEKLYANQTEWARSALVNIANCGYFSSDRAIAGYAKDIWEIEEVR

SEQ ID NO: 73719 - DNA, 627 bp, Unknown
  Obtained from environmental sample
  misc_feature (1)..(627): n is a, c, g, or t
atgggcgcggagcgcactcgtcaacatcgcgaactgcggctatttctcgagcgaccgggcgatcgcgggatacgcgaaggacatttgggaaatcgaggaggttcgatgacggacacaatcttcgcgctttcctccggcgcgggaatctccggggtcgcggtgttccgggtaagcgggggcaatgcaaaaaaaatcctcgcccgattgaccggacgcaaagagtgggcggcgaatgtcatcgcgcgggcggacataaaaaatccggcggacggcgcgctaatcgacaaggccatggccgcgtttttcaaatcgccgaaaagtttcacgggcgaagactgcgcggagattttcgcgcacggcggcctggccgtaatcgaagccgtgtatcgcgcccctcgcggatacgaaactcgcgcggctcgcgaagcccggggaattcgccaggcgcgctttcatgaacgggaaactctcgatacaagaggccgaggcgctcgcggatttgatacatgccgagaccgagcagcaacccaagctcgcgctcttgaccatggaaaaaacctcccaggaactttacgccaaatggcggaacgagcttgtggttttgcttcccaaccccgaagcccatga

SEQ ID NO: 73720 - protein, 208 aa, Unknown
  Obtained from environmental sample
  misc_feature (1)..(208): Xaa is any amino acid
MGAERTRQHRELRLFLERPGDRGIREGHLGNRGGSMTDTIFALSSGAGISGVAVFRVSGGNAKKILARLTGRKEWAANVIARADIKNPADGALIDKAMAAFFKSPKSFTGEDCAEIFAHGGLAVIEAVYRAPRGYETRAAREARGIRQARFHERETLDTRGRGARGFDTCRDRAATQARALDHGKNLPGTLRQMAERACGFASQPRSP

SEQ ID NO: 73721 - DNA, 492 bp, Unknown
  Obtained from environmental sample
  misc_feature (1)..(492): n is a, c, g, or t
atgaaaggaaattccaaagccaagcaggataaaccaaaacctaagctacttgacataaaaaccgagttgcttattccatactctaaaaacgcccgcacccattcgccggagcaaatagagcaagtcgccaatagcataattaggtttggattcacaaaccctattttgatacaacccgataatacagttgttgcggggcattgcaggcttgaagcggcaaagaaaatagggcttaaatccgtgccttgcattgtgcttgaaaatttgaccgccgagcaatgcagggcgttggttattgccgataataaacttgccttgaacgctggttgggattttgaattgcttgcaagcgaattagcggagttgcaaaaacttgattttaatttagacacaatgggttttagcgatgctgaatacaaggaaattttagacggcttggataatttggaaaactctcaaaataaaaaagggggggctcgtgccgaatgctga

SEQ ID NO: 73722 - protein, 163 aa, Unknown
  Obtained from environmental sample
  DOMAIN (17)...(102): ParB-like nuclease domain
  misc_feature (1)..(163): Xaa is any amino acid
MKGNSKAKQDKPKPKLLDIKTELLIPYSKNARTHSPEQIEQVANSIIRFGFTNPILIQPDNTVVAGHCRLEAAKKIGLKSVPCIVLENLTAEQCRALVIADNKLALNAGWDFELLASELAELQKLDFNLDTMGFSDAEYKEILDGLDNLENSQNKKGGARAEC

SEQ ID NO: 73723 - DNA, 402 bp, Unknown
  Obtained from environmental sample
  misc_feature (1)..(402): n is a, c, g, or t
gtggggaatagtctaaggcacggttttattgagcatataaccgagtggagtttagagggaatcaagcgcaagcaaaaagacaaagaggcaatgccattgtgcaggcgttgcgaaaaatgcttcattgtttttccagttgcaaaaaaacaatgccccgaatgtggcggccagcctgttttgagccgcaaggaattaaaaaagatacagggcgaattgcaaaaaatggaagcgataaaattgaaatcggccactaaaaaagaaaggtgggaggcaaaaacattagaggaattaatcgctctcggcaaattaagaaactataaaaagccctatgcgtgggcgcagcatattttaaacggaaggaggataaaaaatgaaaggaaattccaaagccaagcaggataa

SEQ ID NO: 73724 - protein, 133 aa, Unknown
  Obtained from environmental sample
  misc_feature (1)..(133): Xaa is any amino acid
MGNSLRHGFIEHITEWSLEGIKRKQKDKEAMPLCRRCEKCFIVFPVAKKQCPECGGQPVLSRKELKKIQGELQKMEAIKLKSATKKERWEAKTLEELIALGKLRNYKKPYAWAQHILNGRRIKNERKFQSQAG

SEQ ID NO: 73725 - DNA, 492 bp, Unknown
  Obtained from environmental sample
  misc_feature (1)..(492): n is a, c, g, or t
atgcgaattgtgattgacaacaaagagcaacagccttacagcttcaccggccagcgctatgccggaaccatcatcgagccggggacactgccaaccggcgattacagcctgagcggcctggctgaccgggtggcggtggagaggaaaagccttgatgacctggtggcctgtttgagtagggagcgtgaacgctttgtcagagaattggaacgggccaaagcgcttgacttctttgccgtggtctgtgaatgcacctgggcaaatatcacgggcggcaattaccgcagtcagcttaattcccatgcggccagccaaagcttgctaagcttcatgtccaaatacggctatccgattatttttgccggcaatcgggacggggctgaatacgccacgcatggcctcctgcgccattatttgcaaggggtatataaacggctggccgccatacaaaaggctcatggcggggctgacaattcctctggggccacatag

SEQ ID NO: 73726 - protein, 163 aa, Unknown
  Obtained from environmental sample
  DOMAIN (2)...(86): ERCC4 domain
  misc_feature (1)..(163): Xaa is any amino acid
MRIVIDNKEQQPYSFTGQRYAGTIIEPGTLPTGDYSLSGLADRVAVERKSLDDLVACLSRERERFVRELERAKALDFFAVVCECTWANITGGNYRSQLNSHAASQSLLSFMSKYGYPIIFAGNRDGAEYATHGLLRHYLQGVYKRLAAIQKAHGGADNSSGAT

SEQ ID NO: 73727 - DNA, 387 bp, Unknown
  Obtained from environmental sample
  misc_feature (1)..(387): n is a, c, g, or t
ttggaattgcaagatttatcaaacgtgtgcaatccaaaatctaaagtaattttctgtcttgcgattgaagaatttgaagcatggtaccttggtgatttgaatgcagtgcgagaagcttatcctaaagcccaaaataaggttttgaataattataaaaatgatgaaatttgtggtacatgggaagttcttgccgatgcagtttatcctggtggtagcaaagaactgaaaaaaggtggagttggtaaacaaaaatttatttgggcggaaacaatcagcccgcacatgaatgtcgataataaccgttcacctagttttaacgaaatgtacgcgcaactaaaagatattgtaacatccgccaacaacataactggagatattcagtcatga

SEQ ID NO: 73728 - protein, 128 aa, Unknown
  Obtained from environmental sample
  misc_feature (1)..(128): Xaa is any amino acid
MELQDLSNVCNPKSKVIFCLAIEEFEAWYLGDLNAVREAYPKAQNKVLNNYKNDEICGTWEVLADAVYPGGSKELKKGGVGKQKFIWAETISPHMNVDNNRSPSFNEMYAQLKDIVTSANNITGDIQS

SEQ ID NO: 73729 - DNA, 528 bp, Unknown
  Obtained from environmental sample
  misc_feature (1)..(528): n is a, c, g, or t
atgactagttctcatgggtcaaaaaacgttggcattttagacaccgcgcctacaagcggccttccgatttggcgcaacgttatagaaccgcaccccgatgtggcgaaagggcagtacaagaacgccgagtttgccgccgaccttgcggtggtggctcggggcgagggtacgcctgtatatggcgaccctatggagtttttcgcccgtacctacgttacatccggcatggcggggcttttggagcaggcgttgcgtcgtgtttgcggcttggacggggagcctgtcattcagctcaagactgcgtttggcggcggcaagacccatagtatgctcgcgttgtaccatataatgggcggcggtgtgtcggttgatagaatcccggatgttcgtccgattcttgatcgggtgggcgtggcggcgctgcctaaggccaacattgcggttttagtcggtacggcgcttgatcctactaagagcaggcgtccaaataatatgcccggtgttaccgtcaatactttgtgggggtga

SEQ ID NO: 73730 - protein, 175 aa, Unknown
  Obtained from environmental sample
  misc_feature (1)..(175): Xaa is any amino acid
MTSSHGSKNVGILDTAPTSGLPIWRNVIEPHPDVAKGQYKNAEFAADLAVVARGEGTPVYGDPMEFFARTYVTSGMAGLLEQALRRVCGLDGEPVIQLKTAFGGGKTHSMLALYHIMGGGVSVDRIPDVRPILDRVGVAALPKANIAVLVGTALDPTKSRRPNNMPGVTVNTLWG

SEQ ID NO: 73731 - DNA, 897 bp, Unknown
  Obtained from environmental sample
  misc_feature (1)..(897): n is a, c, g, or t
gtggagcacgaaatgagggaacgcttgaaaaggcttaggaaggagccgccgtttacaggtattcacgtttgtccggcgtcctcgtttgacgtgccggacgagcagagcgtcaggcttgtaatattacgtccggttgacgagtacaggtcaaccgatcagtgcggctgcgcggcgatgactgtgattaaagatatgtttaacaatcgcggcaactccccacgtatctaccgcaatacgctcgcgttcatagctcccgatcagggggcgatggtttcgctaaaacaggcggtacggctatatatcgcttggaagtccatcaagaacgactgtgtggacctgaatttggacgcggcgcaaaatcgcgagaccgacggcaatctcagtcgcgccgacagaaccgtggacgacatggtaaaggaagcgtattgttggctgcttgtcccgtatatcaacaaggacgacatgaaaaccatagtttgggaatcagtccgaatcagcggcggtagcgacggtattatcgctaaggcggccaagaagatgctccaagatgaaaccgtcattatgcgatgggctccggctcttctcaaaatggagttagacagccccagttactccctttggcgtgacgcggatcgcatttctattaagaagctctgggatgatctttgtacatattgctacctcccgcgtcttgttagttttgatgttttagaggcggctatccgtgacgggttgaattctacggaatacttcgcgtacgcggcggggattgacggcgagaggtatcttggattgaagttgaataatcgcgttgacacaatagatcgttccggttatttggtgaaaatagacgcggcgcagaaacagatcgatgcggaaatagaggcgaagcgttga

SEQ ID NO: 73732 - protein, 298 aa, Unknown
  Obtained from environmental sample
  misc_feature (1)..(298): Xaa is any amino acid
MEHEMRERLKRLRKEPPFTGIHVCPASSFDVPDEQSVRLVILRPVDEYRSTDQCGCAAMTVIKDMFNNRGNSPRIYRNTLAFIAPDQGAMVSLKQAVRLYIAWKSIKNDCVDLNLDAAQNRETDGNLSRADRTVDDMVKEAYCWLLVPYINKDDMKTIVWESVRISGGSDGIIAKAAKKMLQDETVIMRWAPALLKMELDSPSYSLWRDADRISIKKLWDDLCTYCYLPRLVSFDVLEAAIRDGLNSTEYFAYAAGIDGERYLGLKLNNRVDTIDRSGYLVKIDAAQKQIDAEIEAKR

SEQ ID NO: 73733 - DNA, 681 bp, Unknown
  Obtained from environmental sample
  misc_feature (1)..(681): n is a, c, g, or t
gtgaaattcagaaaaataattgataagctactcatggttctacctgaagacaaaagtaataatttatctttttctccgacacctgcaagtgtacccgattttttatttaatccaagtattcaaatagattcaaacattgatattgaaataaatagagctataaaaaataaagaagttattgaaatagaatactggatttctgataatagaaaatatgtaaaacaaaatattgaacctttatacattttttttcaaagacataattattatttattggcatggaaaaacgataaccacgacaaacccggaatatattctataaatagaataaagaaagtgaatgatacaggtaaaaattttaatattccagttaattttaaggtttcggattatataaaaatggaagctaatgtttcccctacggataataaattatatcattttgaattatcttttccaagaaattttgcctctgaggcgattgaaaaaacgtattatcataatcagcagataaaactatgcgaagacggaacagtttatgtatcgtttaggtcaactcaattacatggggttttctattggattttaagtcaagggcaaaaggtaaaagttttaaatccgccggaattggtaaatatgattaagaaggaggtacaaaaagttgtcaaatattatgtataa

SEQ ID NO: 73734 - protein, 226 aa, Unknown
  Obtained from environmental sample
  misc_feature (1)..(226): Xaa is any amino acid
MKFRKIIDKLLMVLPEDKSNNLSFSPTPASVPDFLFNPSIQIDSNIDIEINRAIKNKEVIEIEYWISDNRKYVKQNIEPLYIFFQRHNYYLLAWKNDNHDKPGIYSINRIKKVNDTGKNFNIPVNFKVSDYIKMEANVSPTDNKLYHFELSFPRNFASEAIEKTYYHNQQIKLCEDGTVYVSFRSTQLHGVFYWILSQGQKVKVLNPPELVNMIKKEVQKVVKYYV

SEQ ID NO: 73735 - DNA, 837 bp, Unknown
  Obtained from environmental sample
  misc_feature (1)..(837): n is a, c, g, or t
atggaaggtgtactaacatatgggtctaaaaatgaagatataaataataaaataaaaaataaagatggtaatataacaagacaattcacaggattttataacaaaataaattatgtgtatattcctgctgtaagagacagaaattttattaaatatttatttcaattatttgaagatattataagagccgatacaataagagataatcaactaaacaaatctatcaaggaaatatcagagatattacaatcaaaagctggtgacatcagtactagttttggagagtttatcaatttacaaacaagtgcctctctttcttcgaatatgaaagatatcctaggtgcggtaactataaatgtagaaaatccagatataatagaaaaatataagaaaatttcaaatgttgatatattttcatcaggcgacgggattctaatgtcttatataatgtattttattgcatatatgtcttctaaaatttctaatagatattatatttggggatttgaagagccggaaacagcactggaatattcaaaggcacaatcattggcagatacttttttcaatgactttgctgaaaaagctcaaatatttataacaacgcattcaccagcatttatcaaattaaaagataaacccttaaaagtagcgttttatagggtctttcaaactacaggtaaggaccaaagattacttacttatgctaaagaaatacaagaaataaaacaagacctattttcaaatgaaaatgaatctgaagtatataaacttttacaagaagaattgcatatggtagaacaagccaaagaaatgaaaagcctcggccgattctga

SEQ ID NO: 73736 - protein, 278 aa, Unknown
  Obtained from environmental sample
  misc_feature (1)..(278): Xaa is any amino acid
MEGVLTYGSKNEDINNKIKNKDGNITRQFTGFYNKINYVYIPAVRDRNFIKYLFQLFEDIIRADTIRDNQLNKSIKEISEILQSKAGDISTSFGEFINLQTSASLSSNMKDILGAVTINVENPDIIEKYKKISNVDIFSSGDGILMSYIMYFIAYMSSKISNRYYIWGFEEPETALEYSKAQSLADTFFNDFAEKAQIFITTHSPAFIKLKDKPLKVAFYRVFQTTGKDQRLLTYAKEIQEIKQDLFSNENESEVYKLLQEELHMVEQAKEMKSLGRF

SEQ ID NO: 73737 - DNA, 657 bp, Unknown
  Obtained from environmental sample
  misc_feature (1)..(657): n is a, c, g, or t
gtgggctacacgtggatgacgggtccgactgtgatgacgacgcacgtctcagagatgctgaaacagcgggcgccagagctgctgggcaggcaggaggtgcagaatctcctggacaacctaaaggaatcttctcncaagctggtggaggaactggtgccgggtgtggtgccgatcccaatcctgctgaaggtgctacagaacctgctgaaagagcgcgtctcgataagggatctgggcaggatactggaatcaatcgccgacgcgataagcctcacgcgggacccgataacgctgacggagtttgtaaggcagccgcttggccgtgctataaccagtccttatctgtccgaggtcaacgagctgggtgtgttggtgctggatccctccatagagcaggcactgcagcagtccgtcgagacttccgaaagaggcagcttcctagcgatggaaccaaacagaatacaggaaatacttacgcggataacaaagagcatcaacgacctgttgccgggagcgcagccggtgctgctgaccaaccccattgtgaggccgcatttgttccgcctgctggagagggccatgccacagttggtggtgctgagccactccgaggtgccgttggatgtaagggtagtgagtctggggacggtgtcgtga

SEQ ID NO: 73738 - protein, 218 aa, Unknown
  Obtained from environmental sample
  DOMAIN (2)...(211): FHIPEP family
  misc_feature (1)..(218): Xaa is any amino acid
MGYTWMTGPTVMTTHVSEMLKQRAPELLGRQEVQNLLDNLKESSXKLVEELVPGVVPIPILLKVLQNLLKERVSIRDLGRILESIADAISLTRDPITLTEFVRQPLGRAITSPYLSEVNELGVLVLDPSIEQALQQSVETSERGSFLAMEPNRIQEILTRITKSINDLLPGAQPVLLTNPIVRPHLFRLLERAMPQLVVLSHSEVPLDVRVVSLGTVS

SEQ ID NO: 73739 - DNA, 645 bp, Unknown
  Obtained from environmental sample
  misc_feature (1)..(645): n is a, c, g, or t
ttgttcggtgttttgggttccaacggaattgtaaaaaatcttggcgtgatagattcctacatcagttgcggtggcagcacttggtgggtaggtggaattgtaggagataattatggcaccataaggaacagctattcatcggcttggcttacagctccacagtatgtaggcggtcttgttgggcgcaactacggcactataagcaacagctattccactggcaaagtgaatggaactggcaatatcggcggacttgtgggtcaaaacaattattcaacctcaaatggtactggaaaaatagagaatagttattccacaggtttggtaactagaacatctgggactaatatcactttcggcggtcttgttggagctccgtttataaccaatagcatcataaccaacagttactacgataaaacaacaagcggtcaaactgatacaggcaaaggcgaaggcaaaaccacggaggagatgaaactgcaagcaacttttgtagcttgggattttgcaaatatttggagcataagctctgcaataaataacggttatccagagttgaaatggtcagcttgttcagttggcggcggtgcatgggaaaatggaacttgcaagatgccgggagtatttccagcccaaatctag

SEQ ID NO: 73740 - protein, 214 aa, Unknown
  Obtained from environmental sample
  DOMAIN (52)...(77): The GLUG motif
  misc_feature (1)..(214): Xaa is any amino acid
MFGVLGSNGIVKNLGVIDSYISCGGSTWWVGGIVGDNYGTIRNSYSSAWLTAPQYVGGLVGRNYGTISNSYSTGKVNGTGNIGGLVGQNNYSTSNGTGKIENSYSTGLVTRTSGTNITFGGLVGAPFITNSIITNSYYDKTTSGQTDTGKGEGKTTEEMKLQATFVAWDFANIWSISSAINNGYPELKWSACSVGGGAWENGTCKMPGVFPAQI

SEQ ID NO: 73741 - DNA, 372 bp, Unknown
  Obtained from environmental sample
  misc_feature (1)..(372): n is a, c, g, or t
atggaatatagagaattgacagaaaaaatcataaaatgtgctatggatgttcatactgcctttgggcctggcttattggaaaatgcatataaagaatgtctgtatcataagttgtgtaaggaaggtttgtctgtaaaaaaagagtggcctttgccattggtttttgaagaaattagccttgattgtgggtatagggtagatttgcttgttgaagataaggtagttattgagttaaaaagcgtaaaaaagatagatgacattcatttagctcaaattctgacttacctaaagctggggaaatttaaagtcgggctgataataaattttaacgtatcttcgttgaaggacggtatcaagcgtgtggttaattag

SEQ ID NO: 73742 - protein, 123 aa, Unknown
  Obtained from environmental sample
  misc_feature (1)..(123): Xaa is any amino acid
MEYRELTEKIIKCAMDVHTAFGPGLLENAYKECLYHKLCKEGLSVKKEWPLPLVFEEISLDCGYRVDLLVEDKVVIELKSVKKIDDIHLAQILTYLKLGKFKVGLIINFNVSSLKDGIKRVVN

SEQ ID NO: 73743 - DNA, 912 bp, Unknown
  Obtained from environmental sample
  misc_feature (1)..(912): n is a, c, g, or t
ttgctcaacaaggcaaacgcagaatttagagctgccaaaatgaaagaatttgagcgggaagaattgtcggtgcctttccgttttgcatgggcgcagcgcatgaacggcaaccgcatggacgccgacgctgattttgtcgctttcgcaaaatcgttcgatttgaacgacccgaaaaatatggaaataacagaaatggtgcttcgctggtatctcggatgtgaacccaagagcgacgaacctatgttggtcagaagaatgaagcagttgccgctaatgattaccaaccaagaggtgattaataaactggcggaacaacttatggacgatgacctgatgatgggcggttctcccggttctcctgccgcattcgaactgttcaagcaactctctacggataaggaagcgctcgaaacgataacaaccgcctttaatcgggtggtgagactgtcgaaaggcacacctgccattgattttgaaatgcaggacgcgcaagggaaaaaggtgcattttcgggatgtaatcggtaaaggcaaagtaacgtatatcgacttctgggctacgtggtgcggtccctgcaaacaggaattgccgcactttgaaaagctggtggagaaatacaaagataatccgtacttggaatttataagtatctcgctggatgataaattggataaatggctcgcccacctggaagccgacaagccgacgtaccggcaatatgttatacccgacaatttcaaatccacttttgccaaggaatacggtgtttcaggcattccgcgctttatggcattcgataaggccggcaagattttcgacattgccgcaccgcgtccgtccgacaaaatattgatgacttcctcgcgtctgcccttgaataaaaacaatcacgcatgctcagagtcgtcctga

SEQ ID NO: 73744 - protein, 303 aa, Unknown
  Obtained from environmental sample
  DOMAIN (165)...(290): Thioredoxin
  misc_feature (1)..(303): Xaa is any amino acid
MLNKANAEFRAAKMKEFEREELSVPFRFAWAQRMNGNRMDADADFVAFAKSFDLNDPKNMEITEMVLRWYLGCEPKSDEPMLVRRMKQLPLMITNQEVINKLAEQLMDDDLMMGGSPGSPAAFELFKQLSTDKEALETITTAFNRVVRLSKGTPAIDFEMQDAQGKKVHFRDVIGKGKVTYIDFWATWCGPCKQELPHFEKLVEKYKDNPYLEFISISLDDKLDKWLAHLEADKPTYRQYVIPDNFKSTFAKEYGVSGIPRFMAFDKAGKIFDIAAPRPSDKILMTSSRLPLNKNNHACSESS

SEQ ID NO: 73745 - DNA, 927 bp, Unknown
  Obtained from environmental sample
  misc_feature (1)..(927): n is a, c, g, or t
atgtcagcggcgccagcgacgcgacgtgcttttgacgccaatcagaataacgatcagggggtaacggtcaacctgacccttgagggaaccaataccctgcgtagcggcaacaataaagcgggcttgagagtttccccgaatacaacactggttattaccgaagcaagtaccggttcccttgatgtttcttcttcatacaatagtcagggtgcgggtatcggcggcaataataatgaatcaggcggcacgataactatcaacggtggtacggtaagcgcaggcggctggggtgcgggtatcggcggcggtaatggcggggcgggtggtacgataaccatcaacggcggtacgatatccgcaactggccgaaatgcgggtattggcggcggtaatggcggtgcaggcggtaccataactatcaacggcggtatagtatccgcacaaaatgatggtggtaacggtgcaggcatcggcggcggtaataacggtgcgggcggtaccattaccatcaacggtggaactgtgacagcaaccggttattatgcgggcagtggcgcgggcatcggcggcggtattggtggcgcgggtggtaccattaccatcaacggtggaactgtgacagcaaccggtggtggtaatggtggcgcaggcatcggcggcggttctgagggtgcgggcggcacagtaaccataacgggcgctacggtaaccgcaactatcaacactagttacagcaatgctgcgggcatcggcggcggtaataacaacagtacagccggtacaataaccatcagtaacaactcggtagtatttgccagttctattcagccggatcttaccgaaggtgataacgtaagtaattccattgtctttaacggcgttgtcggagccatgtatgggcaacgtccagcctggatcgggatgtaa

SEQ ID NO: 73746 - protein, 308 aa, Unknown
  Obtained from environmental sample
  misc_feature (1)..(308): Xaa is any amino acid
MSAAPATRRAFDANQNNDQGVTVNLTLEGTNTLRSGNNKAGLRVSPNTTLVITEASTGSLDVSSSYNSQGAGIGGNNNESGGTITINGGTVSAGGWGAGIGGGNGGAGGTITINGGTISATGRNAGIGGGNGGAGGTITINGGIVSAQNDGGNGAGIGGGNNGAGGTITINGGTVTATGYYAGSGAGIGGGIGGAGGTITINGGTVTATGGGNGGAGIGGGSEGAGGTVTITGATVTATINTSYSNAAGIGGGNNNSTAGTITISNNSVVFASSIQPDLTEGDNVSNSIVFNGVVGAMYGQRPAWIGM

SEQ ID NO: 73747 - DNA, 309 bp, Unknown
  Obtained from environmental sample
  misc_feature (1)..(309): n is a, c, g, or t
ttgatggtaatggtaccgcccgcaccgttattaccgccgccgatgcctgcaccgttaccaccatcattttgtgcggatactataccgccgttgatagttatggtaccgcctgcaccgccattaccgccgccaatacccgcatttcggccagttgcggatatcgtaccgccgttgatggttatcgtaccacccgccccgccattaccgccgccgatacccgcaccccagccgcctgcgcttaccgtaccaccgttgatagttatcgtgccgcctgattcattattattgccgccgatacccgcaccctga

SEQ ID NO: 73748 - protein, 102 aa, Unknown
  Obtained from environmental sample
  misc_feature (1)..(102): Xaa is any amino acid
MMVMVPPAPLLPPPMPAPLPPSFCADTIPPLIVMVPPAPPLPPPIPAFRPVADIVPPLMVIVPPAPPLPPPIPAPQPPALTVPPLIVIVPPDSLLLPPIPAP

SEQ ID NO: 73749 - DNA, 666 bp, Unknown
  Obtained from environmental sample
  misc_feature (1)..(666): n is a, c, g, or t
ttgcccatacatggctccgacaacgccgttaaagacaatggaattacttacgttatcaccttcggtaagatccggctgaatagaactggcaaatactaccgagttgttactgatggttattgtaccggctgtactgttgttattaccgccgccgatgcccgcagcattgctgtaactagtgttgatagttgcggttaccgtagcgcccgttatggttactgtgccgcccgcaccctcagaaccgccgccgatgcctgcgccaccattaccaccaccggttgctgtcacagttccaccgttgatggtaatggtaccacccgcgccaccaataccgccgccgatgcccgcgccactgcccgcataataaccggttgctgtcacagttccaccgttgatggtaatggtaccgcccgcaccgttattaccgccgccgatgcctgcaccgttaccaccatcattttgtgcggatactataccgccgttgatagttatggtaccgcctgcaccgccattaccgccgccaatacccgcatttcggccagttgcggatatcgtaccgccgttgatggttatcgtaccacccgccccgccattaccgccgccgatacccgcaccccagccgcctgcgcttaccgtaccaccgttgatagttatcgtgccgcctga

SEQ ID NO: 73750 - protein, 221 aa, Unknown
  Obtained from environmental sample
  misc_feature (1)..(221): Xaa is any amino acid
MPIHGSDNAVKDNGITYVITFGKIRLNRTGKYYRVVTDGYCTGCTVVITAADARSIAVTSVDSCGYRSARYGYCAARTLRTAADACATITTTGCCHSSTVDGNGTTRATNTAADARATARIITGCCHSSTVDGNGTARTVITAADACTVTTIILCGYYTAVDSYGTACTAITAANTRISASCGYRTAVDGYRTTRPAITAADTRTPAACAYRTTVDSYRAA

SEQ ID NO: 73751 - DNA, 480 bp, Unknown
  Obtained from environmental sample
  misc_feature (1)..(480): n is a, c, g, or t
atgtgctnatacagttccctatttatgttgnaaatgagcgcgatactgatggtagccgctttatgcatgcgcatctttggctattgggtatgccagatcgctcccanaattttgtcggtaccagcttttattcttatgcctattgttggagctttggcggttattggcagttattctttgtatgtaaatgtatttgacctttatgtaatgttctttatcggaattttgggctttgcgttggataaacttaaatacccggctgctcctgtggttctggggcttatccttggcccgatggtcgataacaatcttcgccgttcgcttttggcttctcaaggcagtcttgaaccgttttttaccaggcctatttgtattatcattcttgttatgattgcgttttcttttatttcccaaatgtctttttataagaaattgaaaaacgctgttagcagtgctttgaaaaaaggaaaagcatcatga

SEQ ID NO: 73752 - protein, 159 aa, Unknown
  Obtained from environmental sample
  SIGNAL (1)...(18)
  misc_feature (1)..(159): Xaa is any amino acid
MCXYSSLFMLXMSAILMVAALCMRIFGYWVCQIAPXILSVPAFILMPIVGALAVIGSYSLYVNVFDLYVMFFIGILGFALDKLKYPAAPVVLGLILGPMVDNNLRRSLLASQGSLEPFFTRPICIIILVMIAFSFISQMSFYKKLKNAVSSALKKGKAS

SEQ ID NO: 73753 - DNA, 948 bp, Unknown
  Obtained from environmental sample
  misc_feature (1)..(948): n is a, c, g, or t
gtgtacgcggtcgtcgcagggcataggcgtttggccgccgcgaagatcgcggggataaccgccgtccccgcgcgcgtgtttcagtacctgaccccgccgcagattcaggaaatccagatatccgagaacatccaccgcgccgatctgacacccgtcgaagaagccgaagtctacgcccgtatgcgcgacgaactcggcatgacggcggaggacgtcgcgctccgcgccggcaagtcgccgtcgcacgtcaggcggtatctcaacctgctgtcgctgccggaggacgttctcggcaaaatcgacggcggggaaatcctcatatcgaaggggatttacctcagcacgctgtccgcgcatatcgtggaaaagatcgtcaacggcaattacaagtacttgctgtataagagcgcgaaggagtttatctccgaagtccagcgtcttttcatgcgcgagctcgacagcgacccgccgttcgacaaggccaaggagtacaggtacgaaggcgcggtctatcccccttgcgcgaagtgtccgggccggaagcagatggcgctgttcccggaactgatcgaggaaagcgactgccccgacgaagactgctactacgcgaagcgcggcgcggtcgaagaggaggaggagaacaagaggagggccgccgcccgcaaatcgtcgggctccggcgacgggggcggcgggggcggcggggggttcgtcgatgatgacgacgaggaagtggagaaagaagaggcggaagaggagcgcanagagcgcatggaacgcgaagcgaaagcggcggctgaataccggcaggacgcgctaaaggataagaaagccgccgagtattacatagacttcatcctagcgaacgggggctttacgcacttacgcttcatagaagtggttagacatttnaactcgggacggtttcgcttcganagggaagtctaa

SEQ ID NO: 73754 - protein, 315 aa, Unknown
  Obtained from environmental sample
  misc_feature (1)..(315): Xaa is any amino acid
MYAVVAGHRRLAAAKIAGITAVPARVFQYLTPPQIQEIQISENIHRADLTPVEEAEVYARMRDELGMTAEDVALRAGKSPSHVRRYLNLLSLPEDVLGKIDGGEILISKGIYLSTLSAHIVEKIVNGNYKYLLYKSAKEFISEVQRLFMRELDSDPPFDKAKEYRYEGAVYPPCAKCPGRKQMALFPELIEESDCPDEDCYYAKRGAVEEEEENKRRAAARKSSGSGDGGGGGGGGFVDDDDEEVEKEEAEEERXERMEREAKAAAEYRQDALKDKKAAEYYIDFILANGGFTHLRFIEVVRHXNSGRFRFXREV

SEQ ID NO: 73755 - DNA, 846 bp, Unknown
  Obtained from environmental sample
  misc_feature (1)..(846): n is a, c, g, or t
atgaanggaggattancgatgggagaaggacattcaagattgtcgccgtcgaagacgcaccgctacgtgcggtgccccgtgtcggtgctgagggaagcgcattatcccgaggatacgtcgccctacgcggaggaaggccgtctcgcccacgagctcgccgccgcgaggctgacgggcgcgcccgatcccgcgggcgtgccgccggatatggtcgagccggttatgaagtacgtcgatacggtcagggcgatgtcgaggggcgcgtcggtggtccgcgtggaaacgcgggtgaatctggcgggcgtgcttgacgaaggggagagcggaacggtcgatttcttcgccattctcgacaaagaacttcaagtccacgacctgaagtacggcaagggcgagagggtggatgcagaggataacgagcagctcatcctttacgggttgggcgcgctgcccgtcgcggaggttttgtgcgagatcgagcgggtgcgcctcctcatccaccagccgcgcttaggctcggtgtcggaagtcgtctataccgttaaagagatggaggtgtggcgcgaaaagttcatatccttcgtcaaaatctttcagactgtgcgcgaggacgaccccgccaatcccggcaaaaagcagtgccggttttgcaacaagtacttgaaagcggactgccccgaattcgcggcgacgggccgcgcgacggtcgccgacttcgacggcatggacgttaaagcggcggcgggccgcttcaaagccggcgacatggacgcgctggccaagaactacgcgctcctcggccttgtgtccgtttgggcgagggccgtggaggaagctttatcatga

SEQ ID NO: 73756 - protein, 281 aa, Unknown
  Obtained from environmental sample
  misc_feature (1)..(281): Xaa is any amino acid
MXGGLXMGEGHSRLSPSKTHRYVRCPVSVLREAHYPEDTSPYAEEGRLAHELAAARLTGAPDPAGVPPDMVEPVMKYVDTVRAMSRGASVVRVETRVNLAGVLDEGESGTVDFFAILDKELQVHDLKYGKGERVDAEDNEQLILYGLGALPVAEVLCEIERVRLLIHQPRLGSVSEVVYTVKEMEVWREKFISFVKIFQTVREDDPANPGKKQCRFCNKYLKADCPEFAATGRATVADFDGMDVKAAAGRFKAGDMDALAKNYALLGLVSVWARAVEEALS

SEQ ID NO: 73757 - DNA, 651 bp, Unknown
  Obtained from environmental sample
  misc_feature (1)..(651): n is a, c, g, or t
ttgaaaataacagggcttaaaggaacgcccgttcctgaattacgccagaacactacaattattaccaacaatacccttactccacttgatttcgaaactgtggagatagggtcttccaaaacattgacgtttaccattaagaatacaggtactattgcgcttgaattaaccggagagacaatagttctatcatcaaacgccgctttttccatttccaaccagccgtcaaacaagataattaatcccggaaatagtgtctcctttgttattcgctacactccggtgcttgagggtgaagttaccggtaatataactattgcggataatactgatattggtcaatttgtctttcctgtaaagggaacaggttatgtgaaaaaaccgcagataactgttaaacagaatactacaacgataaatcccaatggggaatataattttgatacagtcgcgacagatgttacaaaaactataacctttactataggtaattcaggtgatgcgaatttaacttttgaaaccgtcaacggtaatcgtgtaaatcttgaaaataattcagcaggtcatttctcccgtagccagacagtttcatctgttgttgcccccgatggaatgacaacatttacagttagttttcacccccaaagctga

SEQ ID NO: 73758 - protein, 216 aa, Unknown
  Obtained from environmental sample
  misc_feature (1)..(216): Xaa is any amino acid
MKITGLKGTPVPELRQNTTIITNNTLTPLDFETVEIGSSKTLTFTIKNTGTIALELTGETIVLSSNAAFSISNQPSNKIINPGNSVSFVIRYTPVLEGEVTGNITIADNTDIGQFVFPVKGTGYVKKPQITVKQNTTTINPNGEYNFDTVATDVTKTITFTIGNSGDANLTFETVNGNRVNLENNSAGHFSRSQTVSSVVAPDGMTTFTVSFHPQS

SEQ ID NO: 73759 - DNA, 957 bp, Unknown
  Obtained from environmental sample
  misc_feature (1)..(957): n is a, c, g, or t
atggccgaggctgctgaggaggcgtctgaagagcctccggctgacgaggcgccagttgtcgaagaagcgccccaggatgagcccattgttgaggaggagccttctgttgacgaggatagcttagttcaagaaccgcttgttgttgaggatgtgccccaggagccgctgcctgccgaggaaacgcctgaagagcctccggctgacgaggcgccagtcgccgaggaagcgcctcaggatgagcccattgttgaggaggagccttctgttgacgaggatagcttagttcaagaaccgcttgttgttgaggatgtgccccaggagccgctgcctgccgaggaggcgtctgaagagccgcctgctgatgaagcgtcagtcgtagaggaagcgtccaaagaggagcctgttgttgaggaagagccttcggctgacgaggatagcttagttcaagagccgcttgtttttgaggaagagcttatagaggatccgctggctgccgaggaagcgtctgaagagccgcctgttgatgagtcgccagtcatcgaggaagcgctccaagaggagcccgttgttgaagaagagcctccggctgatgaggatagcttagttcaagaaccgcttgttgttgaggaagagcttatagaggattcgctggctgccgaggaagcgtctgaagagccgcctgctgatgaagcgtcagtcgccgaggaagcgctccaagatgagccctttgttgaagaagagcctccggctgacgaagatatcgtagttcaagagctgctgtctgtcgaggaagcgtttgaagagccgcttgctgatgaagcgccagctgccgaagaagcgctccagatgagcctgttgttgaggaagagcccccggttgacgaggatatctcagttcaagagccgattgttgttgaggatgtgccccaggagccgctggctgccgaggagcgcctga

SEQ ID NO: 73760 - protein, 318 aa, Unknown
  Obtained from environmental sample
  misc_feature (1)..(318): Xaa is any amino acid
MAEAAEEASEEPPADEAPVVEEAPQDEPIVEEEPSVDEDSLVQEPLVVEDVPQEPLPAEETPEEPPADEAPVAEEAPQDEPIVEEEPSVDEDSLVQEPLVVEDVPQEPLPAEEASEEPPADEASVVEEASKEEPVVEEEPSADEDSLVQEPLVFEEELIEDPLAAEEASEEPPVDESPVIEEALQEEPVVEEEPPADEDSLVQEPLVVEEELIEDSLAAEEASEEPPADEASVAEEALQDEPFVEEEPPADEDIVVQELLSVEEAFEEPLADEAPAAEEALQMSLLLRKSPRLTRISQFKSRLLLRMCPRSRWLPRSA

SEQ ID NO: 73761 - DNA, 975 bp, Unknown
  Obtained from environmental sample
  misc_feature (1)..(975): n is a, c, g, or t
atgtgcgctcaagcacgnagagcggggacagcagatngttggtggtcaatcaactcgcggancccgaagagcatggtgaccatgatcaaggcaagcgcgctgaagttgtccgatggttccatcaaactcagttggactccggcggccggcgtgacggattatctggtgcggtacagaccgggtgacaagcccgctcaagtcactcaagtcactgtgaagaacaagactgaacatacgttcgagaaattgacgccgaatacatcatacttgtttgtcgtgtatgcctccggccccaacgccagggaccagcattcacaggaagtctcgattaccacgcctgccgcgccgccgctcgcggccccggcgggcgtaagcgcaaaagcgtcctcgccggacgtcatccaggtcagttggaagacggtaagcggcgcgcaacaatacaagttgtattcgggcaactcacaggtgtacgccgggaaatcaacttcgtacaagcacgagaagttgacgccgaatacgaaatactcgtattccgtcagcgcaatcgacagcgccggcaaggagggcgcgaagtcggcagtgatcgcggaaaccacgaaggccgcgccgccgtccaaggcccccacccctactccaagccccaccccaagcccgccggcatccaaggcccccgtcgcgcccaccccgcaggcgctccaggccccgacgggcgtaagcgcgacagcgacctcggcgaacgccatccgggtcagttggaaagcggtacccaacgcgaaaacatatacggtggtttggcgtgcaagcggcaccggcgacaacatatcggtctctgtgaccggaacctcatatacgcatacgagcttgaagccgaatcagaagtactattacaacattgccgcgaatggcgctgccgggaacacgggccctcaatcaaatcgggtcgaagccgttggaaggcaaagtaacacgggatag

SEQ ID NO: 73762 - protein, 324 aa, Unknown
  Obtained from environmental sample
  DOMAIN (118)...(192): Fibronectin type III domain
  misc_feature (1)..(324): Xaa is any amino acid
MCAQARRAGTADXWWSINSRXPKSMVTMIKASALKLSDGSIKLSWTPAAGVTDYLVRYRPGDKPAQVTQVTVKNKTEHTFEKLTPNTSYLFVVYASGPNARDQHSQEVSITTPAAPPLAAPAGVSAKASSPDVIQVSWKTVSGAQQYKLYSGNSQVYAGKSTSYKHEKLTPNTKYSYSVSAIDSAGKEGAKSAVIAETTKAAPPSKAPTPTPSPTPSPPASKAPVAPTPQALQAPTGVSATATSANAIRVSWKAVPNAKTYTVVWRASGTGDNISVSVTGTSYTHTSLKPNQKYYYNIAANGAAGNTGPQSNRVEAVGRQSNTG

SEQ ID NO: 73763 - DNA, 837 bp, Unknown
  Obtained from environmental sample
  misc_feature (1)..(837): n is a, c, g, or t
atgctgtcatgctgccaaacacgaaggcgggttatgtttttttattacgctttcgccgtttcggcaacgggcgcgggattggccgggctgtatcaatttttcaccagaaaggtggacaccacatgggttgatgtggacttgttcggcagcgaaatccccttccgcgtatattcaaccttcgacaaccccaatgtgtacggcgtttatttgctgctagccattccgttttgcgcggctttggcgctgtatataaaaaaatggcccttaaagctggcggctctgtgcgtttcggggctgctgctgctcaacctgtttctgtcatactcacgcggctgtatgctggcgctggcagtttccgcgctggtatttgtgttgcttgcggaaaaaaggcttgtggcgctgcttcctgtgggtgcggtagccgcattctatgttctgccgcaaacagtgataaaccggctgctaagtatcacaaacttggccgattcatcaacggcctaccgtttgtccatatggcagggcacgatacgtatgcttaaagacttttggatgatagggctggggcaaggggcaggcgcgttcaacaccgtgtacccgatgtacgcgtttaacgcggttttcacgccccacgctcacaatgtgtttttgcaaatctttgttgaaacgggtattgtagggttgctggccttcctggcagtactggtttgctttttccgtgagatggcacgttttcgccgccattcggcagtatctgcggataagatattcgcatcggcgctaatttcggcggtggttgggtttttgtttcaagggctttttgacccatgtgttttataa

SEQ ID NO: 73764 - protein, 278 aa, Unknown
  Obtained from environmental sample
  SIGNAL (1)...(28)
  DOMAIN (162)...(228): O-Antigen Polymerase
  misc_feature (1)..(278): Xaa is any amino acid
MLSCCQTRRRVMFFYYAFAVSATGAGLAGLYQFFTRKVDTTWVDVDLFGSEIPFRVYSTFDNPNVYGVYLLLAIPFCAALALYIKKWPLKLAALCVSGLLLLNLFLSYSRGCMLALAVSALVFVLLAEKRLVALLPVGAVAAFYVLPQTVINRLLSITNLADSSTAYRLSIWQGTIRMLKDFWMIGLGQGAGAFNTVYPMYAFNAVFTPHAHNVFLQIFVETGIVGLLAFLAVLVCFFREMARFRRHSAVSADKIFASALISAVVGFLFQGLFDPCVL

SEQ ID NO: 73765 - DNA, 834 bp, Unknown
  Obtained from environmental sample
  misc_feature (1)..(834): n is a, c, g, or t
ttgcttgcgggtaacgccaacattgtacgcttgccgggtaagaactttgagcaggttgcaataattattgatgcgattaaagaactttttgccggtaaacacgcgtatctttcgccatatcttgcttttgtaaaatatccgcctgacaaagaactgcatgacatattttcttctgtatgcgatgtgcgcatagtctggggtggagacggtacaataaacgaattgcgccaatcaccgctgaaaccgagagctacagaactggtttttgcctacaggtattcgatagcggttatcaatgcggacgaatatgttaaagccaaggacaaaccaaagatagcgcaggatttttacaacgatacgtatttttcagatcaaaacgcctgcacgtcgccaaggattattttttggcttggagacagcaaaaatgaggcaaaaaaagccttttgggaaagcgtgcacaatttggcgaaagagaagtacgaactcgctccggttcaggcagtgggcaaactcgccatgttctataaaactgtagccaatattcctgtttcgcttacggatgccgaagattgctacgtaacccgtatcagcgtaaatggcgctgatgaagggcttatgcgctttaaatacaacagcggtttcttctttgaacatgacattaatgaattgaaagacattctgcctatatgcggcgagcggttgcagacgcttatatattacggccttccaaaagaaaaactggcggaatttttagccgaatacagaccgaagggcatagaccgcgccgtgccaatgggcaagtcaatggactttaccttacttgggacggattga

SEQ ID NO: 73766 - protein, 277 aa, Unknown
  Obtained from environmental sample
  misc_feature (1)..(277): Xaa is any amino acid
MLAGNANIVRLPGKNFEQVAIIIDAIKELFAGKHAYLSPYLAFVKYPPDKELHDIFSSVCDVRIVWGGDGTINELRQSPLKPRATELVFAYRYSIAVINADEYVKAKDKPKIAQDFYNDTYFSDQNACTSPRIIFWLGDSKNEAKKAFWESVHNLAKEKYELAPVQAVGKLAMFYKTVANIPVSLTDAEDCYVTRISVNGADEGLMRFKYNSGFFFEHDINELKDILPICGERLQTLIYYGLPKEKLAEFLAEYRPKGIDRAVPMGKSMDFTLLGTD

SEQ ID NO: 73767 - DNA, 975 bp, Unknown
  Obtained from environmental sample
  misc_feature (1)..(975): n is a, c, g, or t
ttgnnnnnngggttgatggccgagtatcgtgaacagccacgcgaaccgatagacgttgattttgatgattttgataaaattccatgtttggcggcaaacatacaagattcaggttatagggcatatattgcaattattcccggtatttgtttagctaaattatatgaacgttatggtgcgaggttgttggaacaaaatgtaagatcatttctgcaattcacgggaaaagtgaacaagggaatccgtgagacaattaagaataaaccgcatatgtttttggcattcaacaatggaattgctgccactgcccaccatatagcgttggacgaagatagtcgttatatcaaacaaatccatgatttgcaaattgtgaatggaggtcaaacaaccgccgcaatctatgcatcaatgaaagaaaaaatcgacatttcaaatatactcgtacagataaaattttcggagatcgacaaaattcttaacaaagaagggtatagcgaaatagtttctaaaatttctcgttgtgccaatatgcaaaacaaagtaaatgatgcagatttttcagccaataacccatccttaattaagattgagagattatcgcgttgcattagttcacccaaagagtcaacctattggttttttgagcgtgcaagaggacagtataaaacagagcgtaacctttatcgtcggggcgattttgacaaaaaatatccgaaaaataaagtatttacgaaggttgaattagcaaaatatattaacgcatatgtcgacaaagaatttgtgatagcaccgcatattgttgttcgcggaaacgaaaaaaattatgctcaatttattgctaataatctacctagcgaagagaaaatcaacgccgcttactttgaagatgcaattgcaagatgtatcctttttaaaacggccgaaagacgttacgggacaaaacagagtaatataatattggctcattgcgggtag

SEQ ID NO: 73768 - protein, 324 aa, Unknown
  Obtained from environmental sample
  misc_feature (1)..(324): Xaa is any amino acid
MXXGLMAEYREQPREPIDVDFDDFDKIPCLAANIQDSGYRAYIAIIPGICLAKLYERYGARLLEQNVRSFLQFTGKVNKGIRETIKNKPHMFLAFNNGIAATAHHIALDEDSRYIKQIHDLQIVNGGQTTAAIYASMKEKIDISNILVQIKFSEIDKILNKEGYSEIVSKISRCANMQNKVNDADFSANNPSLIKIERLSRCISSPKESTYWFFERARGQYKTERNLYRRGDFDKKYPKNKVFTKVELAKYINAYVDKEFVIAPHIVVRGNEKNYAQFIANNLPSEEKINAAYFEDAIARCILFKTAERRYGTKQSNIILAHCG

SEQ ID NO: 73769 - DNA, 438 bp, Unknown
  Obtained from environmental sample
  misc_feature (1)..(438): n is a, c, g, or t
atgtccgaatattcagaaacttctgcattctggatattcaatcaagtggctaatttctcgtatttgcgctacgatgtaatgtctgcggatgtatgcaaggtgatgaacgaacttgaagacggttatctgagcgatgttgcacgcgttgatgctgaagcgcagacacttttcaaaaaacgccccaaaaaagcgcaacaatatcttaccgattattcaggcaagcaagcagaaaatactttccagcgatggaaaaaactcagccaatatctgctggttaaatatgtagacggaaatatcaagaaggaacagaacggaaagtttgtgcctaacaagtacaacacaacagtcgcatcgccaagccagccgggttatcccgaagagtggcgcagaaaaatcgtggaagacacgggcgataagttgaaggttgttggcgagtga

SEQ ID NO: 73770 - protein, 145 aa, Unknown
  Obtained from environmental sample
  misc_feature (1)..(145): Xaa is any amino acid
MSEYSETSAFWIFNQVANFSYLRYDVMSADVCKVMNELEDGYLSDVARVDAEAQTLFKKRPKKAQQYLTDYSGKQAENTFQRWKKLSQYLLVKYVDGNIKKEQNGKFVPNKYNTTVASPSQPGYPEEWRRKIVEDTGDKLKVVGE

SEQ ID NO: 73771 - DNA, 609 bp, Unknown
  Obtained from environmental sample
  misc_feature (1)..(609): n is a, c, g, or t
ttgtttacagaagtcaaaagtcagttaagagctaaaaattactgttctgaggtattcacgtttattgacgcgactgcgttagtcagcaaattaaatctttgggaagagcgcgataaagccattgctgccggctatgagaagctcaacaacgaggttttaccgaaggtttcttttgaccctgaagctaaaatcggagcgaagagcaataagaaattttggtatggttttaagaagcatgtagctgttgatatgcaaagcgggatgattacgcgggttgcggtaacacaggcgaatgtggctgacgcggacggtgcgcgtcatgtgatgccccgttcgggcgcggcagtaaccgacaagggttatgttggagcgattcgtgaaatgcttcggcgcggcgtacacgctatggttataaaacggaataatatgaaagataaaaatgttgatttggataagtggatttcaaaattacgtgcaccgtatgaaggtacgtttagcaaacaaaacagacgtgtaagatacaggggagttgtaaagaatcagggtgcggagtttttatatgcaattgcgtataatttccggcgtttgattatactgaatgaggcttga

SEQ ID NO: 73772 - protein, 202 aa, Unknown
  Obtained from environmental sample
  DOMAIN (19)...(193): Transposase DDE domain
  misc_feature (1)..(202): Xaa is any amino acid
MFTEVKSQLRAKNYCSEVFTFIDATALVSKLNLWEERDKAIAAGYEKLNNEVLPKVSFDPEAKIGAKSNKKFWYGFKKHVAVDMQSGMITRVAVTQANVADADGARHVMPRSGAAVTDKGYVGAIREMLRRGVHAMVIKRNNMKDKNVDLDKWISKLRAPYEGTFSKQNRRVRYRGVVKNQGAEFLYAIAYNFRRLIILNEA

SEQ ID NO: 73773 - DNA, 777 bp, Unknown
  Obtained from environmental sample
  misc_feature (1)..(777): n is a, c, g, or t
atgaaacaatcggcgttcaaattaagttataagacgatattgaatttcctcctgataattgtattgttagggggttcggtgtctgcgtttgcggggcaaacagacgaagcggacgccacaaaaaaacaatccatagtggaaaaagtaacttcatggtatatggacaatatgaattatgggacagttacattgttgatggttgttgaaagttcttttatcccttatccgtctgaggtaattgttccgccggcagtctataaagcaagtcaggaaggaagtaatttaaatatcattctggttgttatttttgctactgtgggagcgattatcggagctttggcaaattattgccttgccttgtggtttggccgtcccattatacataaatttgccgatagtaaattgggaaaaatgtgtctgctaagctctgaaaaagtacagaaagcggaagattactttataaaacacgggaaaatttccacctttataggccgttttatccccggtattcgtcaattaatatccatacctgcgggattatccgggatgtctcttccgccatttattctgtttacaacactcggcgcgttaatgtggaatatcattctggctgttgtgggctatattgcccacgggcagacatccttgataaatcaatacagcaaagagatttcctgtgtaacgctgatactgggaggatttttcatcctttatttaatatataatggcttcataaaaaagaatagagaaaaacatgaagtgatgtataaaaaatga

SEQ ID NO: 73774 - protein, 258 aa, Unknown
  Obtained from environmental sample
  SIGNAL (1)...(28)
  misc_feature (1)..(258): Xaa is any amino acid
MKQSAFKLSYKTILNFLLIIVLLGGSVSAFAGQTDEADATKKQSIVEKVTSWYMDNMNYGTVTLLMVVESSFIPYPSEVIVPPAVYKASQEGSNLNIILVVIFATVGAIIGALANYCLALWFGRPIIHKFADSKLGKMCLLSSEKVQKAEDYFIKHGKISTFIGRFIPGIRQLISIPAGLSGMSLPPFILFTTLGALMWNIILAVVGYIAHGQTSLINQYSKEISCVTLILGGFFILYLIYNGFIKKNREKHEVMYKK

SEQ ID NO: 73775 - DNA, 354 bp, Unknown
  Obtained from environmental sample
  misc_feature (1)..(354): n is a, c, g, or t
gtgggccacggaggagaagccccaacatgcgcttcaggtcacgctgggccagggcgcagaggttgccgaaggtcatggacagggcggccaggagggccaggacatcggccaaggtctggccgggcagaaccaagacctccaggcgcaccaagacaaccgcggcccccagcttggggagagtggccacgaaggtcgtggtttcattgctggccccctggtaggcatcgggcgcccagaagtggaaggggaagagggccagcttgtagaacaggccggccaggaagagggtcaggccggccaaggccaggggattgcgggcgaagctccaatcccgggtcgtcagttcctggatga

SEQ ID NO: 73776 - protein, 117 aa, Unknown
  Obtained from environmental sample
  misc_feature (1)..(117): Xaa is any amino acid
MGHGGEAPTCASGHAGPGRRGCRRSWTGRPGGPGHRPRSGRAEPRPPGAPRQPRPPAWGEWPRRSWFHCWPPGRHRAPRSGRGRGPACRTGRPGRGSGRPRPGDCGRSSNPGSSVPG

SEQ ID NO: 73777 - DNA, 369 bp, Unknown
  Obtained from environmental sample
  misc_feature (1)..(369): n is a, c, g, or t
gtgggagcgccgctgccaggcgaacgtgaaccagatcaccgacgaggccatagtcgcggccaaggccagggccaaggaaaagaccctggacaattacaaggccatggaacaagccaaagccaaggccaaggagagcccgccggccacaggcgcggatgtggaacaagccctaatcagggccaagtccagggccaccggccgggacccgggcgcctacaggcgcgcgaaagccaaccaggaagccaaggagttgtaggctgccttttcaccagaaccaagaggccggcgccgccccgttgcccgccgaacttgagtccagggctcagccctggtcagtcatataataaaatatcagacctttcggcctga

SEQ ID NO: 73778 - protein, 122 aa, Unknown
  Obtained from environmental sample
  misc_feature (1)..(122): Xaa is any amino acid
MGAPLPGEREPDHRRGHSRGQGQGQGKDPGQLQGHGTSQSQGQGEPAGHRRGCGTSPNQGQVQGHRPGPGRLQARESQPGSQGVVGCLFTRTKRPAPPRCPPNLSPGLSPGQSYNKISDLSA

SEQ ID NO: 73779 - DNA, 582 bp, Unknown
  Obtained from environmental sample
  misc_feature (1)..(582): n is a, c, g, or t
gtgccctgcgaaaactggcgccgcggcccatactttcccgaaaccgggctgccctgggtgctgccttcacccaacctgcccactttcgagagcgcctgggtctatcccggccaggtcatctgggaagggcttaacgtctccgaaggacgggggaccacccggccttttaacttcctgggagcgcccttcatcaaggccagggctctggccgcccgctttgaaaaattcggcctgcccggcctggcctatcgaacggtcagttttcagcccaccttcaacaaatgggccggacagatatgccagggcctggacctcttccccctggacaaatccttccagccctatctcaccggcctggccctcttgcaggcgatcttggaactttacccggaaaacttaaaactcaaggagccgccttacgaatatgaataccggcgccggccactggacctcatcctgggccgggccgatgtctatgaccgcttggcggccgggattccggccgaggaactggcccgggaatgggccaaggatttggccgcctttcaggccgaaaggtctgatattttattatatgactga

SEQ ID NO: 73780 - protein, 193 aa, Unknown
  Obtained from environmental sample
  DOMAIN (1)...(192): Protein of unknown function (DUF1343)
  misc_feature (1)..(193): Xaa is any amino acid
MPCENWRRGPYFPETGLPWVLPSPNLPTFESAWVYPGQVIWEGLNVSEGRGTTRPFNFLGAPFIKARALAARFEKFGLPGLAYRTVSFQPTFNKWAGQICQGLDLFPLDKSFQPYLTGLALLQAILELYPENLKLKEPPYEYEYRRRPLDLILGRADVYDRLAAGIPAEELAREWAKDLAAFQAERSDILLYD

SEQ ID NO: 73781 - DNA, 378 bp, Unknown
  Obtained from environmental sample
  misc_feature (1)..(378): n is a, c, g, or t
gtgttgttggagggagtcatgctcacgctgcttgttatacttttcgcgatagtctgtattctcttgattgtcgcggttatgatccagtccggcaagtccggcagtatggggctctttggcggcggcggcacttccagtatcggttctcagagcggcgacatcatgacgcgcatcaccaccattctcggaattgtattttttattctcaccctttccttcgccttttatgtctcgcaagataccatcgcttcacgtctcgccgagaagcagcccagagagggcagcgagatactcgcgccgggcgaaaaggcggatgaagttacgcttccgggtaccgctgcggaaggaataccggaaacaggtgttccgcaattttga

SEQ ID NO: 73782 - protein, 125 aa, Unknown
  Obtained from environmental sample
  DOMAIN (8)...(78): Preprotein translocase SecG subunit
  misc_feature (1)..(125): Xaa is any amino acid
MLLEGVMLTLLVILFAIVCILLIVAVMIQSGKSGSMGLFGGGGTSSIGSQSGDIMTRITTILGIVFFILTLSFAFYVSQDTIASRLAEKQPREGSEILAPGEKADEVTLPGTAAEGIPETGVPQF

SEQ ID NO: 73783 - DNA, 627 bp, Unknown
  Obtained from environmental sample
  misc_feature (1)..(627): n is a, c, g, or t
atgggatttctggaacttttgctgattgccgtcggtttgtccatggacgcctttgcggtttctgtctcggcaggcctggctcttccgcggcaattctggaagaacgccctgatcatcggactgtattttggcgcattccaggcattgatgccgatcattggctattttgccgcggcatatttcgcggacgccatcgtcgcctacgaccactggatcgccttccttctgctcttatttctcggcggcaagatgatatatgagagcttcaagaaagaagaacccgccgacgcgaacaccgcaaacaccgtagacaccgcagacaccgcagacaacagccaaatcacgcaggaatttataacgaaaccctcgatcatgctgccgctcgcggtagccacaagcattgacgcgcttgccgtcggcacatccttcgcgtttctgcgcgtcatgattctgccggccgccgcgtttatcggcatcaccacctttttgctctccatcctcggcgtcaaaatcggaaaaatattcggaatgcgctataaagcaaaagcggtactcgccggcggcgtcatcctcgtgctcatcgggctcaagatactgctggagcacctggagatcatgcacctctaa

SEQ ID NO: 73784 - protein, 208 aa, Unknown
  Obtained from environmental sample
  SIGNAL (1)...(24)
  DOMAIN (125)...(196): Domain of unknown function DUF
  misc_feature (1)..(208): Xaa is any amino acid
MGFLELLLIAVGLSMDAFAVSVSAGLALPRQFWKNALIIGLYFGAFQALMPIIGYFAAAYFADAIVAYDHWIAFLLLLFLGGKMIYESFKKEEPADANTANTVDTADTADNSQITQEFITKPSIMLPLAVATSIDALAVGTSFAFLRVMILPAAAFIGITTFLLSILGVKIGKIFGMRYKAKAVLAGGVILVLIGLKILLEHLEIMHL

SEQ ID NO: 73785 - DNA, 399 bp, Unknown
  Obtained from environmental sample
  misc_feature (1)..(399): n is a, c, g, or t
ttgaccggactgttatggggacaatggtttatgatttgtaaaccgttgtggacaggctcttacgtgttgtacacgggcggattggcggtgatggttctcgcgtgtttgattgggttgatggatgtgaagtcgtgcaatccccactattttcggccgtttatagcgttcggctctaatccgttgtttttgtttgtcgtggccgctgtaatagctaaaagcttgactttgtactgtttttatattggcgatacgtcgttgcaacattggatttaccaaaacatttatcaaaaccggatggagcctacgtttggctcgtttttgtatgccgttacgtttgttttggtcatgtggttattggcagaaatgctttttcgccgaaaaatttatataaaagtatag

SEQ ID NO: 73786 - protein, 132 aa, Unknown
  Obtained from environmental sample
  misc_feature (1)..(132): Xaa is any amino acid
MTGLLWGQWFMICKPLWTGSYVLYTGGLAVMVLACLIGLMDVKSCNPHYFRPFIAFGSNPLFLFVVAAVIAKSLTLYCFYIGDTSLQHWIYQNIYQNRMEPTFGSFLYAVTFVLVMWLLAEMLFRRKIYIKV

SEQ ID NO: 73787 - DNA, 693 bp, Unknown
  Obtained from environmental sample
  misc_feature (1)..(693): n is a, c, g, or t
ttgtctccgccgtccgcaaggtcagggagattttttcatgagcgaagactccggccgcaggcatggccacgcaggcgacccaagggagctgtaccagcaggtcatactcgaacacaacaagaagccccgcaacttcggcagcctagagccttgctcccacagagcgcacggcataaacccgctctgcggcgacgacatagaggtgacgctggccgtggaggacggcaggatagccgacatcaagttcaagggcagcggctgcgccatctcgcaggcgtccagctccctcatgaccgtgaacgtgaagggcaagacggttgcggaggccgagacgcttgtctcgcagttccgcgagatgatcaggggggacctggacccgtccaaggacgagaacatcctgggcaggctggccctgttccagggggtcaaggacatccccagccgcgtgaagtgcgccgtcctgccctgggccacgctgtccagcgccatgaagggcgaggacaccacaagcacagagtgacggaagtgtgtggtctggctatttccctaggtgttttttcaggaagtcgtacatccgctgcctggctttgcgggcgaatgtggtgtctatcctgtcccaactgtggccgccgggcgcgtccttctctatgtggtgctcgaaggtcttgcctgccgccttcaggtgcgctatga

SEQ ID NO: 73788 - protein, 230 aa, Unknown
  Obtained from environmental sample
  misc_feature (1)..(230): Xaa is any amino acid
MSPPSARSGRFFHERRLRPQAWPRRRPKGAVPAGHTRTQQEAPQLRQPRALLPQSARHKPALRRRHRGDAGRGGRQDSRHQVQGQRLRHLAGVQLPHDREREGQDGCGGRDACLAVPRDDQGGPGPVQGREHPGQAGPVPGGQGHPQPREVRRPALGHAVQRHEGRGHHKHRVTEVCGLAISLGVFSGSRTSAAWLCGRMWCLSCPNCGRRARPSLCGARRSCLPPSGAL

SEQ ID NO: 73789 - DNA, 483 bp, Unknown
  Obtained from environmental sample
  misc_feature (1)..(483): n is a, c, g, or t
atgagcgaagactccggccgcaggcatggccacgcaggcgacccaagggagctgtaccagcaggtcatactcgaacacaacaagaagccccgcaacttcggcagcctagagccttgctcccacagagcgcacggcataaacccgctctgcggcgacgacatagaggtgacgctggccgtggaggacggcaggatagccgacatcaagttcaagggcagcggctgcgccatctcgcaggcgtccagctccctcatgaccgtgaacgtgaagggcaagacggttgcggaggccgagacgcttgtctcgcagttccgcgagatgatcaggggggacctggacccgtccaaggacgagaacatcctgggcaggctggccctgttccagggggtcaaggacatccccagccgcgtgaagtgcgccgtcctgccctgggccacgctgtccagcgccatgaagggcgaggacaccacaagcacagagtga

SEQ ID NO: 73790 - protein, 160 aa, Unknown
  Obtained from environmental sample
  DOMAIN (18)...(140): NifU-like N terminal domain
  misc_feature (1)..(160): Xaa is any amino acid
MSEDSGRRHGHAGDPRELYQQVILEHNKKPRNFGSLEPCSHRAHGINPLCGDDIEVTLAVEDGRIADIKFKGSGCAISQASSSLMTVNVKGKTVAEAETLVSQFREMIRGDLDPSKDENILGRLALFQGVKDIPSRVKCAVLPWATLSSAMKGEDTTSTE

SEQ ID NO: 73791 - DNA, 816 bp, Unknown
  Obtained from environmental sample
  misc_feature (1)..(816): n is a, c, g, or t
ttggaagaagtcaagaagaacccccattatacgaacttcatcaccaagatgcgctatctgtatgaagccctcggcgacgagcccttcagccacgatgttgcctacaattgggttctctaccagttcaccggcatgaccgagcaggaagtgcgcgacatgaccgtcaagaccgttgactggcaggtgaagcagccgatcgagtccgtgaagtggaccagcccggcttctttgcccggcaaggccggcgttgtcagcgtgagctggaagaacggcctgcgccttgtgcccgaaatgcaggatctgtataagaagctgcgggacaacggctttgacgtgtgggtgtgcagcgcctcttttgtggacgtgatcaaggaaatctcctccaacccgaagttcggctacaacaattccgaccagatggtcgtcgccatggaactggagcgcgacgccaagggcgtcatccagaccgaattccgcaagggctacacccagacccagcgtaaaggcaaaacgacggagctgaatcgtttggtggctcccaagtacgaaggccgcggtccgcttttcgtcgccggcgactccgaaggcgacgagaacatgatgacggatttccccgacaccaagactgtgctgattatcaaccgtctgcgcagccccaagaacatcatcgggcagaagtccaaggaagccgtggacgcctacggcaagcccggcgccaagtacctcttgcagggacgcgacgacaacaagggcgtgtttgttccctcgcagctgcatttcagactcggttccactgaaggcaaggcgttgcgctag

SEQ ID NO: 73792 - protein, 271 aa, Unknown
  Obtained from environmental sample
  misc_feature (1)..(271): Xaa is any amino acid
MEEVKKNPHYTNFITKMRYLYEALGDEPFSHDVAYNWVLYQFTGMTEQEVRDMTVKTVDWQVKQPIESVKWTSPASLPGKAGVVSVSWKNGLRLVPEMQDLYKKLRDNGFDVWVCSASFVDVIKEISSNPKFGYNNSDQMVVAMELERDAKGVIQTEFRKGYTQTQRKGKTTELNRLVAPKYEGRGPLFVAGDSEGDENMMTDFPDTKTVLIINRLRSPKNIIGQKSKEAVDAYGKPGAKYLLQGRDDNKGVFVPSQLHFRLGSTEGKALR

SEQ ID NO: 73793 - DNA, 750 bp, Unknown
  Obtained from environmental sample
  misc_feature (1)..(750): n is a, c, g, or t
gtgctctcgctgatcgtttccgacgtggtgggcgacgatctggacgtgatcggctccggccccaccgcgccggacgcctccaccttcggcctctgcctcgacatcacggaacgcttcggcatcaagacgcgcttgccggaacccgtgctgcgacgcctggtggacggcgcggccggaaacattcccgaaacgcccaaggcgggtgatccgctttttatgcgcgtaaggaacgaactcatcgcaaccaacaggcaggcattggatgcggcggccgaggccgccaaaaagctcggttacgtcccgcatattctgaccgccgccctgagcggcgactgcagaacacgcgcccgtgaactgacggaacaggcctgcctcgcggcggacaagcttcagcccggcgatgcgcccctctgtctgctctttggcggagaaaccacgctgaacgtgcgcggcacgggtttgggcgggcgtaatcaggaaatggcgctggtagcggcccaagttctgcgcgggcgcaggggcatcgccgccgtcttcgccgataccgacggcacggacggcccgacggacgccgccggcggcttcgcctcaggcagcaccctggaggaggccgcgaggctggggctggagccgcagccgtacctggacaacaacgactgctaccactttctgaaaaattgcggacacctgctgctgaccggcccgacgcgcaccaacgtcatgggcatgggcatctttttggcgcgctag

SEQ ID NO: 73794 - protein, 249 aa, Unknown
  Obtained from environmental sample
  DOMAIN (136)...(242): MOFRL family
  misc_feature (1)..(249): Xaa is any amino acid
MLSLIVSDVVGDDLDVIGSGPTAPDASTFGLCLDITERFGIKTRLPEPVLRRLVDGAAGNIPETPKAGDPLFMRVRNELIATNRQALDAAAEAAKKLGYVPHILTAALSGDCRTRARELTEQACLAADKLQPGDAPLCLLFGGETTLNVRGTGLGGRNQEMALVAAQVLRGRRGIAAVFADTDGTDGPTDAAGGFASGSTLEEAARLGLEPQPYLDNNDCYHFLKNCGHLLLTGPTRTNVMGMGIFLAR

SEQ ID NO: 73795 - DNA, 1002 bp, Unknown
  Obtained from environmental sample
  misc_feature (1)..(1002): n is a, c, g, or t
atggccgagcttgcgcttcatgctctcttccagaccagtgatgcgctccagcaggtgttcgtccaggtcttcttcagacccagcgcccactatgtcttcgatgtcgtcctcgtcccagccttggtctccagtgactatcagcaggcgcgtgccgcacttgcggcagacctcgcgctcgcctggattccaggtcgtgcagttttggcaataagtcccgggcacattctcagccatactatgattattgttgaggtaggcgtgacaagacaattggtaattgcccacagcccagattcagacgatgcctacatgatggcccccctggcccttggctggctgaatgccgatgacgaccatgggcgctttgcctttgaattcgtccgcaaggacatagagacgctgaacgaagaggccctttcggcccgccacgacgtgacggccatcagctttggggcctaccctgagctggaaggcaaatacgacctgctgagggcgggatcgagcatccaggagggcacagggcccttggtggtgtcccgcgaaaggctggaaccaaaagaccttgccgagggcacggtggccattccagggttgaggacaagcgcatatctggccatgcgtctgtggatgccggggctgaaagttgaggtggtccaattcgacagaatcatggacgaagtggccggcggccgttatcgcgccggtctgctcatacatgaaagccagttgatgtttgagagcgcggggctgcaccttgtggcggacttggggggctggtggaaatcgcggcacgacctgccgctgcccatgggtggaaacgcgataaggaaggacttgcccccagacgaaaaacgggcgtttgccaggctgatgaaaaagagcgtggaaacagcgatggccaggcaccaggagagcgttgactactccatgggcttcgggcgcggcatgaatcgcgggactgttgataggtacgtcagggcctgggtgaacggctttacctaa

SEQ ID NO: 73796 - protein, 333 aa, Unknown
  Obtained from environmental sample
  DOMAIN (90)...(333): Uncharacterized ACR, COG2107
  misc_feature (1)..(333): Xaa is any amino acid
MAELALHALFQTSDALQQVFVQVFFRPSAHYVFDVVLVPALVSSDYQQARAALAADLALAWIPGRAVLAISPGHILSHTMIIVEVGVTRQLVIAHSPDSDDAYMMAPLALGWLNADDDHGRFAFEFVRKDIETLNEEALSARHDVTAISFGAYPELEGKYDLLRAGSSIQEGTGPLVVSRERLEPKDLAEGTVAIPGLRTSAYLAMRLWMPGLKVEVVQFDRIMDEVAGGRYRAGLLIHESQLMFESAGLHLVADLGGWWKSRHDLPLPMGGNAIRKDLPPDEKRAFARLMKKSVETAMARHQESVDYSMGFGRGMNRGTVDRYVRAWVNGFT

SEQ ID NO: 73797 - DNA, 861 bp, Unknown
  Obtained from environmental sample
  misc_feature (1)..(861): n is a, c, g, or t
gtggcgagaaaacgctcccttctcgcccagcgccacaggctgcatctggccaaccaggccaaaaccgctcaaagcccggcgcccccgcgcgtctttgcgcagaccccgcgcgtctccctgcagccaaggactgtctccgcgcaggccccgcccgtctccccgcaggctccgcctgtctccgcgcaggctccgcctgtctccgcgcaggccccgacgcccgcccccgcgccggccccgagtgccgcgccgcccgtaagctcctacaaggcggctctttctggcgggcctcgcgacctcgtggccatcggggtttctaccggcgggcctccggccgtacaaaaagtgcttgccggcctgcccaaaaattttccggccgccattctcatcgcccagcatatgcctgcggcgtttaccggccccttcgccaaacgcctggacgcgctttgcgccatttcggtcaaagaagcggaacacggcgaaaaaccccagatcggctgcgcgtatgtatctcccggcggcatacatatgatgctggaacggaaaggcgcggtgcccgaactgacgattaccgcccaaccggaaagcgaattgtacaaaccttccgccaccgtcctgatgaactcggtggccaagatcaacccccgcaagacggtcggcgtcattctcaccgggatgggcagcgacggctgcatcggagtgaaggccctcaaggaaagcggcggctatatcctggcgcagagcgaggctacctgcgttgtgtacggcatgccgaaagcgatagttgacgcgggccttgcggaccagataatagatattgaagaaatgtcggaagctatcatcgcccgcgttcaaggtaagtaa

SEQ ID NO: 73798 - protein, 286 aa, Unknown
  Obtained from environmental sample
  DOMAIN (99)...(282): CheB methylesterase
  misc_feature (1)..(286): Xaa is any amino acid
MARKRSLLAQRHRLHLANQAKTAQSPAPPRVFAQTPRVSLQPRTVSAQAPPVSPQAPPVSAQAPPVSAQAPTPAPAPAPSAAPPVSSYKAALSGGPRDLVAIGVSTGGPPAVQKVLAGLPKNFPAAILIAQHMPAAFTGPFAKRLDALCAISVKEAEHGEKPQIGCAYVSPGGIHMMLERKGAVPELTITAQPESELYKPSATVLMNSVAKINPRKTVGVILTGMGSDGCIGVKALKESGGYILAQSEATCVVYGMPKAIVDAGLADQIIDIEEMSEAIIARVQGK

SEQ ID NO: 73799 - DNA, 465 bp, Unknown
  Obtained from environmental sample
  misc_feature (1)..(465): n is a, c, g, or t
ttgcgagnttanggtggtataatgagaatttcattaaggacgcgctacggtcttgcctcattgttatgtatggctgaaaaaagccaatccggggaacgggtaaccataatcagcctgtcggaaaaactgaaaatatcaaaaatttatctggaacaggttttcgcgctcctgaggcggggcgggctcgtcatttccgcgaagggcgcgcaggggggctataatttgtcgcggccggcgaggaatataacggcttatgacgtattgtcggcgacggaaacatctctctttgaaaaggcggaggaaacggtcgccgacgaaagcatagaaaaaaccctgagggacacggtatttgatcccttggacaagtccttaaaagaaatattatcccgcataaccctggaagacatggtaaatcaatcggcgatttatacgagtggggattattatatgtattcggggatatag

SEQ ID NO: 73800 - protein, 154 aa, Unknown
  Obtained from environmental sample
  DOMAIN (8)...(112): Transcriptional regulator
  misc_feature (1)..(154): Xaa is any amino acid
MRXXGGIMRISLRTRYGLASLLCMAEKSQSGERVTIISLSEKLKISKIYLEQVFALLRRGGLVISAKGAQGGYNLSRPARNITAYDVLSATETSLFEKAEETVADESIEKTLRDTVFDPLDKSLKEILSRITLEDMVNQSAIYTSGDYYMYSGI

SEQ ID NO: 73801 - DNA, 756 bp, Unknown
  Obtained from environmental sample
  misc_feature (1)..(756): n is a, c, g, or t
atgacagataaccatgtccatgtcggacagtttgaggatatatactacgacccccgcgaaataacggatattgtcatgtcctccggcatggaagggctgtcgttttcatcaaccacaagctgtgttgaaaatgtcaggtatgccgagattgaaaaagaaatagttaaccttcttgcgggaatctcgtactctggtgaaacggcgcgaccttttttctggtataatcctgattacattgatcagggtataagtatacaaagcgcttttaatatcgttccctacaaaggcataaagatacatccttatgttaatcattggaattttgaagacaagcggcacatggaaacgttgcacggtctgtttgactatgccgaaagaaacggattgcctgttcttattcacactgggtacagcggcattgatggagcggaccgctttgagttgtttttcaaggagtactcaggaacgaggtgcgtgcttgcccactgccgcccgcttgacgcgacaattaaaatgctcaaaatacacgctaatgttttttgtgataccgcgtttgtacccgaaaaagacatatcacagatcatccgtgcgggatatggagacaagatcatctttggaaccgactttccaataacgcatttctttaaaactaaatatccaaagagaggaaaaaaaacgacaataaccctgacggaacaatataaagaagatatagggcgttggctaaaggggtgtaaccgtcaaaagaaccgctag

SEQ ID NO: 73802 - protein, 251 aa, Unknown
  Obtained from environmental sample
  DOMAIN (2)...(244): Amidohydrolase
  misc_feature (1)..(251): Xaa is any amino acid
MTDNHVHVGQFEDIYYDPREITDIVMSSGMEGLSFSSTTSCVENVRYAEIEKEIVNLLAGISYSGETARPFFWYNPDYIDQGISIQSAFNIVPYKGIKIHPYVNHWNFEDKRHMETLHGLFDYAERNGLPVLIHTGYSGIDGADRFELFFKEYSGTRCVLAHCRPLDATIKMLKIHANVFCDTAFVPEKDISQIIRAGYGDKIIFGTDFPITHFFKTKYPKRGKKTTITLTEQYKEDIGRWLKGCNRQKNR

SEQ ID NO: 73803 - DNA, 594 bp, Unknown
  Obtained from environmental sample
  misc_feature (1)..(594): n is a, c, g, or t
atgtcctcccgcgacatgaaaaccaatgagatcgaacttgccaagagcaaaggcgtcaatcccgcgcgcatccctgtcgccgtggacgcgctgctgcccatcgtgcacccttccaacggcatcgcccggctgagcaccgaccagttgcgggacatctatgccggcaagatcacgaactggcaggaagtcggcggcgctgacaagaagatcgccgtcatctcccgcgatacatcctcagggacgtatgaaacctgggacgaaaaaatcatgtccaaggaaaaggtggccccttccgctctgctacaggcttccaacggcgccgtggcgcaggctgtttccaagaatcccaacgccatcggctacatcggcttcggctatcttgacaggagcgtcaagggtcttgatattggaagcctgaaggcgactcctgccagcgctctttccggccagtggcctatcgcccgcgagctgtatattttcaccaacggcgagcccaggagcaccatcaaaaagctggttgactacctgctcgacccgcaaaaagggcagaaagccgtacaggaagtgggcttcatccccctgccgaagaagtaa

SEQ ID NO: 73804 - protein, 197 aa, Unknown
  Obtained from environmental sample
  misc_feature (1)..(197): Xaa is any amino acid
MSSRDMKTNEIELAKSKGVNPARIPVAVDALLPIVHPSNGIARLSTDQLRDIYAGKITNWQEVGGADKKIAVISRDTSSGTYETWDEKIMSKEKVAPSALLQASNGAVAQAVSKNPNAIGYIGFGYLDRSVKGLDIGSLKATPASALSGQWPIARELYIFTNGEPRSTIKKLVDYLLDPQKGQKAVQEVGFIPLPKK

SEQ ID NO: 73805 - DNA, 831 bp, Unknown
  Obtained from environmental sample
  misc_feature (1)..(831): n is a, c, g, or t
ttggagggctattgcgacggtcatccctttgccgtgttttccgatgcctttccgcatggttttgtgccgttgccgacagtcccttcctttttgcggaccggcgcgagcgagagcgacagaaagctttggaagagcaaacgctgggttgcgcttgaacatctgggcagcgacctggaggcatggtggcgcaatgcctgtactgatacgcaggcgtatacgccggcatcgcataccgcggcggatgcgtccgtcttccgtccgcgtacggacatgcagccgcataacagcatcaaccgcctgaccggcacgaccggcaagggggattttgccccgtatgcgcagccgcaaatttggcatcacccggcgacgactttggatctatatgtcctggcggatgcggatcgcctggagatgtcgaagctttgcgaggtgctggccgatctgggaaaagccggctacggacgcgatgcgagcgcgggccttggcaagttcgatattctggacgatgcgccggccttgcaaggccgcgcttccggaactttcctgacccttgccccgtgcgccccgcagggtttgggctatgacgcggtaaacagttattatcaggtaaaaacgcattttgggcggcacggcgatgcggcggccctgtcgcgccccttcaagctcccggtgctgctgacgaaaacgggcgcggtgttctcgttgcccgaagaacgcgccgctctgttgctcgggcagggtatcggccatatctccagggagcatcctcgcgcggtgcatcaggggtacgcgccggtcattcccctgtcgggtctggggaggaaggtatga

SEQ ID NO: 73806 - protein, 276 aa, Unknown
  Obtained from environmental sample
  misc_feature (1)..(276): Xaa is any amino acid
MEGYCDGHPFAVFSDAFPHGFVPLPTVPSFLRTGASESDRKLWKSKRWVALEHLGSDLEAWWRNACTDTQAYTPASHTAADASVFRPRTDMQPHNSINRLTGTTGKGDFAPYAQPQIWHHPATTLDLYVLADADRLEMSKLCEVLADLGKAGYGRDASAGLGKFDILDDAPALQGRASGTFLTLAPCAPQGLGYDAVNSYYQVKTHFGRHGDAAALSRPFKLPVLLTKTGAVFSLPEERAALLLGQGIGHISREHPRAVHQGYAPVIPLSGLGRKV

SEQ ID NO: 73807 - DNA, 861 bp, Unknown
  Obtained from environmental sample
  misc_feature (1)..(861): n is a, c, g, or t
ttgacaatgaacagcggcgcgtcagcatccgccgtaataaaaacttccggctcgcaattaatacataaatttgaatatacggtcggcgcgagtgaaaacacaaacaagcttgttgtttcaaaaattaactatgttacttgtaccggagcaggcggaaatgccgtattaaacatggacggaagaaacctggacaaaaataaaaatataataatagatacaactccgcctacaattaaaagcgtggaagccttaaacggaaaagaaaacgagacatcttatttcaaagcagatcaggatatatatctgttggtaaaatttaatgaggatattatattcacgccctcaactccgaataatacttcattaaccttaaattccggtacaggtacaatccccgctgtcagcggtacggattctttgctttttacatattttatcggcagcggacaaaatacaaaccagttaaccgcaagcggtcttgccaatgttcccgcaggcgttattaccgatttagcgggtaatatttttacagcattaacaacaattcccgccgggcaaaatattaataacattaaaaataaaactattgttattgatacttcagcgccggccgctcctgtaatcaataccgcaatccctccgttagcgggtacatttactgaaaaaagttttaccataagcggcgaaacaggggccgcaattcaatacagtgtaaacggaaccggcggcccgtggattaattatccttccggcggagtaaagctgggacagcgcggcacatataatatttcggcgcgtcaaacagatttggcgggaaatatatctccttcaagcgacgtgcagcaggttaatatattgtaa

SEQ ID NO: 73808 - protein, 286 aa, Unknown
  Obtained from environmental sample
  misc_feature (1)..(286): Xaa is any amino acid
MTMNSGASASAVIKTSGSQLIHKFEYTVGASENTNKLVVSKINYVTCTGAGGNAVLNMDGRNLDKNKNIIIDTTPPTIKSVEALNGKENETSYFKADQDIYLLVKFNEDIIFTPSTPNNTSLTLNSGTGTIPAVSGTDSLLFTYFIGSGQNTNQLTASGLANVPAGVITDLAGNIFTALTTIPAGQNINNIKNKTIVIDTSAPAAPVINTAIPPLAGTFTEKSFTISGETGAAIQYSVNGTGGPWINYPSGGVKLGQRGTYNISARQTDLAGNISPSSDVQQVNIL

SEQ ID NO: 73809 - DNA, 903 bp, Unknown
  Obtained from environmental sample
  misc_feature (1)..(903): n is a, c, g, or t
ttggcgcgcaacggggcgcatttatcggtcgtttggctttttctcgcgagttacgggattaaatcgaggttgtttggagggcagagttcaggaccggattcgatggttaagcatatttgcgcctgtttcaacttgcttacgacgacgtcggacgccggtaacgtgctgtacgcgctctttggcggcaataaaagggcttcggagaaacttgcgtccgcgataaatttgattgacggtacgtttgcggagtggatggagtacgtactgagtgagtttgctcctgcgtacggcgtaaaggcgtcggcagacaacgcctttatgtgtgcgggcaaggcttggaaagcgtctatgcgcgacagctataacaacggcgttttggctggtaaacctatggagtctataacgcggctgtacgccgcgagccaaaggactccccgggagttttatctggaagtgctctcgatttactcaaaggaaatggaatggaagtatgaaaaaaatcccgacaatcttcggatttttaaggggacggttgacgctttgcgcctactcttaagcgacaatgcggggtcagcgctgccgatactgctttcgttggataagcataaagctccgagtaagaattatgttacgttgagtacggcgcatagcgccaaagggcgcgaatgggacacagtttaccttatttgtgacgacgcacttgcttttccgtcggctatcagtttggcagaattgaaaaaggcggacgacccccgcgctgttgcgcggtttattgaggcggagcgcaggttgcactacgttgcgatgacgcgcgcaaaggacactttgtgtatagtcggaagcgaacaacccccggcgtttatcttcgcgaggcgttgtctgccccggcgcagggggcaataa

SEQ ID NO: 73810 - protein, 300 aa, Unknown
  Obtained from environmental sample
  misc_feature (1)..(300): Xaa is any amino acid
MARNGAHLSVVWLFLASYGIKSRLFGGQSSGPDSMVKHICACFNLLTTTSDAGNVLYALFGGNKRASEKLASAINLIDGTFAEWMEYVLSEFAPAYGVKASADNAFMCAGKAWKASMRDSYNNGVLAGKPMESITRLYAASQRTPREFYLEVLSIYSKEMEWKYEKNPDNLRIFKGTVDALRLLLSDNAGSALPILLSLDKHKAPSKNYVTLSTAHSAKGREWDTVYLICDDALAFPSAISLAELKKADDPRAVARFIEAERRLHYVAMTRAKDTLCIVGSEQPPAFIFARRCLPRRRGQ

SEQ ID NO: 73811 - DNA, 735 bp, Unknown
  Obtained from environmental sample
  misc_feature (1)..(735): n is a, c, g, or t
atgaaaatggagcagcgcaacacaaaacgatacaggttggaggtgaagggcgattatgcctgtttcacaagacctgaaatgaaagtagaacgggtgagctatgacgtgataacgccatcagccgcaagagctatcctcgaggcgatctactggaagcctgccatccgctggctggttcgccagatagatgtcttgtcccccatacgatggacttcggttcgtcgcaatgaaatcgacaggactatgagcgcaagtaaccaagctggtgtccttattgaagactgccggcagcaacgggctggattgatcctgagggatgttgcatacctgctccatgcggacatgcttttcatacccttggaagaacgtgagccgcacaccgccaaacaaagcagatacgctgaagaccctgatctaatcagttccgccgatgaaaagccctcaaagcaccacgcaatctttgaacgcagggtcagcaagggtcaatgcttcaaccagccatacctaggatgcagggagttcagcgtggcgtctttcaggctgctggcgcaggatcatggtctaaaccacgcaggagactctgcgcccatcgacgaggatcgggatttgggctttatgctgtatgatatgaactacggggcaaagcccaatccgacggccatgttttttcgcgccagaatggataagggcataatcatagtccccgagagagacagccaagaggtgtaccaatga

SEQ ID NO: 73812 - protein, 244 aa, Unknown
  Obtained from environmental sample
  misc_feature (1)..(244): Xaa is any amino acid
MKMEQRNTKRYRLEVKGDYACFTRPEMKVERVSYDVITPSAARAILEAIYWKPAIRWLVRQIDVLSPIRWTSVRRNEIDRTMSASNQAGVLIEDCRQQRAGLILRDVAYLLHADMLFIPLEEREPHTAKQSRYAEDPDLISSADEKPSKHHAIFERRVSKGQCFNQPYLGCREFSVASFRLLAQDHGLNHAGDSAPIDEDRDLGFMLYDMNYGAKPNPTAMFFRARMDKGIIIVPERDSQEVYQ

SEQ ID NO: 73813 - DNA, 861 bp, Unknown
  Obtained from environmental sample
  misc_feature (1)..(861): n is a, c, g, or t
atgacacccgaatccgccatcaaacaacgttacgacttcgttcttttcttcgatgtccaagacgggaaccccaatggtgatccagacgctggcaatctgccacgtattgatgctgaaactggcatgggactcgtcacggatgtctgcctaaaaaggaaagtgcgcaattttgttcacttgatgcacgacaccaagccgccgtttgacatctttgtcaaagaaaaggcgatattaaaccaaaaaatcgccgaagcctatcaagcactaggcatcaaccttgaagaagacccaaacgatcccaaagacggaaagtcacgcaagaaaaagggttctgcccaaggcggcgaggttgacaaaggtcgaattgccatgtgcgagcgtttttttgacatccgcgcttttggcgccgttatgtcaactggcccgaatgctggtcaagtgcgtggtcctgcccaattcacttttgcccgttccgtggagcctatagtcgcgcttgagcactccataactaggatggcagtcacaaccccagaagatgccgagaaacagggtggcgacaaccgcactatgggccgcaagtacaccgtcccctatggtctgtacagggcacatggtttcatttctgccaacttggccgcccaaactggtttttgccagaatgacttagatcttttttggcgcgcattagaggaaatgttcgaccatgaccactcggcagcacgtggtctgatggcaacgcgcagattgattgtcttccagcacaagactttgcttggcaatgcagcagcttctgatttgttcgatcgcgtcacgtggaagcgtactactgaaggtcccgcgcgctcctcgtgccgattttga

SEQ ID NO: 73814 - protein, 286 aa, Unknown
  Obtained from environmental sample
  DOMAIN (7)...(280): Family of unknown function (DUF694)
  misc_feature (1)..(286): Xaa is any amino acid
MTPESAIKQRYDFVLFFDVQDGNPNGDPDAGNLPRIDAETGMGLVTDVCLKRKVRNFVHLMHDTKPPFDIFVKEKAILNQKIAEAYQALGINLEEDPNDPKDGKSRKKKGSAQGGEVDKGRIAMCERFFDIRAFGAVMSTGPNAGQVRGPAQFTFARSVEPIVALEHSITRMAVTTPEDAEKQGGDNRTMGRKYTVPYGLYRAHGFISANLAAQTGFCQNDLDLFWRALEEMFDHDHSAARGLMATRRLIVFQHKTLLGNAAASDLFDRVTWKRTTEGPARSSCRF

SEQ ID NO: 73815 - DNA, 396 bp, Unknown
  Obtained from environmental sample
  misc_feature (1)..(396): n is a, c, g, or t
atggaagccaataacaggaatatccttttcaaggatgagtgttacagaatcaacggttgtatatacgcggtttataataaactgggtatcggttttcttgaaggggtgtatcaagaggctttggaaatagagctcaaaaaagaagcaatcccttatattacacagcaatccattgaaatattttatgatggcatccctttatcaaagaggtacatagctgatattatatgctttgataaaatactcctggaaataaaagccgtatcagaaatcagcagcctccataaagcgcaattactgaattatctgacagccacaagatacgatttaggtttattgataaattttcactcttatccaaaagtcgaaatcaacaggatgctcagaaaaatataa

SEQ ID NO: 73816 - protein, 131 aa, Unknown
  Obtained from environmental sample
  misc_feature (1)..(131): Xaa is any amino acid
MEANNRNILFKDECYRINGCIYAVYNKLGIGFLEGVYQEALEIELKKEAIPYITQQSIEIFYDGIPLSKRYIADIICFDKILLEIKAVSEISSLHKAQLLNYLTATRYDLGLLINFHSYPKVEINRMLRKI

SEQ ID NO: 73817 - DNA, 615 bp, Unknown
  Obtained from environmental sample
  misc_feature (1)..(615): n is a, c, g, or t
atggcgttgatgatactttccaccgtgggcgcatacagcattgttactcccattttggcctctgcaggagtcttgggtgtggccattggttttggtgcccagtcgctggttcgggactttttgagcggcatcttcattctgattgaagatcagtatggggtgggggacattgtcgactttggatttgatgtagccgggaaagtggaacgcatcgatttacggcttacccatgttagggcttttgatggcacgctgtggcatgtgcgcaatggcgagattttgcgtgcgggcaaccgttcgcagcagtggtcacgcgccgttgctgaggtacgggttccggtgggatcagaccgggatgcagtgcgttctgcgttgggccgggccattgacgatgtggtagctaacccagatttttcgtccaagcttttggaaactccctcagtacgcggggtggaccgcattaccgacgggtattactacttcacggtgcatgggcgcgtccggccaggcactcagttcgatgtgatgcgggctttgttggacgcttctcatcatgagctagtcaaggcggggctgattggagctcacaccgcgcgtgcagtccctgaccagtaa

SEQ ID NO: 73818 - protein, 204 aa, Unknown
  Obtained from environmental sample
  SIGNAL (1)...(22)
  DOMAIN (1)...(195): Mechanosensitive ion channel
  misc_feature (1)..(204): Xaa is any amino acid
MALMILSTVGAYSIVTPILASAGVLGVAIGFGAQSLVRDFLSGIFILIEDQYGVGDIVDFGFDVAGKVERIDLRLTHVRAFDGTLWHVRNGEILRAGNRSQQWSRAVAEVRVPVGSDRDAVRSALGRAIDDVVANPDFSSKLLETPSVRGVDRITDGYYYFTVHGRVRPGTQFDVMRALLDASHHELVKAGLIGAHTARAVPDQ

SEQ ID NO: 73819 - DNA, 927 bp, Unknown
  Obtained from environmental sample
  misc_feature (1)..(927): n is a, c, g, or t
gtgctgcacgcgaataacggccgcgcgaaattgttagcgcgcatgggcgacgaggctgcggatgtactggacgactttttcgaaaaaactctcgagtacgaccgcgccaagattggcaagagtctgatgggttttcagctgtggtttgagggtggagtaatggaggcgaaacgcaaggccagcgccgacctcgacgcggtacggataatgacatcgcacggctctaaggggctcgagtcgcccatagtcttcctgttcgacgcgaaccttcgccccgcacccatgcgcacgaaaattatctgggcggacggactcccgatatataagagcgagcttctgcccgaagtgaacgacgcggaaagactcgcgcgcgaggacgagttctatcgcctgatgtacgtcgccatgacgcgcgctcgcgaccgcctgtatgtatgcggctggcaggacggacgcggcgacaacgaacggagttggtatagctgcatcgcggccgccgctaaatcggagcgcataggcgacgatgtgtcggcgggaaatcttgcggaggcgagggacgaactcaagccggccgcgcccgcggtgccggagttttttggagtgagggccgcatacgttccgccccctcactcgtctcgccgcgaagccgggggcgatgcggtcgagcgcggtttgatattgcacgaactgcttgagaggttgaatccgcagggcgattgggaggccttggcgcgcgctaagttggagcgtaccaaacgcgcggacacagacgagataatcaaatgcctacgcagaattttcgaatctccgtcgttggggttcatcttcggcaatccttcgaagtgcgaggcggagttcgtgacgagggacggcataatccgcatcgacaggctggtcttcacaccgcngggaaaccctggattatag

SEQ ID NO: 73820 - protein, 308 aa, Unknown
  Obtained from environmental sample
  misc_feature (1)..(308): Xaa is any amino acid
MLHANNGRAKLLARMGDEAADVLDDFFEKTLEYDRAKIGKSLMGFQLWFEGGVMEAKRKASADLDAVRIMTSHGSKGLESPIVFLFDANLRPAPMRTKIIWADGLPIYKSELLPEVNDAERLAREDEFYRLMYVAMTRARDRLYVCGWQDGRGDNERSWYSCIAAAAKSERIGDDVSAGNLAEARDELKPAAPAVPEFFGVRAAYVPPPHSSRREAGGDAVERGLILHELLERLNPQGDWEALARAKLERTKRADTDEIIKCLRRIFESPSLGFIFGNPSKCEAEFVTRDGIIRIDRLVFTPXGNPGL

SEQ ID NO: 73821 - DNA, 816 bp, Unknown
  Obtained from environmental sample
  misc_feature (1)..(816): n is a, c, g, or t
atgaaggtcagcaagcttttctcaaaacacggcgggttgttcggggccgtggccggcgagggcagcgcggtgaataatgtaggcgttacggacgcggagatatcttttgacggcagctcaacttcagcagacctatcttcccccgtcggcggcgtggtcggatcccttaccggtatcggcagcatgataaactgctattctaccggtactatcagcggcgcttcgtcggtcggcggcgtggttggatatcttgccgatattaggagtatcgccaactgctattctaccgctaagatcagcggcgcctcattcgtcggcggtgtggtgggttacctcaacggaaacgccggagggtctgtgacaaacagctactcctccggcacggtcagcggcgactccgccgtaggcggcgtggtaggggccttcagcgttgactaccattcgttatgcgttttgaccaactgttattccattgccgcggtcagcggaacggtcgggtacacgggcggtattgtgggaagcgtgatacgaataaatcgcggcggcaacatcagcgtaaccgactgcgccgcgcttaaccccggcgtggcggcgtctgacgcaaataccgtagggcgtatggtcggcggaacaatcggagatatgacggaaacattaaggctcttgaacaacgtggcattctcaggcatgaaaaacagccaaggcgccgccgagtggcaaaacatcggcgcggacggctttgacggggctgatatggcaaaagatgaaattttcgcggacgacggcaccatcggcggcagactcggccgaatctga

SEQ ID NO: 73822 - protein, 271 aa, Unknown
  Obtained from environmental sample
  SIGNAL (1)...(26)
  DOMAIN (73)...(100): The GLUG motif
  misc_feature (1)..(271): Xaa is any amino acid
MKVSKLFSKHGGLFGAVAGEGSAVNNVGVTDAEISFDGSSTSADLSSPVGGVVGSLTGIGSMINCYSTGTISGASSVGGVVGYLADIRSIANCYSTAKISGASFVGGVVGYLNGNAGGSVTNSYSSGTVSGDSAVGGVVGAFSVDYHSLCVLTNCYSIAAVSGTVGYTGGIVGSVIRINRGGNISVTDCAALNPGVAASDANTVGRMVGGTIGDMTETLRLLNNVAFSGMKNSQGAAEWQNIGADGFDGADMAKDEIFADDGTIGGRLGRI

SEQ ID NO: 73823 - DNA, 576 bp, Unknown
  Obtained from environmental sample
  misc_feature (1)..(576): n is a, c, g, or t
atgttatcacaattttttggtgtaaaattctgttttttctccaaggggcaaacaatggtgtacgatgggcgcactgtggcgaaccacttccttgagctggccagccaagacgggatgcagctcacacacatgaagctacagaaattgctatactacgctcacggctggtatctggcaattcacggcgaacccttggtggccgaggggttccaagcatggaagcacggtccagtatcgagaaacgtgtacgatgctttcaggcagttcggtgcccgccccatcgacgagccagcgatgcgggtggtctcctgcacgggcggattgggctttgatctggtgccagtcccactgattgaaaagaccgacgaccagacactcgcgcacctggaaagggtgtacagcgcatacaagagttacagcgcggggcaactatcggctgccacccacgccgagggcacaccgtgggcggatgtcaagaaaatgttcccccggcacgacatcaaggtgcagatcgataactccgccatcaagagttacttcgaaaaacgcaaaaacggcgcggaggcgcgccaatga

SEQ ID NO: 73824 - protein, 191 aa, Unknown
  Obtained from environmental sample
  misc_feature (1)..(191): Xaa is any amino acid
MLSQFFGVKFCFFSKGQTMVYDGRTVANHFLELASQDGMQLTHMKLQKLLYYAHGWYLAIHGEPLVAEGFQAWKHGPVSRNVYDAFRQFGARPIDEPAMRVVSCTGGLGFDLVPVPLIEKTDDQTLAHLERVYSAYKSYSAGQLSAATHAEGTPWADVKKMFPRHDIKVQIDNSAIKSYFEKRKNGAEARQ

SEQ ID NO: 73825 - DNA, 861 bp, Unknown
  Obtained from environmental sample
  misc_feature (1)..(861): n is a, c, g, or t
ttgtttcgactctgccactgttcacgcctgatcggccccttgattgtcagtcggcgcccatgtcacaggtcacagtctgcggcactcctgcctcttcgcctttctttgtggggcagcttacacccgcggatattacacggctcgcaaaacgcgcctgccaggaagccgtcgccgaacaccgccgtgcaggtcgggcggtggcaggctacgaccccgaaaccaagcgggtgtatctggaatttcccgacaagacaagaaagtacgttgatgcctgatgtcctgcacaaacccgttgtgttggcaatcgcaggcccaaacgggtcgggtaaaagcacggttatcaaacagattaatcctattggcatttatgttaatgctgataacatacaaaaagagcagggattaactagcatggaagccgctgaacaagcaacagcaatacgcaacagcctagtagacagtagaacgagttttacttttgagacagtattgtcaacagacaggaatctcttattgctacaaagagctaaagaatctggttatgatgtaaggggcgtttatgtcttaacttgcaatgagaatattaatgtctttagagttaggcagcgcgttgaatctggagggcacgatgtaccagaagaagtaatctgttctcgctactataaatgcctgttacttttgccacgttttgttgatatttgtgactgcgtattgatttatgacaactcaagccctgatgatggtcatacactgatatttagcanaatgtggggcagaagagaaataacaccaaatncatattggtcaatggatgcgatcacaaacctcgtggggcctgttgtgccatcgcgcaacccttga

SEQ ID NO: 73826 - protein, 286 aa, Unknown
  Obtained from environmental sample
  misc_feature (1)..(286): Xaa is any amino acid
MFRLCHCSRLIGPLIVSRRPCHRSQSAALLPLRLSLWGSLHPRILHGSQNAPARKPSPNTAVQVGRWQATTPKPSGCIWNFPTRQESTLMPDVLHKPVVLAIAGPNGSGKSTVIKQINPIGIYVNADNIQKEQGLTSMEAAEQATAIRNSLVDSRTSFTFETVLSTDRNLLLLQRAKESGYDVRGVYVLTCNENINVFRVRQRVESGGHDVPEEVICSRYYKCLLLLPRFVDICDCVLIYDNSSPDDGHTLIFSXMWGRREITPNXYWSMDAITNLVGPVVPSRNP

SEQ ID NO: 73827 - DNA, 396 bp, Unknown
  Obtained from environmental sample
  misc_feature (1)..(396): n is a, c, g, or t
atggacagaatcggccgagggcagaaagatgcccttgtcatggagatggtcgcgggggactcgcgccatgccaacacatactatagaaaaaacagcttccacgcgcttgtgggcgacctgccttacggagtgcagcacggttccggcaagggcggaaggacgcgcaacgcgatgagcatgctgtccgaagcgctgccggagtggcttaaggtgttgaaaccaggcggcgccgccgtgcttgcgtggaacctgttcataataccccgcgatgaaatggaaagcttgttccgttcaaacggtttgcgtatgcccgaagacgaggcgctgaaacagatgagacacaaggtcgatcaggccattgagcgggacgtgatcgtagggcttaaggctgagtga

SEQ ID NO: 73828 - protein, 131 aa, Unknown
  Obtained from environmental sample
  misc_feature (1)..(131): Xaa is any amino acid
MDRIGRGQKDALVMEMVAGDSRHANTYYRKNSFHALVGDLPYGVQHGSGKGGRTRNAMSMLSEALPEWLKVLKPGGAAVLAWNLFIIPRDEMESLFRSNGLRMPEDEALKQMRHKVDQAIERDVIVGLKAE

SEQ ID NO: 73829 - DNA, 519 bp, Unknown
  Obtained from environmental sample
  misc_feature (1)..(519): n is a, c, g, or t
ttggagcggtcaaatgcaccgacagcccaagtgaacggcgtaacgaggatcctgtttgcgaaatatcccacgctggaagctttcgcggatgcggacatttcagtgcttgaagcggatgtgcggcccacgggcttcttccgggtgaaggcgcttcacatcaagcagagcgcggcgctgctgctgtctgaacatggcgggcagatgcctcccgatataaaaaaattaaccgccctgcccggcgtcgggcgcaagacggccaacttgatacgtgggcacatatttaacatacccagcgtggtagtagacacgcatgtcaagcggatatcctacagattaggcttgacggacaacaccggccccgagaagattgaatacgatttgatggctgttttgccggaaaaaaactggatacctttcaaccagcagatcattacacacggcagaaagatatgtttcgcacggtcaccccgctgcggggaatgcccgctgtctaacgaatgcgcattcactcagccttaa

SEQ ID NO: 73830 - protein, 172 aa, Unknown
  Obtained from environmental sample
  DOMAIN (63)...(92): Helix-hairpin-helix motif
  misc_feature (1)..(172): Xaa is any amino acid
MERSNAPTAQVNGVTRILFAKYPTLEAFADADISVLEADVRPTGFFRVKALHIKQSAALLLSEHGGQMPPDIKKLTALPGVGRKTANLIRGHIFNIPSVVVDTHVKRISYRLGLTDNTGPEKIEYDLMAVLPEKNWIPFNQQIITHGRKICFARSPRCGECPLSNECAFTQP

SEQ ID NO: 73831 - DNA, 861 bp, Unknown
  Obtained from environmental sample
  misc_feature (1)..(861): n is a, c, g, or t
gtgtatgctgatgagagtattgttccatatacgtttgagtataaaggtgctattaatatcactgtggtacttagaggtattggagtgaacagaactattaggcttaaagctcacggagatatgtttactgtaaagaaaaacattacttttattttagaaaacaacattacccttcatgggcacaaagggaatactggtagggtggttaaagtatatggcggagaatttaaaatgaatgcaggaacaactattactggtaatggttctagcggagtatataatgacggaatctttactatgaatggtggtactatatccaataatagtgcttctgaaggcggtggagtagatgtacgtagtggaagttttaccatgagtggcgggacaatttctggtaatactgcgtcttatggcggtggagtatatgtaaatgataggtcaggttttactatgagtggcgggactatatccaataatagttcttctaaaggaggcggggtgtatgctgcggggttgggtgccgactttgttatgcgtgggggtattatagcaggtaataccgccgtaaattatggtggaggagtttactgcaatcgacaaaacttctactggaactgtaactttacaaagactggtggaaccattaccggttataacagtgatccagttaatggcaatactgtaaaagacgaagggggcaacgtttttgctcgcaaaggtcatgcggtatatgtagatgacaatatacgtaaagaaactaccgctgggcagggagtgaatatttctaaaaatcctggtaagagcgcatcaggagcttgggatcaagaaaacaatctcaaaatcccctctcggccgatctga

SEQ ID NO: 73832 - protein, 286 aa, Unknown
  Obtained from environmental sample
  misc_feature (1)..(286): Xaa is any amino acid
MYADESIVPYTFEYKGAINITVVLRGIGVNRTIRLKAHGDMFTVKKNITFILENNITLHGHKGNTGRVVKVYGGEFKMNAGTTITGNGSSGVYNDGIFTMNGGTISNNSASEGGGVDVRSGSFTMSGGTISGNTASYGGGVYVNDRSGFTMSGGTISNNSSSKGGGVYAAGLGADFVMRGGIIAGNTAVNYGGGVYCNRQNFYWNCNFTKTGGTITGYNSDPVNGNTVKDEGGNVFARKGHAVYVDDNIRKETTAGQGVNISKNPGKSASGAWDQENNLKIPSRPI

SEQ ID NO: 73833 - DNA, 909 bp, Unknown
  Obtained from environmental sample
  misc_feature (1)..(909): n is a, c, g, or t
atgatgctctggggagtcagcgtgttccctgactgccacatatattgcacatcggcgacagccgatcagctaaaaagtcgcctatggaactatatgcgccaagtgatcggcaattctgccatcagcaaatggtttgacattgatagcgaaaaagctaatttcaaacaccttccaggcaatttcataaaagctcagtcatggagcgcggacaagccgcaaagctgggcaggcgagcacggctacgcaccttgggcggtatttgacgagtgctccgatattgacgatagcgtgttcgaggcttggagtgggtcagcttccaaaaggaacgctctaactctgataatgggtcagccgcgcaaacggacaggcaaactttttgaagcgtttcacgaaaaaagggaattctggcgcgggcttcacatatcctcaattgacacgcctgtatcaagccgcgcattcattgaagaagcccgtaagcagtacggcgaagattccgattactacagggttagagttctggggaaattcccgatagcagatagtgcgcagttgttccccgatgccagggatgcaaaagttgaagatttcaatatggaagctggcgacctccctccggttgcagggcttgatatagccgctggcggagccgacaaaacagttctaatgtttcgctctggcgataaaatcctctcttttcaaaaatacgacaccgganatttcgcatggctggaagatgaaattgtaaaagcaatgctccgcagagggtgcggagtggttgccgccgatgtaacaagttggggttatgggcttgttgaaaggctttctcacagaagagaaataaccactgttgctatcaatggctctaacaaagctcttaaactcaaaaaataccacaacccgcgnttctga

SEQ ID NO: 73834 - protein, 302 aa, Unknown
  Obtained from environmental sample
  misc_feature (1)..(302): Xaa is any amino acid
MMLWGVSVFPDCHIYCTSATADQLKSRLWNYMRQVIGNSAISKWFDIDSEKANFKHLPGNFIKAQSWSADKPQSWAGEHGYAPWAVFDECSDIDDSVFEAWSGSASKRNALTLIMGQPRKRTGKLFEAFHEKREFWRGLHISSIDTPVSSRAFIEEARKQYGEDSDYYRVRVLGKFPIADSAQLFPDARDAKVEDFNMEAGDLPPVAGLDIAAGGADKTVLMFRSGDKILSFQKYDTGXFAWLEDEIVKAMLRRGCGVVAADVTSWGYGLVERLSHRREITTVAINGSNKALKLKKYHNPRF

SEQ ID NO: 73835 - DNA, 516 bp, Unknown
  Obtained from environmental sample
  misc_feature (1)..(516): n is a, c, g, or t
atgggggataaagttattgtgctgacggtgtacggtaaggataaatcgatagaaaatatttctgtaagtctttttgactcgccacataattattcttatggtatgtattatacgggtatggtggatagtattacaaattattgtgaaaacataaatgctcttgaacttaaagatgacaaatggatttatgcacgtgccattagggagaatgaaaaaattacacttgagattccaccgcgttttgatgttataaatcagttacatgatcttcatttacaagtgttgctgcgagaagtttctcattatgatgtggcactcgtgttaaaggatattgacgaagaaacaaaagaaaggtttttcagaaatatgtcgaagaggactgcttttatgattcaagaggattctaatgctatgcaaaatatgtctgataaagatgtttcatccgcgaaaaaaagaatccttgaaaaaatattcaagctgatgtctgatcataaaatttttcttgatctggactag

SEQ ID NO: 73836 - protein, 171 aa, Unknown
  Obtained from environmental sample
  DOMAIN (51)...(169): FliG C-terminal domain
  misc_feature (1)..(171): Xaa is any amino acid
MGDKVIVLTVYGKDKSIENISVSLFDSPHNYSYGMYYTGMVDSITNYCENINALELKDDKWIYARAIRENEKITLEIPPRFDVINQLHDLHLQVLLREVSHYDVALVLKDIDEETKERFFRNMSKRTAFMIQEDSNAMQNMSDKDVSSAKKRILEKIFKLMSDHKIFLDLD

SEQ ID NO: 73837 - DNA, 900 bp, Unknown
  Obtained from environmental sample
  misc_feature (1)..(900): n is a, c, g, or t
ttgcaggaaaccttgagctacatgctgaatgtctccggggtgacgcctccggccatcgtccacgacatcacgcgcttcaaggtgacggacttcttctacgaggccctgcacaattttgccgacgcagcggaggcgaaaggcatcacctttgacaccaggctggatccgggcctgccggaagaactggtgggagaccacgcgctgctgcgccagatcatcaaccatctcgttgataatgcggtgaagtacactgttgtgggcggcgtaagcgtggacatcgcccccctgccctccggcaaagcggatcgggccgtcctgtacatcatcatcgcagataccgggctcggcatatccgacgcccaactggacaccctgttccgttccttctcgtacgccgcccagaacccgaacttgctgtcggagaacaccagcctcgggcttgccatggtgcgcagctacatccgccttctgggcggagaactctgcgccgtcagcgaaccggagcatgggacggaaatgcatcttgtcctgccctttgcgcggcaactgccggaagaagaaatcttttccgcgacgaaggaagaaacgctgcccttcctgccggcctctctggccgcgcccgcgcggggacaaagcgccgccaaggccaaaagccgcattctggtggtggacgacatcccgaccaatatgcagatcatggttctcatcctgcagaaaatgggctatgaggccatcggtgcggacagcggcgcaaaagcgctcagcctgctggaaaaagaaccttttgatctcgttttcatggacatccagatgccgcaaatgagcggcacggaaactacggcacagatcagaaacgacgcctccggacgctatccccgcgacattcccatgtcgccatga

SEQ ID NO: 73838 - protein, 299 aa, Unknown
  Obtained from environmental sample
  DOMAIN (218)...(293): Response regulator receiver domain
  misc_feature (1)..(299): Xaa is any amino acid
MQETLSYMLNVSGVTPPAIVHDITRFKVTDFFYEALHNFADAAEAKGITFDTRLDPGLPEELVGDHALLRQIINHLVDNAVKYTVVGGVSVDIAPLPSGKADRAVLYIIIADTGLGISDAQLDTLFRSFSYAAQNPNLLSENTSLGLAMVRSYIRLLGGELCAVSEPEHGTEMHLVLPFARQLPEEEIFSATKEETLPFLPASLAAPARGQSAAKAKSRILVVDDIPTNMQIMVLILQKMGYEAIGADSGAKALSLLEKEPFDLVFMDIQMPQMSGTETTAQIRNDASGRYPRDIPMSP

SEQ ID NO: 73839 - DNA, 975 bp, Unknown
  Obtained from environmental sample
  misc_feature (1)..(975): n is a, c, g, or t
atgctcttatcagaaccgagaagacgcaaatacgaaccacgcaaattgcctgcgccggttgcgcactccgccgaccgcgtgccgccgcaggcgttggatgtcgagcgtacgatattgggatccatgttgatagacccgtcggttgtggacgttgcgtttgagcagttgtcggaggataatttctattccgaggcgcactcgaaaatatttatctgcatgcgtgagttatccgaaaggggcacgccggttgattccgtcaccatatccgagaaactgcggcagaaggagtggattgaggatgtagggacggaggcgtacctaagcgaactcatggagagcgcggtcacctcgggaaacatggagtatcatgcccagatagttaaggagaagtctacgctcaggcagttgatccgcgcgtcgggtgagataaccacagactgtttttccagtgagagcgcggctcaggatattttggacgcggcggaatctaggattcttgccatatccgagtcgcggataaagaataagtttgagtctatagggcaccttttaccgcaggcgtttaaggcgatattgagttatgaaaccggcgacggagtggtcgggattccatccggttttagcgctcttgatgagatgacgaccgggtttcagaatggcgatttgattatagtgggcgcccgtccgtctatgggtaagacggcgcttagccttgccatggcgcagcatgcagccgtggaggggtacaccaccgcgattttttcgcttgaaatgtccaagagcgcgatcgttgaacgtatgctgtgttccatggcgaaggtgagtatgcacgccctacgtaacggtacgctccccaagaaagattataaagaactggcccagcgcgttagcccgctttatgacgcgccgctgtacatagacgacacccccgctatcaacgtccttgaatacgcgccaaggcctcggccgatctga

SEQ ID NO: 73840 - protein, 324 aa, Unknown
  Obtained from environmental sample
  DOMAIN (199)...(324): DnaB-like helicase C terminal domain
  misc_feature (1)..(324): Xaa is any amino acid
MLLSEPRRRKYEPRKLPAPVAHSADRVPPQALDVERTILGSMLIDPSVVDVAFEQLSEDNFYSEAHSKIFICMRELSERGTPVDSVTISEKLRQKEWIEDVGTEAYLSELMESAVTSGNMEYHAQIVKEKSTLRQLIRASGEITTDCFSSESAAQDILDAAESRILAISESRIKNKFESIGHLLPQAFKAILSYETGDGVVGIPSGFSALDEMTTGFQNGDLIIVGARPSMGKTALSLAMAQHAAVEGYTTAIFSLEMSKSAIVERMLCSMAKVSMHALRNGTLPKKDYKELAQRVSPLYDAPLYIDDTPAINVLEYAPRPRPI

SEQ ID NO: 73841 - DNA, 603 bp, Unknown
  Obtained from environmental sample
  misc_feature (1)..(603): n is a, c, g, or t
atgaatgaagaaagcttaagaaaacgtattcggacgcttttggaggaaattcaagtcaatgttgatcccgttctgttaacccgctgccgaaccattttccggcaggaggtttcttttttccgccgttcctacatggccgcctatcttttgcttcaggccgagggagccgtcacacacgacggcagcaccgtatcgagggaaggcggcggcacaggcgcagcgtcaggcggcggccgtgaggacaacagccggagcaaacgccgtgaacagagggaaggccgctcccgcgccgaggcgaacgccgccgaagggtcgcgcgcgctcggcgatgacgaatcggttcggctttttttcggcattggacggaaccgcaaagtatttccccgcgaaatcatcgccctgataaacaccaaggcccaggttgcccgcgatgacatcggcacgatccgcatcctggacaactactcttttgttcaagtccgcacatccgccgcagatgccgtgattgangcgctgaatggccagacgttccgcgggcgagcgctcaccgtanactacgcccgcaggcgggaagaagaagaagacctgccggaagacccatag

SEQ ID NO: 73842 - protein, 200 aa, Unknown
  Obtained from environmental sample
  DOMAIN (102)...(188): DbpA RNA binding domain
  misc_feature (1)..(200): Xaa is any amino acid
MNEESLRKRIRTLLEEIQVNVDPVLLTRCRTIFRQEVSFFRRSYMAAYLLLQAEGAVTHDGSTVSREGGGTGAASGGGREDNSRSKRREQREGRSRAEANAAEGSRALGDDESVRLFFGIGRNRKVFPREIIALINTKAQVARDDIGTIRILDNYSFVQVRTSAADAVIXALNGQTFRGRALTVXYARRREEEEDLPEDP

SEQ ID NO: 73843 - DNA, 837 bp, Unknown
  Obtained from environmental sample
  misc_feature (1)..(837): n is a, c, g, or t
gtgacagattcggccgagtcatgttttgaaggaatcatggaggctgcatcacagaatatgtacaatattactattttcagtagcgactttgattttgaactggaaaggcgtctggtttccaccctgcggggtaaccgggcagaaggaattgttcttggttcttgtgtcgacaaaaatcatgcccatgaatggtctctggaaatggtaaacaacaagagcagcccgccggtggtatcgttagagtgtcttcttgattccagatatgtgtcttcagtagtagtcgataccagaaatttaagtgcccgccttacacagcaccttattgatatgggacgtaggcaaatactgtttattgcaggtcccgtccatattgaatacgagcatgatcaccttgaaggctacaaagatgtactaaaaaggaacaacattcctattttaaaggaattgataacaaccggcgactttatgtcaaaaaccgcctatgatgtggtctgtaatgcactggaaaacggtgtacggtttgatgccattcaggcttccaacgatcaggccgctatcggcgcgattaaagccctacgtgaatatcgcatttccgtcccaaaagatgtggcggtgtgcggctatgataatctgttccccagtactcttataactccggcaattaccacggtttccattcccggatatgaaatgggagtaaccgcagtagaagaggtgttatggaggattaacaatcgggatgcacccccaaggcagcattacatggatgcagaaataattatccgagcttcaactcaggcagacaaagatactgcctggaatctggataactggtaa

SEQ ID NO: 73844 - protein, 278 aa, Unknown
  Obtained from environmental sample
  DOMAIN (1)...(269): Periplasmic binding proteins and sugar binding domain of the LacI family
  misc_feature (1)..(278): Xaa is any amino acid
MTDSAESCFEGIMEAASQNMYNITIFSSDFDFELERRLVSTLRGNRAEGIVLGSCVDKNHAHEWSLEMVNNKSSPPVVSLECLLDSRYVSSVVVDTRNLSARLTQHLIDMGRRQILFIAGPVHIEYEHDHLEGYKDVLKRNNIPILKELITTGDFMSKTAYDVVCNALENGVRFDAIQASNDQAAIGAIKALREYRISVPKDVAVCGYDNLFPSTLITPAITTVSIPGYEMGVTAVEEVLWRINNRDAPPRQHYMDAEIIIRASTQADKDTAWNLDNW

SEQ ID NO: 73845 - DNA, 351 bp, Unknown
  Obtained from environmental sample
  misc_feature (1)..(351): n is a, c, g, or t
ttgcctcatcaccaaaaaggggagaggacccacgccgccctggatttggcgggaggcgccaccgcagaacggattgccgaagcggtgcgtatcatgttgagccgtagagcggtgaatacggtgtttatctgcatcttcggcggcattacccgctgtgatgaagtcgccaagggagcggttatcgccatgggaaaaccggaagcccaggggaaaaacctgatcctccgtattgagggaaccaacaaggaagaggcggcgaagatcgtaaccgaatcgaagcttcccatcaccgtggccgagggcatccccaattccgtggaagcaatttatctgcttaaacagaaagcctaa

SEQ ID NO: 73846 - protein, 116 aa, Unknown
  Obtained from environmental sample
  DOMAIN (12)...(110): CoA-ligase
  misc_feature (1)..(116): Xaa is any amino acid
MPHHQKGERTHAALDLAGGATAERIAEAVRIMLSRRAVNTVFICIFGGITRCDEVAKGAVIAMGKPEAQGKNLILRIEGTNKEEAAKIVTESKLPITVAEGIPNSVEAIYLLKQKA

SEQ ID NO: 73847 - DNA, 909 bp, Unknown
  Obtained from environmental sample
  misc_feature (1)..(909): n is a, c, g, or t
ttggggtacaacccgaactttttggggcgcgatttacgaaagagcgaaacccgccgaatacttgccgtcatctcctccatcaagcgcagtttctactccgacgttctcgtcggcatggagcaagccgcgtcggcaggcggatacgacataatcatcgcgacgaacaacgacgatccggcgaccgaaacgcatctgttggaaatgctgttttcccgcgtggtggacggagcggttttgcttgcgccgaagcttgacgcccgcacgatctcgggcatttttgaaaaccacaacatagccgtctgtcttgaacgccttgaaggttgcaaagcgctgaccgtaactaccgacaacgtccgcgcgggcaaagacgcggtcaattatctgatcggcaaagggcataaaaaaatcggcttgatcacgaccgaaatgaggagccaatcttcgatcgaccgcgaggcggggtacaggcaggcgttaaaggagcatggcataacggtcgacgagcagttcatttattacggcgactactcgaacgattccggtatgcagggttgcgcgcaccttctcggcctaaaagtcccgccgaccgcgatcttctgcatttcggacatggtagcgatcggggcgatgaacgccgcggttatgatgaaaaagcgcgtcgggaaagacatcatgtttttcgggttcgacaacataccgttctcgcggattttcaaaccgcacctctcgacggtcgaacagccctgcgcggttcaggggcgcgtagtcgtagagaagctgatcgcgaacataaaagccgaaaaagacggctatcgcgacagcggactgtacacactgcctcacagcctttgttttagagaatctaccggagatagtttccgccttccgcatagctcgctgtattcgtaa

SEQ ID NO: 73848 - protein, 302 aa, Unknown
  Obtained from environmental sample
  DOMAIN (17)...(287): Periplasmic binding proteins and sugar binding domain of the LacI family
  misc_feature (1)..(302): Xaa is any amino acid
MGYNPNFLGRDLRKSETRRILAVISSIKRSFYSDVLVGMEQAASAGGYDIIIATNNDDPATETHLLEMLFSRVVDGAVLLAPKLDARTISGIFENHNIAVCLERLEGCKALTVTTDNVRAGKDAVNYLIGKGHKKIGLITTEMRSQSSIDREAGYRQALKEHGITVDEQFIYYGDYSNDSGMQGCAHLLGLKVPPTAIFCISDMVAIGAMNAAVMMKKRVGKDIMFFGFDNIPFSRIFKPHLSTVEQPCAVQGRVVVEKLIANIKAEKDGYRDSGLYTLPHSLCFRESTGDSFRLPHSSLYS

SEQ ID NO: 73849 - DNA, 801 bp, Unknown
  Obtained from environmental sample
  misc_feature (1)..(801): n is a, c, g, or t
atgcagcctctgtatgacctcctggccaacctggccggtccgcccctggttctggcggcttcgcttcggggccgcttcgggggtcgctggcgggaacgcctgggcctggcctcattcccccggcgcgaccccggccggccccgcctgtgcttccacggcgcttcggcgggcgaaatacaggccgccgcctcgatcatcaccgcggtgctggccgcgcggccggccgccgacatctatctcagcgcgggcactccggcgggcctggcccgggcggccgatttccgcgccgaagagtcccgggtccgcgtcatggccgcgcccctggatttctggggcgcggcgggccggacggcggcccggcttaagccggaagccttcatcatcctggaaacggaattgtggcccaacctcatccgggcggtccgggcccacggcgcgaaattgatcctggcctcggcccgcctaagcgagcgttcctttcgacgctaccgcctgatccggccctttatggccaaacttctggccgaattcgacctcatcgccgcggccggccccagggagcgggatttgttcgccgccttgggcgccccccaggaacgactgaccgtgttgggcaaccccaagttcgaccgtctcctgagccaagccccggattccctggcccgggcgtccggcctggcaacccggctctggggcgaggcgccccccggccccctggtggtggccggttcgacccatccgggggaggaggacctcttgattgaggcggccgaaaatctctggcccaccggccggacctaa

SEQ ID NO: 73850 - protein, 266 aa, Unknown
  Obtained from environmental sample
  DOMAIN (26)...(213): 3-Deoxy-D-manno-octulosonic-acid transferase (kdotransferase)
  misc_feature (1)..(266): Xaa is any amino acid
MQPLYDLLANLAGPPLVLAASLRGRFGGRWRERLGLASFPRRDPGRPRLCFHGASAGEIQAAASIITAVLAARPAADIYLSAGTPAGLARAADFRAEESRVRVMAAPLDFWGAAGRTAARLKPEAFIILETELWPNLIRAVRAHGAKLILASARLSERSFRRYRLIRPFMAKLLAEFDLIAAAGPRERDLFAALGAPQERLTVLGNPKFDRLLSQAPDSLARASGLATRLWGEAPPGPLVVAGSTHPGEEDLLIEAAENLWPTGRT

SEQ ID NO: 73851 - DNA, 366 bp, Unknown
  Obtained from environmental sample
  misc_feature (1)..(366): n is a, c, g, or t
gtggcccaacctcatccgggcggtccgggcccacggcgcgaaattgatcctggcctcggcccgcctaagcgagcgttcctttcgacgctaccgcctgatccggccctttatggccaaacttctggccgaattcgacctcatcgccgcggccggccccagggagcgggatttgttcgccgccttgggcgccccccaggaacgactgaccgtgttgggcaaccccaagttcgaccgtctcctgagccaagccccggattccctggcccgggcgtccggcctggcaacccggctctggggcgaggcgccccccggccccctggtggtggccggttcgacccatccgggggaggaggacctcttgattga

SEQ ID NO: 73852 - protein, 121 aa, Unknown
  Obtained from environmental sample
  misc_feature (1)..(121): Xaa is any amino acid
MAQPHPGGPGPRREIDPGLGPPKRAFLSTLPPDPALYGQTSGRIRPHRRGRPQGAGFVRRLGRPPGTTDRVGQPQVRPSPEPSPGFPGPGVRPGNPALGRGAPRPPGGGRFDPSGGGGPLD

SEQ ID NO: 73853 - DNA, 723 bp, Unknown
  Obtained from environmental sample
  misc_feature (1)..(723): n is a, c, g, or t
gtgggtccgcttcgtcagctcagcttccggctgctggtcgccggccagctcgtctcgaacctcggcgacgcgatctactccgtcgcgctgccgtggtacgtcctggcccaccacggcgggacgctgctgctcggatcggtcctcaccgcgtacgggatccctcgcgccgccctgctgctggtcggggggcacgcgagcgatcgcttcagaccgtggacggtgatgctcgtcgccgacatcgcgcgggggatcgccgtggcggcgttcgcgatcgtcgccgcggccgggatcacgcgcgcgcccgtcctgttcgtcatcgcgctcgcgctcggcgcgggcgaggggatcttcatcccggcgtcgtcgacgatcgtcccggcgctgctgggcgccgagcaactgcaggccggcaacgccctgtcgctgggaaccacccagctgagccagctcgccggcccggcgctcggtggcgtgctcgtcgctctcgccggcgcggccgccgggttcgcgatcgacgccggcacgttcgtcgtctcggcattgacgctgatcggcatccgacgcgacgcgcgtcccccggtggcgtccggcgccgacaactccccgtcgggcgggcgaccgccgatcacgagcctgcgcgacctggcccgggaaccgatctgccgggtgatcctcatcaccgacgcgctgcgaacctcggctcgaccggctcggccgatctga

SEQ ID NO: 73854 - protein, 240 aa, Unknown
  Obtained from environmental sample
  misc_feature (1)..(240): Xaa is any amino acid
MGPLRQLSFRLLVAGQLVSNLGDAIYSVALPWYVLAHHGGTLLLGSVLTAYGIPRAALLLVGGHASDRFRPWTVMLVADIARGIAVAAFAIVAAAGITRAPVLFVIALALGAGEGIFIPASSTIVPALLGAEQLQAGNALSLGTTQLSQLAGPALGGVLVALAGAAAGFAIDAGTFVVSALTLIGIRRDARPPVASGADNSPSGGRPPITSLRDLAREPICRVILITDALRTSARPARPI

SEQ ID NO: 73855 - DNA, 945 bp, Unknown
  Obtained from environmental sample
  misc_feature (1)..(945): n is a, c, g, or t
gtgaataaggttatgcaaatagcgagaaaacacaacgccatcatcgtcgtagccgccggtaacgagaatgtattagccggcattaccccgtatcagcgccaaaaaaacgttatagtcgtatcggccaccgacaaaaataatcaaccggcttcgtcgcaaaaagccgatttcagcaattacggcgaatattccacggtttccgcgccgggagtgggaatttacagcagtatcggtaagaacggctatgacacattgagcggcacaagcatggcttcaccgatagtggcgggcacggcggcgcttatgaaatgtttgaacgaatcgcttaccgctcaacagattatatgtattctgaaaaccacaggaatggaaacggggagctatatcggagagttggtacaaatcgacaaggcgttggaaacggtgaggtcgggtccggcgaattggccgaattgcaaagaggcgtctccgtgtgacgccaaggtggcgtcaggaggcgaagagggatatcttggaacgtttgatatgcaacaaaaatccggcacgtttgttttcgactacaatacgcataacgttccggacaagattaccatttatgacggtgtcggtacgggaggaaaggtgatattttcatattcgggaagcggcggacggcgcgtcaacgttaactttagtagttctaaggttaccgttgaagttattggtttaggcagtgggacggtatggaattttatgcttcactgtccggacaagcaaggcgctaacaatcaaaaccccggcaacggcaactccataaacgttcccccgtcgggcggttccggcaatttcggcggcgtcccccccgtcggcggcattatgccgcctccgtccggaaacgaggaagacgaactgcggcgcgagcttcaacggatagaggagagaaagaaagagattaccgagaggtga

SEQ ID NO: 73856 - protein, 314 aa, Unknown
  Obtained from environmental sample
  SIGNAL (1)...(26)
  misc_feature (1)..(314): Xaa is any amino acid
MNKVMQIARKHNAIIVVAAGNENVLAGITPYQRQKNVIVVSATDKNNQPASSQKADFSNYGEYSTVSAPGVGIYSSIGKNGYDTLSGTSMASPIVAGTAALMKCLNESLTAQQIICILKTTGMETGSYIGELVQIDKALETVRSGPANWPNCKEASPCDAKVASGGEEGYLGTFDMQQKSGTFVFDYNTHNVPDKITIYDGVGTGGKVIFSYSGSGGRRVNVNFSSSKVTVEVIGLGSGTVWNFMLHCPDKQGANNQNPGNGNSINVPPSGGSGNFGGVPPVGGIMPPPSGNEEDELRRELQRIEERKKEITER

SEQ ID NO: 73857 - DNA, 639 bp, Unknown
  Obtained from environmental sample
  misc_feature (1)..(639): n is a, c, g, or t
ttgcttggctctttcgattacttcatcctcggctacgcctatctgaagcgcggcaaacagcactacggcgaggctctggagtatctccggcaggcggagagcatggactccggcgatatgcagctttccaaggcaaaggatgccttcgcgagcaaggaaactctgcagcaaacgatggggtatctctattaccagtcaggcgaatacacaaacgccctcagttattaccggcagcataacgaaaaaaagcccaatattctggatcatgcctatatcgggctgtgcgaacttgctctcggcgagtactccaaagccatagccagtttccggtttgtgcgggagtattctgcccaaagccaactgcaattttttgcggtcaagcagcttgcgcgtatttattttcatctggaacagtacgtagaggcggaggattttttcaaatcaagcgtagagcttaacaccaattacgccgaggggtattattggctcgggaagctggaagagatgcgggatgactccgccgcagcgcgccggtattgggagcgaagtcttgaggcggatccctattttggccccgcgattctcaagctgcgtttttccccgcagcacggcactaacagcgccgcgaagcgaaaatag

SEQ ID NO: 73858 - protein, 212 aa, Unknown
  Obtained from environmental sample
  DOMAIN (157)...(190): Tetratricopeptide repeat
  misc_feature (1)..(212): Xaa is any amino acid
MLGSFDYFILGYAYLKRGKQHYGEALEYLRQAESMDSGDMQLSKAKDAFASKETLQQTMGYLYYQSGEYTNALSYYRQHNEKKPNILDHAYIGLCELALGEYSKAIASFRFVREYSAQSQLQFFAVKQLARIYFHLEQYVEAEDFFKSSVELNTNYAEGYYWLGKLEEMRDDSAAARRYWERSLEADPYFGPAILKLRFSPQHGTNSAAKRK

SEQ ID NO: 73859 - DNA, 498 bp, Unknown
  Obtained from environmental sample
  misc_feature (1)..(498): n is a, c, g, or t
gtgaaaaacacaattaccatagccattatgattctctttttcgcgctcttccagagtacggtctttgtggatatcatcagtatagaagagatcaaacccgatctcctgctgattgtgatagcgtttgtggcgtttaagtacggcgggatggccggtcagcttgcgggttttgcggcagggatgcttcaggagtttttttcatccgcgcttctcgggagttatgcctttgtctttacggtcattggctatagtatctcttttgtccagcacaagatgagcgtggataattacatcacctcggcgctcatcgtttttattgccacgatcatcaagggcctgatgttcggttttctcgccctgctttttggcgagatcggcgctatgtacggaagctatattacctccggcttcctgctcgagctggtactcaacccgctttgtgcgatcccgcttatctggtttatgaaccgttttgcggcgccgacgccgcggaagtaa

SEQ ID NO: 73860 - protein, 165 aa, Unknown
  Obtained from environmental sample
  SIGNAL (1)...(23)
  DOMAIN (1)...(158): rod shape-determining protein MreD
  misc_feature (1)..(165): Xaa is any amino acid
MKNTITIAIMILFFALFQSTVFVDIISIEEIKPDLLLIVIAFVAFKYGGMAGQLAGFAAGMLQEFFSSALLGSYAFVFTVIGYSISFVQHKMSVDNYITSALIVFIATIIKGLMFGFLALLFGEIGAMYGSYITSGFLLELVLNPLCAIPLIWFMNRFAAPTPRK

SEQ ID NO: 73861 - DNA, 348 bp, Unknown
  Obtained from environmental sample
  misc_feature (1)..(348): n is a, c, g, or t
ttgccagtaatgcacactagcgccaccgagcgggtcagcgccgatgcgaacgccggccttcttgatcgcctcaatgtcgatgacgttgggcagatcatccacatagttgccgaggaagtcatacttggcggtggtcttagccttgagcgcctcctcaatcggaacgcgcttgatgttttggtagccctctcgcagcaactggttagcgcgatcggcgatccacttggtggcatcggtgtcagctgggccaccgttgggcgggttgtacttgaagccaccatcgcgcggtgggttgtgcgatggggtcaccacgataccgtcggccaggccgggaccgctttgccgtaa

SEQ ID NO: 73862 - protein, 115 aa, Unknown
  Obtained from environmental sample
  misc_feature (1)..(115): Xaa is any amino acid
MPVMHTSATERVSADANAGLLDRLNVDDVGQIIHIVAEEVILGGGLSLERLLNRNALDVLVALSQQLVSAIGDPLGGIGVSWATVGRVVLEATIARWVVRWGHHDTVGQAGTALP

SEQ ID NO: 73863 - DNA, 447 bp, Unknown
  Obtained from environmental sample
  misc_feature (1)..(447): n is a, c, g, or t
atgggcgacggaaccacaatcttgctctgtgatgaccacgaaatgattcacgagacgctgcgggaatacctggtcgccgaggggttcgagtgtgtgtccgccttcgacggtgccgaggcgctccaattattcgccgcccggcgcccggatcttgtgctgcttgacctaatgctgcccaaagtcactggcctggaggtttgccgcgagattcgccagcgatctaacgtcccgatcatcatgctgacggcaaagggcgaagagattgatcgtatcctgggcctcgagcttggtgccgatgactatatcgtgaagccgtttagcccacgagaggtggtcgctcgagtgaaggtggtgctgcgccgcgtccaaaacgctgcgaacctggcgtctaccaccctcgattatcccggcctgagcgtcaacatcgacaattacgaagtatggtag

SEQ ID NO: 73864 - protein, 148 aa, Unknown
  Obtained from environmental sample
  DOMAIN (5)...(116): Response regulator receiver domain
  misc_feature (1)..(148): Xaa is any amino acid
MGDGTTILLCDDHEMIHETLREYLVAEGFECVSAFDGAEALQLFAARRPDLVLLDLMLPKVTGLEVCREIRQRSNVPIIMLTAKGEEIDRILGLELGADDYIVKPFSPREVVARVKVVLRRVQNAANLASTTLDYPGLSVNIDNYEVW

SEQ ID NO: 73865 - DNA, 867 bp, Unknown
  Obtained from environmental sample
  misc_feature (1)..(867): n is a, c, g, or t
ttgctgcgtgaacgagtcgaaacactcaaagccttgggagtgattgacggtatcattcttccaccgcacgcggaaaatgaacagcgacaactcaaccaacgctggttcgggcttgacactaccctcctatgcgctgaaagaaatgaacgttgcctggcctccctcaatgcttttgaaaaaagccccgatgaatacatagtggctgttgacgccgacatcatgctgctgaaaaacaacggccatgaccctgtaaaagaagccgtggagttccttgaggcaaaccccaaggcaatcaccgccagtctcaatattgtaaaacgcgaggatacgccgctccacgcccgaaacatagccgggcaaaacaacagggttgaagtgcgggccggggtatttcacaaggaacgactattgcaggcgcgtcctttaaaaaacagcattgaaaatggcttgctggccctaaaatggttccgggctcttgatcaaaccctgtatgaaaagggagtagagagtctgcgcggaggaagccgattaagcgcttttgtacacccgcccaataattataaaaatgacagattcgcctggtttgaggtgctggaccgccttgaagccggatatgtgcccccggcgcaatatggagtcgttgatttgtgcggtacaggcgcggagtggtatggacccaagcggcatgaaccttttgttttcgtcatgaacggtcgcaatgtcgaaccggacaggctgaaacgctgtattgattccttgaaaatccaggaaggccctgaatggggcgccgtcattattgatgacgcctccgacgacggcagcgccggctatttggaaattttgtgtcgtccgttaaaaagcgtataa

SEQ ID NO: 73866 - protein, 288 aa, Unknown
  Obtained from environmental sample
  misc_feature (1)..(288): Xaa is any amino acid
MLRERVETLKALGVIDGIILPPHAENEQRQLNQRWFGLDTTLLCAERNERCLASLNAFEKSPDEYIVAVDADIMLLKNNGHDPVKEAVEFLEANPKAITASLNIVKREDTPLHARNIAGQNNRVEVRAGVFHKERLLQARPLKNSIENGLLALKWFRALDQTLYEKGVESLRGGSRLSAFVHPPNNYKNDRFAWFEVLDRLEAGYVPPAQYGVVDLCGTGAEWYGPKRHEPFVFVMNGRNVEPDRLKRCIDSLKIQEGPEWGAVIIDDASDDGSAGYLEILCRPLKSV

SEQ ID NO: 73867 - DNA, 825 bp, Unknown
  Obtained from environmental sample
  misc_feature (1)..(825): n is a, c, g, or t
atgccgaataacgacagctcatggatttccgaacgcatccgccccgaacagatcgaaaaatatctcggcgtcggcggcgttgattttattccggatgataaaatcagcgaaatgatcggcgacgcgaagattgtgagcgctgccgatgataaggcgcgtgtccgcgagataattgccaagtctttgtcggtacagacattggcgcccgaagaaacggctatccttctaaatgtcaaagacgatgaactgataagcgagatggaggccgccgccggcgcgataaagaagaaggtctacgacaaccgcatagtgacgttcgccccgctctacgttagcaccgtttgcgtcaacaattgccaatactgcggtatgcgggccgacaacgaatcgctcacccgcggcgtgctgacgcttgacgaattgcgcgccgagattgaagtgcttgccgggcagatcgggcacaaacgcctcattgtggtctacggcgaacatcccaagtccggtatcgactatatgctttccacgatagagactatttacaaaacggaagttcccatcagaaaccgcccttcccgcacggcgtcgatacggcgcgtaaacgtcaacgccgcgccgatgccgattgaagagctgtcgcagctcaacaaggccgggttggggacgtatcaggtttttcaggagacttaccacaaagagacatacgccgcgcttcacccgtcaaatacgttaaaagggaattacaagtggaggctctactgcatgcacagggcgcttgaggccggtatgacgacggggaataggggcgctctctcgtgccgaatctga

SEQ ID NO: 73868 - protein, 274 aa, Unknown
  Obtained from environmental sample
  misc_feature (1)..(274): Xaa is any amino acid
MPNNDSSWISERIRPEQIEKYLGVGGVDFIPDDKISEMIGDAKIVSAADDKARVREIIAKSLSVQTLAPEETAILLNVKDDELISEMEAAAGAIKKKVYDNRIVTFAPLYVSTVCVNNCQYCGMRADNESLTRGVLTLDELRAEIEVLAGQIGHKRLIVVYGEHPKSGIDYMLSTIETIYKTEVPIRNRPSRTASIRRVNVNAAPMPIEELSQLNKAGLGTYQVFQETYHKETYAALHPSNTLKGNYKWRLYCMHRALEAGMTTGNRGALSCRI

SEQ ID NO: 73869 - DNA, 654 bp, Unknown
  Obtained from environmental sample
  misc_feature (1)..(654): n is a, c, g, or t
gtggaccgtggaaaaatagcctataaacccctgcgcggctcggcccgcctctcgcctctcataagcgccatcggcatgtccatatttttgcagaactatgtccaactggcccagagccccaacttcctgacctttcccaaactggtcccggagctcggctttctggccccgatcagccgcaccgtaaacagcacccaattgttcatctggctggccacggccatcatcatgaccgccctgaccgtcctcatcaaattcacccgcctcggactgtccatgcgggccgtatcccaagacccggacatggcccgcctctccggagtcaacatcgaccgggtcatctccagcacctttgtcatcggttcggccttggcggccgtgggcggcctcctcatcggctgctacatgcggcagatcaacttctatataggatttctggccggcatgaaagccttcaccgccgccgtcctaggcggcatcggctccatccccggcgcggtgctgggcggcatggtgctgggcttcgccgaaagcttcgccgccggctatatttccagcgactatgaggacgcggtggccttcgtcctcctcatcgtcatcctcatcgcccggcccggcgggctgatgggcgcggcccagacccaaaaggtttga

SEQ ID NO: 73870 - protein, 217 aa, Unknown
  Obtained from environmental sample
  DOMAIN (4)...(201): Branched-chain amino acid transport system / permease component
  misc_feature (1)..(217): Xaa is any amino acid
MDRGKIAYKPLRGSARLSPLISAIGMSIFLQNYVQLAQSPNFLTFPKLVPELGFLAPISRTVNSTQLFIWLATAIIMTALTVLIKFTRLGLSMRAVSQDPDMARLSGVNIDRVISSTFVIGSALAAVGGLLIGCYMRQINFYIGFLAGMKAFTAAVLGGIGSIPGAVLGGMVLGFAESFAAGYISSDYEDAVAFVLLIVILIARPGGLMGAAQTQKV

SEQ ID NO: 73871 - DNA, 885 bp, Unknown
  Obtained from environmental sample
  misc_feature (1)..(885): n is a, c, g, or t
ttggcgggtacgtttaccgcttctatagcggctgtggcgagtggtgctactgcgacgaatactgggtttaccctcgcgccgaaagcgaccgcgacggcgggagagaagacgattaattttacaaaaaccactacaaaaggaacggtgacaaattcgtcgttcacgtttaccctgctccaacctggtgccgttctgtctttggcttcgaatagcgccaacgttggaacgaccacgccggtcgccattagagcaaccgtgacaggaacgccgacgacggacgatttggaggggttgactataacccttgctaccagtggcgatgcgacgcaatttgacttggcgggtacgtttaccgcttctatagcggctgtggcgagtggtgctactgcgacgaatactgggtttaccctcgcgccgaaagcgaccgcgacgagtgggacaaaaacgattaattttacaacaacaacatcaaaaggtacggtaagaacttcgtcgttcacgtttacaatgaaccaacctggtgccgttctgtctttggcttcgaatagcgccaacgttggaacgaccacgccggtcgccattagagcaaccgtgacaggaacgccgacgacggacgatttggaggggttgactataacccttgctaccagtggcgatgcgacgcaatttgacttggcgggtacgtttaccgcttctatagcggctgtggcgagtggtgctactgcgacgaatactgggtttaccctcgcgccgaaagcgaccgcgacgagtgggacaaaaacgattaattttacaacaacaacaacaaaaggtacggtaagaaattcatcgttcacgtttacactgaacaataccaacacccggcggctcggccgctgtcgataa

SEQ ID NO: 73872 - protein, 294 aa, Unknown
  Obtained from environmental sample
  SIGNAL (1)...(18)
  misc_feature (1)..(294): Xaa is any amino acid
MAGTFTASIAAVASGATATNTGFTLAPKATATAGEKTINFTKTTTKGTVTNSSFTFTLLQPGAVLSLASNSANVGTTTPVAIRATVTGTPTTDDLEGLTITLATSGDATQFDLAGTFTASIAAVASGATATNTGFTLAPKATATSGTKTINFTTTTSKGTVRTSSFTFTMNQPGAVLSLASNSANVGTTTPVAIRATVTGTPTTDDLEGLTITLATSGDATQFDLAGTFTASIAAVASGATATNTGFTLAPKATATSGTKTINFTTTTTKGTVRNSSFTFTLNNTNTRRLGRCR

SEQ ID NO: 73873 - DNA, 900 bp, Unknown
  Obtained from environmental sample
  misc_feature (1)..(900): n is a, c, g, or t
gtgttggtattgttcagtgtaaacgtgaacgatgaatttcttaccgtaccttttgttgttgttgttgtaaaattaatcgtttttgtcccactcgtcgcggtcgctttcggcgcgagggtaaacccagtattcgtcgcagtagcaccactcgccacagccgctatagaagcggtaaacgtacccgccaagtcaaattgcgtcgcatcgccactggtagcaagggttatagtcaacccctccaaatcgtccgtcgtcggcgttcctgtcacggttgctctaatggcgaccggcgtggtcgttccaacgttggcgctattcgaagccaaagacagaacggcaccaggttggttcattgtaaacgtgaacgacgaagttcttaccgtaccttttgatgttgttgttgtaaaattaatcgtttttgtcccactcgtcgcggtcgctttcggcgcgagggtaaacccagtattcgtcgcagtagcaccactcgccacagccgctatagaagcggtaaacgtacccgccaagtcaaattgcgtcgcatcgccactggtagcaagggttatagtcaacccctccaaatcgtccgtcgtcggcgttcctgtcacggttgctctaatggcgaccggcgtggtcgttccaacgttggcgctattcgaagccaaagacagaacggcaccaggttggagcagggtaaacgtgaacgacgaatttgtcaccgttccttttgtagtggtttttgtaaaattaatcgtcttctctcccgccgtcgcggtcgctttcggcgcgagggtaaacccagtattcgtcgcagtagcaccactcgccacagccgctatagaagcggtaaacgtacccgccaaatcaaactgcgtcgcatcgccactggtagcaggggtatag

SEQ ID NO: 73874 - protein, 299 aa, Unknown
  Obtained from environmental sample
  misc_feature (1)..(299): Xaa is any amino acid
MLVLFSVNVNDEFLTVPFVVVVVKLIVFVPLVAVAFGARVNPVFVAVAPLATAAIEAVNVPAKSNCVASPLVARVIVNPSKSSVVGVPVTVALMATGVVVPTLALFEAKDRTAPGWFIVNVNDEVLTVPFDVVVVKLIVFVPLVAVAFGARVNPVFVAVAPLATAAIEAVNVPAKSNCVASPLVARVIVNPSKSSVVGVPVTVALMATGVVVPTLALFEAKDRTAPGWSRVNVNDEFVTVPFVVVFVKLIVFSPAVAVAFGARVNPVFVAVAPLATAAIEAVNVPAKSNCVASPLVAGV

SEQ ID NO: 73875 - DNA, 804 bp, Unknown
  Obtained from environmental sample
  misc_feature (1)..(804): n is a, c, g, or t
atggtagtgacggcatatttcaataacggcacaaacgcagctacgaccaactacacaacggagagctttagcagcacaacgtctggaaccaagacagtaacggtaagagtgggcagcaagactgtgacattcaccgtggatgtgcgcgccgtggcggatgccgatatcacagcgatagcggtaataacccagccgaccaagaaagactatatccagaatgagactttaaacctagcggggatggttgtgtccgtaaattacagcaacgatacggtaagcagtaactataccggctataacgtaacaccgtctaacaacagcgtcctaagcacgttaggtatccagacaatcaccgtgagcgcaaatggcaagaccacgacgaccacggtaaatgtaactgtagccctgaacagcatcaggatcaatacctatccggccaaattaacgtacactatcgaccaacaattagtaacaaccggaatggtggtatctgtgaacttcagcgataatactagcgcggttacaactaactactctgtctccggctttgacagcagtaccgccggcgcgaagaccataacggtaactgtaggcaatagaactacgacgttcatagtagacgtaacccattccttcccgccgatgacagtactgagtgataacaatggatttgtaaccctgtccggcggaacctttgatatgggcggacattttgataacaatggtaacccgatgcacagtgtaacgctaagcaaatttgccatagccaaacccagacgacacaggcggaataccaggctgtga

SEQ ID NO: 73876 - protein, 267 aa, Unknown
  Obtained from environmental sample
  DOMAIN (63)...(132): Bacterial Ig-like domain (group 3)
  misc_feature (1)..(267): Xaa is any amino acid
MVVTAYFNNGTNAATTNYTTESFSSTTSGTKTVTVRVGSKTVTFTVDVRAVADADITAIAVITQPTKKDYIQNETLNLAGMVVSVNYSNDTVSSNYTGYNVTPSNNSVLSTLGIQTITVSANGKTTTTTVNVTVALNSIRINTYPAKLTYTIDQQLVTTGMVVSVNFSDNTSAVTTNYSVSGFDSSTAGAKTITVTVGNRTTTFIVDVTHSFPPMTVLSDNNGFVTLSGGTFDMGGHFDNNGNPMHSVTLSKFAIAKPRRHRRNTRL

SEQ ID NO: 73877 - DNA, 450 bp, Unknown
  Obtained from environmental sample
  misc_feature (1)..(450): n is a, c, g, or t
atgatccccagccaagtcgccgcccaatcggacacctacctgctgcagcgaatcagtggggcctcccccgaacagctttgcgtgttgctcttggagggggcgcagaggttcctgctccaggccatccaggcaaccaagagccggaacatctccgaaaaggccaaatacgtcaaccgcgtctcggcgatcatcgaggaactgacggtccagctcaaccacgacgaggagaacgagctggtgatgaacctgtccaggatctacgagtggtggatgagccagctattcgaggcatccaggaacaacgagccagaaaagtttgaaatgatctacaaccagatagactccatcaaggccacgtgggaagagctgatacggcggaaccaggccgtgccccaggccatgcaggccgccgccgcgcccaggggcctcggcgaggagctcataggatga

SEQ ID NO: 73878 - protein, 149 aa, Unknown
  Obtained from environmental sample
  DOMAIN (6)...(127): Flagellar protein FliS
  misc_feature (1)..(149): Xaa is any amino acid
MIPSQVAAQSDTYLLQRISGASPEQLCVLLLEGAQRFLLQAIQATKSRNISEKAKYVNRVSAIIEELTVQLNHDEENELVMNLSRIYEWWMSQLFEASRNNEPEKFEMIYNQIDSIKATWEELIRRNQAVPQAMQAAAAPRGLGEELIG

SEQ ID NO: 73879 - DNA, 972 bp, Unknown
  Obtained from environmental sample
  misc_feature (1)..(972): n is a, c, g, or t
ttgtcaangaaaggcgatgaatatatggctaggccagaaaagtgctggacactacagcgccagacccaggccgccaccctggcctgcgccgggcctggctctcttggcttctcgggccaatggaacacgcaggcgcatttactaccatgcaataacgggacgctggacctttcgaccggcgaactgctccggccccggccggagcattactttaatcgcgtagtgccctgggactacctggggcctgatgtgccttgccctacctggacggatctgttgactaaaagcctggggtatgaccaggaacttttaaaatacttcgagctggtcttgggctcctgtctcctgggccaggctcctaaaaacatcatcgtggccctgggtccggaggccaacaatggcaaaagcaccatcttcagcgtgttctctatgcttatgggtactttcgcggtttccctcggcccggccctgcttctaagccaccccctgcgcgattcggacgcggcccggccgggcttgctgcgcctgatcggcgcccgggcggccttcttatctgaagctgattcccggcattggtttgacttggccgaagttaaaaaactcaccggcggggacgattacagcgagcgcagcctcaaccaggccctttataacgattttagcgttatcgccaccatgatactgcactccaaccacatgcccaagacggccggcctggaccggggcttttatgatcggctggtggtcctgccctttctggctcaattcctggcccaggacaaactggacgcagccttggcggccggcaaaaaaaacgtctatctggcccataataagcaggagatcaaggaaaagcttagaaaggaaatgagcggtattttaggccgaacagttacggccgcccgcttattgctgtcttacaagcggcattttacccccgccacccccaatatgtcgcaaatatgtcgatga

SEQ ID NO: 73880 - protein, 323 aa, Unknown
  Obtained from environmental sample
  DOMAIN (48)...(320): Poxvirus D5 protein-like
  misc_feature (1)..(323): Xaa is any amino acid
MSXKGDEYMARPEKCWTLQRQTQAATLACAGPGSLGFSGQWNTQAHLLPCNNGTLDLSTGELLRPRPEHYFNRVVPWDYLGPDVPCPTWTDLLTKSLGYDQELLKYFELVLGSCLLGQAPKNIIVALGPEANNGKSTIFSVFSMLMGTFAVSLGPALLLSHPLRDSDAARPGLLRLIGARAAFLSEADSRHWFDLAEVKKLTGGDDYSERSLNQALYNDFSVIATMILHSNHMPKTAGLDRGFYDRLVVLPFLAQFLAQDKLDAALAAGKKNVYLAHNKQEIKEKLRKEMSGILGRTVTAARLLLSYKRHFTPATPNMSQICR

SEQ ID NO: 73881 - DNA, 816 bp, Unknown
  Obtained from environmental sample
  misc_feature (1)..(816): n is a, c, g, or t
gtgttctttaatctgggtatgctgcaatttgagggcggggattatgcgcaggccgcgcaaagtttcagcaaggcggcggggttcagccccgatgaactgcgaatctatatcatgcagtgccgtacgtatatcaagctggacaaaaacgccgaggcgatcaccgcgctgggcatggtgcgcaaacttgatacgatgggctggcagacggatctcctgaaagcggaactcgatttcaagaacaatcgtcttgaggatgccgaaaccgccctcaacgcgcatctggctctctttccggacagctataacgggcttctgattctgggcgagatcgccgcaaaaaaagggcaatatgaattggcgtatacccgctttgcgcgggcggcggcggtggattacacccgcaaggaagccgcgcttcgcgaggtggacgcgctttttgccttaaaacgcatggatgacgcccgcgacagactgagtgtgctttcaagctctttccccgaggacgcgcgggttctggatggactcatgcgtatatattttcaacagggatattacgataaggccgcagtctatggcgaaaagagacttgttttgccgggcacaaaaaaggaaatcggcgaggcggaagttattaccggactctcgcatctcatgaacgaggatctcaccaagcgaagcccggaaaatggggtgaagtatctctggccgcatcgcaacgacgagcccaaaaacaggcttatgctgcgctatctctatggggcgcttgtagaattgaaggatgacacgcgcgcccgagttattcgccgtatgctttag

SEQ ID NO: 73882 - protein, 271 aa, Unknown
  Obtained from environmental sample
  misc_feature (1)..(271): Xaa is any amino acid
MFFNLGMLQFEGGDYAQAAQSFSKAAGFSPDELRIYIMQCRTYIKLDKNAEAITALGMVRKLDTMGWQTDLLKAELDFKNNRLEDAETALNAHLALFPDSYNGLLILGEIAAKKGQYELAYTRFARAAAVDYTRKEAALREVDALFALKRMDDARDRLSVLSSSFPEDARVLDGLMRIYFQQGYYDKAAVYGEKRLVLPGTKKEIGEAEVITGLSHLMNEDLTKRSPENGVKYLWPHRNDEPKNRLMLRYLYGALVELKDDTRARVIRRML

SEQ ID NO: 73883 - DNA, 486 bp, Unknown
  Obtained from environmental sample
  misc_feature (1)..(486): n is a, c, g, or t
ttgatggccgggaatcgacacgcttttgcgcattcgcaggaaatagaggccatgattaaaaaactgatactggccaatccttccgccgaagcgcgcggcaccggaacttatatctggccgctgcgcggtccgctgacttcccggtacggcaatagggtgcatccgattttcaaggtggccaaaatgcacacgggactggatatttacgcgccgcatggcacgccggttaaggccgcggattccggcgtggtgatttactcggattggtacggcggttatggccgggcaattatcgtggaccatggccgcggtttctccactttgtacgcgcatctgtcccgccagacagttaagctgggcgaccgggtcaataaaagccagcctatcggcaatgtcggcgccaccggttatgccaccggtccgcacctgcattttgaagtgcgggaaaacggcgaaaccaaagacccggaactataccttccttaa

SEQ ID NO: 73884 - protein, 161 aa, Unknown
  Obtained from environmental sample
  DOMAIN (61)...(156): Peptidase family M23
  misc_feature (1)..(161): Xaa is any amino acid
MMAGNRHAFAHSQEIEAMIKKLILANPSAEARGTGTYIWPLRGPLTSRYGNRVHPIFKVAKMHTGLDIYAPHGTPVKAADSGVVIYSDWYGGYGRAIIVDHGRGFSTLYAHLSRQTVKLGDRVNKSQPIGNVGATGYATGPHLHFEVRENGETKDPELYLP

SEQ ID NO: 73885 - DNA, 798 bp, Unknown
  Obtained from environmental sample
  misc_feature (1)..(798): n is a, c, g, or t
atggaaaggccgatggcgccatcgcaagctgatcgggaaatcatcgtgaccggatttgcggagctactagcggacgatcccatcggcacctccagtcagatcgccgcttatgtggaatccattgggggtaacgtggcatcaaggcgcgagtggcgcggtacggaaaccaatccgggcaacgctacgctgaacctaaggatacctgcgggcaacttgaacaatttcctcgacgggttgcgaaactttggcgaggttcgccaaactagcattgatcagttcgatgtgaccgcgcaagcaattgaccttgatgcccggattgaggcgttgcagatttcagtgacccgcttgacccagttattagcaaccgctggcgatactggcgacttgctgcaagtagaacgcgaactttccaatcggcaagccgacttggactcgctcagagcaacccgcgctgacctgaccgggcgggtccagatgtcaactttggagctttccatttcgccgaccccaactgcagtgcgcgaggctgagcccagccccgggttcatcggcggtttgcaacgcggctggcaagcattcgtcaacttctggcacggattcttagtgattttgggtatcttgctaccgtggctagtaactctcggtttgctcgctggcatcgtcggggcgctggggcatttaggacggcgagcgcgccaaaagcgctatgctgccagcaccggaactgtaacgcgcacaaccaacgatgccagctcgcctaccatcgagctaaccgacgatggtgaactgccagattaa

SEQ ID NO: 73886 - protein, 265 aa, Unknown
  Obtained from environmental sample
  misc_feature (1)..(265): Xaa is any amino acid
MERPMAPSQADREIIVTGFAELLADDPIGTSSQIAAYVESIGGNVASRREWRGTETNPGNATLNLRIPAGNLNNFLDGLRNFGEVRQTSIDQFDVTAQAIDLDARIEALQISVTRLTQLLATAGDTGDLLQVERELSNRQADLDSLRATRADLTGRVQMSTLELSISPTPTAVREAEPSPGFIGGLQRGWQAFVNFWHGFLVILGILLPWLVTLGLLAGIVGALGHLGRRARQKRYAASTGTVTRTTNDASSPTIELTDDGELPD

SEQ ID NO: 73887 - DNA, 978 bp, Unknown
  Obtained from environmental sample
  misc_feature (1)..(978): n is a, c, g, or t
ttgggtttgcaacagcaatacttctttgtgggtgcgtcaatttctgattatgtgaatcgcgtttgtgcccagatttttgatttacatcgtctggatgagcgtatcaccttccagcttaatgacacgcacccggttattgctattccggaactaatgcgcgttttgatggatgaaaagggctttagctgggatgaagcttgggaaatctccaagaagtgctttgcttatacttgccatactttgttgccagaggctttggaagtttggcccgtagagttgatgcagcgcctattgccgcgtcacatggagatcatttacaagatcaatgaagagttcattgatttggtacgtaagtggtccaatggcgatgaaatgctagtgcgcaatatgtccatcattcaagagcacccgcaacgggctgttcggatggcttatttggcaactgttggttctaaagccgttaatggggtggctgaacttcactcgcaattgttgcgcgataaagtgttggccaactttgctaagttgtggccgggcaagtttgtaaacgtcaccaatggcgtgaccccccgccgcttcatattcgaagctaacccgctgatgtccaagctgatcacagagcatattggcgatggttgggtcactgacctggaacaattcaagaagctcgaaccgttggctgatgatccagagttccgggctaagtggcgtgaagttaagcatgccaacaaagttcgcttgcagaagtatctcaaagagcgcaatgacattgacattgatccggacacgatgttcgacatcatggtaaagcgtttgcatgaatataagcggcaaatgcttaaagccttgcatgtggtttatctgtacgaccaaattaagtctggcgcaattgatccggcaaccttagtacctcgtactgtggtattcggtgctaaagcagcgcctggttacaagaggccaaagaaatcatttctttga

SEQ ID NO: 73888 - protein, 325 aa, Unknown
  Obtained from environmental sample
  DOMAIN (1)...(325): Carbohydrate phosphorylase
  misc_feature (1)..(325): Xaa is any amino acid
MGLQQQYFFVGASISDYVNRVCAQIFDLHRLDERITFQLNDTHPVIAIPELMRVLMDEKGFSWDEAWEISKKCFAYTCHTLLPEALEVWPVELMQRLLPRHMEIIYKINEEFIDLVRKWSNGDEMLVRNMSIIQEHPQRAVRMAYLATVGSKAVNGVAELHSQLLRDKVLANFAKLWPGKFVNVTNGVTPRRFIFEANPLMSKLITEHIGDGWVTDLEQFKKLEPLADDPEFRAKWREVKHANKVRLQKYLKERNDIDIDPDTMFDIMVKRLHEYKRQMLKALHVVYLYDQIKSGAIDPATLVPRTVVFGAKAAPGYKRPKKSFL

SEQ ID NO: 73889 - DNA, 1020 bp, Unknown
  Obtained from environmental sample
  misc_feature (1)..(1020): n is a, c, g, or t
atggccgagaaagttggaatgctattgcccaccaacaaagcctatcacaaggttctttacggcggcagaggtggaggcaaaagctgggcggcggcaatgatggctatacgcaattccatgaagtgcaaaatgcgcattctatgcacaagggaaatacagatttccattgctgatagtatgcacaagctttgcgttgacataataaaaagcaagagaatagaagaacttttcaaaataaaccaatacgatattgtatgcaaactcacgggcagcgaatttatattcaagggtatgcaagacgtgaaaagccttgaaggaatagatttggctattgtagaggaagcgcagcaggtaagccccaaaaacgcagaaacgcttgaacccacgataaggaacgagcatagccaaatctggtggctgttcaacccagagaacgaaagcgactgggtatatgaccattttttggtaaagctcccgccgcctggcacattaatagaaaaaataaactattacgaaaatccaagatgctcaaaaaagctaataatggcagcggagcatttaaaaaacgcggactacgagaaatacaagcacatatacctcggcgaactgaatacaggcataggctggggcttcataaatcccctgtggatagattatgctgccagcggcaacatcaaaccgcttgaaggcagagcggcaagcaggtgggcggtggcttgcgaccccgcttttgaaggcaatgacaaatgcgtttacgtggacggcaaaggcaatcggataatcagcattgagagcgaggcttgggggaatagcgttcctatagccaaaaagctgaacgacaaggttgaacgctacggcagattcaactgcgaccttggcgtggattgcgttggcacaggcacgggcgtaagcaatatactggaggcagtttacaaactcggcgattgcctgaaacagctgaacaacaaagacaggattgggttccggntgcccccanaggcgcggaggcagggagcataa

SEQ ID NO: 73890 - protein, 339 aa, Unknown
  Obtained from environmental sample
  DOMAIN (12)...(47): Protein of unknown function (DUF1545)
  misc_feature (1)..(339): Xaa is any amino acid
MAEKVGMLLPTNKAYHKVLYGGRGGGKSWAAAMMAIRNSMKCKMRILCTREIQISIADSMHKLCVDIIKSKRIEELFKINQYDIVCKLTGSEFIFKGMQDVKSLEGIDLAIVEEAQQVSPKNAETLEPTIRNEHSQIWWLFNPENESDWVYDHFLVKLPPPGTLIEKINYYENPRCSKKLIMAAEHLKNADYEKYKHIYLGELNTGIGWGFINPLWIDYAASGNIKPLEGRAASRWAVACDPAFEGNDKCVYVDGKGNRIISIESEAWGNSVPIAKKLNDKVERYGRFNCDLGVDCVGTGTGVSNILEAVYKLGDCLKQLNNKDRIGFRXPPXARRQGA

SEQ ID NO: 73891 - DNA, 699 bp, Unknown
  Obtained from environmental sample
  misc_feature (1)..(699): n is a, c, g, or t
ttggagaggcttaaaaataagctggccgaagccacgcacccgtcgccgttcaactacaccgaaaacgcgatgctttatatccccgaaaatatgccgttcccagattccaagagccagaagtacatcgcggcaatcacggaggaaatcgaacggctgatactcgcgtcgcacggccacgccgccgtcctgttcacaagttacgatactatggggcgcgtttacgcggaactggccaaacggaatctgccgttccctttgttccggcttgataaaggcggcgtccgagagattgagcggttcaaagcaagcggtaacggcgttctgttcgcttcgggcgcgctttgggaggggatagatattcccggcgacgcgctttccatgcttatcatcgtcaagctgccgttcccgacgcccgacgcaatcggcgaatacgagcagacgcaatacccggattttcacgcctaccttaacaatgtccttatccccgaaatgctcataaagctcaaacagggattcgggcggttgctgcggactgaacgcgatacggggtgtgtggcgattctcgactgccgtgtaaattcgcgtggcagttaccgggcgcgcgtccttagtgcgctggcgaactgccgtattacaagcatcatcaacgacataagtgactttctgcggtcagtgaaaccgcttgaatattgggattaa

SEQ ID NO: 73892 - protein, 232 aa, Unknown
  Obtained from environmental sample
  misc_feature (1)..(232): Xaa is any amino acid
MERLKNKLAEATHPSPFNYTENAMLYIPENMPFPDSKSQKYIAAITEEIERLILASHGHAAVLFTSYDTMGRVYAELAKRNLPFPLFRLDKGGVREIERFKASGNGVLFASGALWEGIDIPGDALSMLIIVKLPFPTPDAIGEYEQTQYPDFHAYLNNVLIPEMLIKLKQGFGRLLRTERDTGCVAILDCRVNSRGSYRARVLSALANCRITSIINDISDFLRSVKPLEYWD

SEQ ID NO: 73893 - DNA, 792 bp, Unknown
  Obtained from environmental sample
  misc_feature (1)..(792): n is a, c, g, or t
ttgcagcttgccgggccggttcccgaagccctgtactggctttcccttgcggagctttcctcgggaagctacaacgaagctctttccaccctggacaagctggaaaaaatcgacaagggcggacagtggagcgcagatctcccctatcatcggggcagatctctttattacctgggccgcaatgaagaagccctgattatcctggggaattatgcggataaactggacgattccaatccccgtaagtccgcggcgtactattggatgggggagtgcctttttgccatggggcggctggacgacgcggccggagctttttccatggtaatggataaattcccatacagcatcaaatacgaagcatcttcctacaggattaacctaatcatccaaaaaaaggtggaagaagaactcctgacgatcctgaaatggagtcacgaagaatcccttagatctctgggagaataccaggaacgggaaaaaagctatgatcaggcgattatcgcataccagcagcggatcagtgaattgctggccgaaaccggaacgttggaggccgcaactgcggaaaacgcggtcgttgcggacacatacccgaagccggttggtagcggcggagcgcgtattgctgcccttgaagcaagcctcgcggaagccaaatgcggccctggcaaaagcaagcggagcccggggcgcccggagttccagcactatttcaaatccagaaggttcattggcgggttcttgaaacggcagaatgccttcctggaactaagccaaggccctgaataa

SEQ ID NO: 73894 - protein, 263 aa, Unknown
  Obtained from environmental sample
  misc_feature (1)..(263): Xaa is any amino acid
MQLAGPVPEALYWLSLAELSSGSYNEALSTLDKLEKIDKGGQWSADLPYHRGRSLYYLGRNEEALIILGNYADKLDDSNPRKSAAYYWMGECLFAMGRLDDAAGAFSMVMDKFPYSIKYEASSYRINLIIQKKVEEELLTILKWSHEESLRSLGEYQEREKSYDQAIIAYQQRISELLAETGTLEAATAENAVVADTYPKPVGSGGARIAALEASLAEAKCGPGKSKRSPGRPEFQHYFKSRRFIGGFLKRQNAFLELSQGPE

SEQ ID NO: 73895 - DNA, 507 bp, Unknown
  Obtained from environmental sample
  misc_feature (1)..(507): n is a, c, g, or t
ttgcggggttcggaagtatcccagcgacggctgccgtcgaataagatacaggcgattgtcgccaactcaaggggagacgtgtacctcggtaccaacaagggcctgagcgtttacaatgggtcgagtttccaaaattacaacgccaagaacagcggcaacagcggtttggagtggaacaatgtgacggtgctcgccaaggagccgaattccgacgttatatggatgaccgacggccccaaaaacctcaacactttcgacggcaagaactggaagcgttacgtggaaatacaagatggcataacctgcataatgaacgatacccgtcgcacgtggttcggttcggaggcgggtctgctgaggttcaacggcgaagagtgggtctcggacaaaaacatgcacggcgtgccggcggagcaggtatacgcgatgcagagggacgtaaacgggaatttgtgcttcggaatggaaaaaggggttatgatcctctccaatccatacagaaagtag

SEQ ID NO: 73896 - protein, 168 aa, Unknown
  Obtained from environmental sample
  misc_feature (1)..(168): Xaa is any amino acid
MRGSEVSQRRLPSNKIQAIVANSRGDVYLGTNKGLSVYNGSSFQNYNAKNSGNSGLEWNNVTVLAKEPNSDVIWMTDGPKNLNTFDGKNWKRYVEIQDGITCIMNDTRRTWFGSEAGLLRFNGEEWVSDKNMHGVPAEQVYAMQRDVNGNLCFGMEKGVMILSNPYRK

SEQ ID NO: 73897 - DNA, 447 bp, Unknown
  Obtained from environmental sample
  misc_feature (1)..(447): n is a, c, g, or t
atgcgcctggaattcaaaagggtccgtccccgggaagacgcggatttgcccgtgccggcctggcaaacggccggggcctccggtttggacctggccgccggggtccgggagcccctgactttgactccgggcgagatagccctggttcccaccggctgggccatggccctgccggcgggctatgaaggacaaatccggccccgcagcggtctggcccttaaaaaaggcctgaccctggtcaacagccccgggaccattgattgtgactaccggggggaagttcaactgcccatgatcaacctggggccggccccggtgaccattcggcggggagaccgcctggctcaactggtggtggccaaggttgaacggcctgaactttttgtggtggagaacctggctcccaccgaccggggaacgggcggtttcggttctaccggctcatga

SEQ ID NO: 73898 - protein, 148 aa, Unknown
  Obtained from environmental sample
  DOMAIN (14)...(147): dUTPase
  misc_feature (1)..(148): Xaa is any amino acid
MRLEFKRVRPREDADLPVPAWQTAGASGLDLAAGVREPLTLTPGEIALVPTGWAMALPAGYEGQIRPRSGLALKKGLTLVNSPGTIDCDYRGEVQLPMINLGPAPVTIRRGDRLAQLVVAKVERPELFVVENLAPTDRGTGGFGSTGS

SEQ ID NO: 73899 - DNA, 375 bp, Unknown
  Obtained from environmental sample
  misc_feature (1)..(375): n is a, c, g, or t
atgctgaaaccttccgacggcgaagagggcgttatagattttgtcgttaagaccgttatagcggcgggcggtaatccgtgtcctccggtaatcgtcggcgtgggaataggcggcgacgcggaaaaatgtatggaaatcgccaaaaaggcgctgcttcgtccggtcaaagaaagccatccgataaagttttaccgcgaaatggagaaaaaaatccttgccgaaataaacaaaagcggaatcggcgcacagggattgggcggaaaaataaccgcgcttgcggtacatatcgaaacgtttgcgacgcacatagcctgtctgccggtaggcgtcgctgtaaattgccacgtcgcgcggcattgcgaagttttgttgtga

SEQ ID NO: 73900 - protein, 124 aa, Unknown
  Obtained from environmental sample
  DOMAIN (1)...(124): Fumarate hydratase (Fumerase)
  misc_feature (1)..(124): Xaa is any amino acid
MLKPSDGEEGVIDFVVKTVIAAGGNPCPPVIVGVGIGGDAEKCMEIAKKALLRPVKESHPIKFYREMEKKILAEINKSGIGAQGLGGKITALAVHIETFATHIACLPVGVAVNCHVARHCEVLL

SEQ ID NO: 73901 - DNA, 534 bp, Unknown
  Obtained from environmental sample
  misc_feature (1)..(534): n is a, c, g, or t
ttggaccttggccgcggcccgcctgagcgaagaccccgccggccaggccaaatggcaggcccgggccgccgaattcgaaaaatcctggtcggccggccgggattgggaggcccggcaccggcgggcgctgaaagtctattacgaggccttgagcgaggtggcccggaaagtggccggcttttaccccaacgggcgccagaatgccgaactggcggtcgtcttggaccgcaacgagcgggccctggccgctctaagcaagaatcccgacgattacctggaaaaagaaaccttctcctacggcctgatgaacctggccgacctcataatccgctccacggacctcgaactggaccagccggccgacctcatcatggacgcggtcataaagganaccagggctctgcgccgccagaaggggcttcactatcgggcccggctggccttcatctacgccgcccagatccagggcctgaccgacatgctatttctgttgggccaagcgggcgggccccccctgagccggccgctgactga

SEQ ID NO: 73902 - protein, 177 aa, Unknown
  Obtained from environmental sample
  misc_feature (1)..(177): Xaa is any amino acid
MDLGRGPPERRPRRPGQMAGPGRRIRKILVGRPGLGGPAPAGAESLLRGLERGGPESGRLLPQRAPECRTGGRLGPQRAGPGRSKQESRRLPGKRNLLLRPDEPGRPHNPLHGPRTGPAGRPHHGRGHKGXQGSAPPEGASLSGPAGLHLRRPDPGPDRHAISVGPSGRAPPEPAAD

SEQ ID NO: 73903 - DNA, 942 bp, Unknown
  Obtained from environmental sample
  misc_feature (1)..(942): n is a, c, g, or t
gtgaaaaattcatggccgaccaccgggttgactctgcggccaaacaggaggccgggcggtgagccgccagccacagatcaagcccgccttggccggcttcgttcggaggggatgatggctaacgagaagccgcgagtccttcaatttaaaaaaagagcggagccggcaacgccccaagcatccgaagatgctatcgccctggactttgcggcccgtttcgagcacggcttgagatacgaccatgacgccgggcgttggtaccgttggggcggcgaaggtccatacggccttgggacgtattggattaaagatgatagccgcgtggcattcaattgggtccgagagatgtgtcgaaaacacaacccccatgagaaggcgccgcttggccgggccgccacggcaagcggggttgaaagatttgcccaggccgatccgcgcttggccgtaacgtccgaaatatggaacgccgatcctcttttactaggaacgcccggcggcacggtggaactttcgaccggccaacttcggccgcctgaacaagacgattatataaccaaactaacggcggtggccccgtccgtcaatgaggattgcccgctctggttgtcttttcttctggactcgaccggcggagaccttgaagttgttaggttcctacaacagttttcaggatatgcgttgtccggcttgacttccgaacacgtcttgcttttcgtttatggcccgggcggaaatggaaaatccgtttttttgaacatcttgagtttcatcctgggcgattacgccacaacggcatcctttgaaacctttgcggctgttcgtggagagcgacacccctgcgacctggcttcgtttcaaggcgcccggctggtcgtcgctagcgaggttgcagagggacgagtttgggatgaaaatcgccttaagcagcgaccgcgcgactaa

SEQ ID NO: 73904 - protein, 313 aa, Unknown
  Obtained from environmental sample
  misc_feature (1)..(313): Xaa is any amino acid
MKNSWPTTGLTLRPNRRPGGEPPATDQARLGRLRSEGMMANEKPRVLQFKKRAEPATPQASEDAIALDFAARFEHGLRYDHDAGRWYRWGGEGPYGLGTYWIKDDSRVAFNWVREMCRKHNPHEKAPLGRAATASGVERFAQADPRLAVTSEIWNADPLLLGTPGGTVELSTGQLRPPEQDDYITKLTAVAPSVNEDCPLWLSFLLDSTGGDLEVVRFLQQFSGYALSGLTSEHVLLFVYGPGGNGKSVFLNILSFILGDYATTASFETFAAVRGERHPCDLASFQGARLVVASEVAEGRVWDENRLKQRPRD

SEQ ID NO: 73905 - DNA, 861 bp, Unknown
  Obtained from environmental sample
  misc_feature (1)..(861): n is a, c, g, or t
ttggcgaaagccgccaatcaaacaagccccagggatttgtggggtactattccagccaataaaaagggagatggttgcaatgggacatcttttgaagaggctatggatgctttggtttataaaggagcagcgagcttggctgaggttccatattcaaatatgaattgttctggtacctccaacgggaaagcgagtaataaattagcgaattaccgcaaaatagcctataatgagcgtttgcatggcggttcaagaattgagggtatggatgtttcaaatttcaagggttatctttctcagggaaggcccgtagttataggagccaaactcggggacagatttatgggatggaacagcagttcagttatatcctccgatacttacaatgatcctggtatgcaacacgcaaaccatgcaatggtactttcgggctatgatgattccaaaaatgcttttagagttcgcaattcgtggggtcccaactggggagatagaggaagcatttgggtggattatgacttctttttgagaaacttctgttatgctgctttcgtagcacaaaatcccacagtgtcgccgcaagatgacagacagctagcttcgggctatgatttagttgcgagttttggagaggattttcctgacccagaaagtacaaacccaagagcccgtgctttctcttacgaaatattcaacaacggctcttcgcccgtgcttgcaagtcaaaaatggagcgtattatacttatattataatgctcgcaatgcaaatgaatataaaattatttttgaggactattacacaaacgaatatggaagattaggagaatacggcaaatacacacaaacttcggcactgtag

SEQ ID NO: 73906 - protein, 286 aa, Unknown
  Obtained from environmental sample
  DOMAIN (4)...(184): Papain family cysteine protease
  misc_feature (1)..(286): Xaa is any amino acid
MAKAANQTSPRDLWGTIPANKKGDGCNGTSFEEAMDALVYKGAASLAEVPYSNMNCSGTSNGKASNKLANYRKIAYNERLHGGSRIEGMDVSNFKGYLSQGRPVVIGAKLGDRFMGWNSSSVISSDTYNDPGMQHANHAMVLSGYDDSKNAFRVRNSWGPNWGDRGSIWVDYDFFLRNFCYAAFVAQNPTVSPQDDRQLASGYDLVASFGEDFPDPESTNPRARAFSYEIFNNGSSPVLASQKWSVLYLYYNARNANEYKIIFEDYYTNEYGRLGEYGKYTQTSAL

SEQ ID NO: 73907 - DNA, 357 bp, Unknown
  Obtained from environmental sample
  misc_feature (1)..(357): n is a, c, g, or t
ttgatgcctgatgtctcagtagttgttattggagtttcggatagggcctacaaaagcggcgagatttatcgaaccaatccgaatgtagaattagttcgaaatgcccagagaaacgctgctatacgcacaggctgcgcattttgggatttgtatgaggctatgggaggcgaaaattcaattgtggattgggttaaccaaaaaccggctttgggcggaaaagattacacgcatttttcggctaaaggcgcgcaaagagtgggagaaatgttctacaaatcattgatgttagagtacctgaattatatgagacggcaaaaagaacatgcgctcaaacaaaaactgaaaaacattaaatga

SEQ ID NO: 73908 - protein, 118 aa, Unknown
  Obtained from environmental sample
  misc_feature (1)..(118): Xaa is any amino acid
MMPDVSVVVIGVSDRAYKSGEIYRTNPNVELVRNAQRNAAIRTGCAFWDLYEAMGGENSIVDWVNQKPALGGKDYTHFSAKGAQRVGEMFYKSLMLEYLNYMRRQKEHALKQKLKNIK

SEQ ID NO: 73909 - DNA, 513 bp, Unknown
  Obtained from environmental sample
  misc_feature (1)..(513): n is a, c, g, or t
ttgtttttcaggattattcccaaaaacgaccgatatctatacaatctaagcaaaccaaacaagaactctataatattagcttgcacagttgcactattcggtctggcaatcaatattgcttcgggtatgctattggaaaacggagtatggtcaccccagttcacaggaatcgccaatcccattgtttttgcggtatattttccgataactctcatcgctgggttgatttggatatattctggaatatgcacagaagaattcttgtttagaggctacttatggggattcctacggcaatgcaaaatgtcggacttttcaatcctgtgcgtacaggcaatcctgttttgggctgcacattattactattacgatatgcccatagcatggattagagtcctgatttctggtctgctcttcggaattgtggcttggaagaccaagtcccttttcctgtccgcagtcgtccatgcttgctggaatggcgctggcttttttgttaatatcaaacagtag

SEQ ID NO: 73910 - protein, 170 aa, Unknown
  Obtained from environmental sample
  DOMAIN (75)...(167): CAAX amino terminal protease family
  misc_feature (1)..(170): Xaa is any amino acid
MFFRIIPKNDRYLYNLSKPNKNSIILACTVALFGLAINIASGMLLENGVWSPQFTGIANPIVFAVYFPITLIAGLIWIYSGICTEEFLFRGYLWGFLRQCKMSDFSILCVQAILFWAAHYYYYDMPIAWIRVLISGLLFGIVAWKTKSLFLSAVVHACWNGAGFFVNIKQ

SEQ ID NO: 73911 - DNA, 348 bp, Unknown
  Obtained from environmental sample
  misc_feature (1)..(348): n is a, c, g, or t
atggccttcaagatagccgcctcgatgggcttcaaggccgcctgcgaaaaggcctccccgaccctgctggagccgatcatggccgtcgaggtggagacccccgaagactacatgggcgacgtcataggcaacctgaacggtcgcaggggcaggatagagaatatggaggacagggccggcacaagggttgtcacgtccaaggtgcccctcgccgagatgttcgcctactccaccacgctccgcagcatgacgcagggccgcggcacctacaccatgcagttcagccactacgaagaggcgcccaagagcgtctccgaggagattgtcgctaaggtgaaggggaaatag

SEQ ID NO: 73912 - protein, 115 aa, Unknown
  Obtained from environmental sample
  DOMAIN (21)...(108): Elongation factor G C-terminus
  misc_feature (1)..(115): Xaa is any amino acid
MAFKIAASMGFKAACEKASPTLLEPIMAVEVETPEDYMGDVIGNLNGRRGRIENMEDRAGTRVVTSKVPLAEMFAYSTTLRSMTQGRGTYTMQFSHYEEAPKSVSEEIVAKVKGK

SEQ ID NO: 73913 - DNA, 564 bp, Unknown
  Obtained from environmental sample
  misc_feature (1)..(564): n is a, c, g, or t
atgtcgccaaaggatttatgcaccattgaatttttggataagattatagaagcgggcgttagcattctcaaaattgaaggcagggcgcgcgcgcccgaatacgttaaaacaaccgttgagtgctacaaacaagccgcagacaattactttgccggaaccttgacggaagaaaaagcgaagagcttgctagagaggctcgcgaccgttttcaacaggggtttttggaacggctactacctggggcagaggctcggggaatggtctgatgtccatgggacaaaagccctcacctcaaaggtctatttgggaaaggtgatgaactacttttcaaacataaaagtagcagaaatcctatttgaaaccggagaggaactctgcctaggcgaagatatactgataataggctccaccacaggggttgtggagcaaaaagcagaagaactaagagaaggcggaaaaagcgttccgcaagttaaaaagggctgcttattttcaattccggttaaggaacttgttaggcgaggtgataagctgtataagctcagtctgaggctgcgcttatag

SEQ ID NO: 73914 - protein, 187 aa, Unknown
  Obtained from environmental sample
  misc_feature (1)..(187): Xaa is any amino acid
MSPKDLCTIEFLDKIIEAGVSILKIEGRARAPEYVKTTVECYKQAADNYFAGTLTEEKAKSLLERLATVFNRGFWNGYYLGQRLGEWSDVHGTKALTSKVYLGKVMNYFSNIKVAEILFETGEELCLGEDILIIGSTTGVVEQKAEELREGGKSVPQVKKGCLFSIPVKELVRRGDKLYKLSLRLRL

SEQ ID NO: 73915 - DNA, 300 bp, Unknown
  Obtained from environmental sample
  misc_feature (1)..(300): n is a, c, g, or t
gtgatagagggcaccatagatttggagaacgatatccgcatagccggttctgtcgttggaaaaattaacacaagaggcacacttatagttgagcaaacgggtaaaatcaaaggcgaaataaaggcaaatgccgcaaccatagccggtagaatccaaggcaacatagagtgcgatggtctaatgacgctggaaagccgctcctgttttgttggcgacataaaaacacgccagattgtgataaacgaaaacgccgaatttcagggaaactgcgcaatgcctataagcgcagcctcagactga

SEQ ID NO: 73916 - protein, 99 aa, Unknown
  Obtained from environmental sample
  DOMAIN (2)...(96): Protein of unknown function, DUF583
  misc_feature (1)..(99): Xaa is any amino acid
MIEGTIDLENDIRIAGSVVGKINTRGTLIVEQTGKIKGEIKANAATIAGRIQGNIECDGLMTLESRSCFVGDIKTRQIVINENAEFQGNCAMPISAASD

SEQ ID NO: 73917 - DNA, 306 bp, Unknown
  Obtained from environmental sample
  misc_feature (1)..(306): n is a, c, g, or t
gtgnnnnnnnnnnngggtgatggccgagccgcccatccggcgaaagtgaccgactgccgctacgccaagtacgtcgaaatgtatggcaaactgtgttgggagttggacgccttaaagccggacgtgctggacgccctggtcaccaaggctatcgacaagtatgtcgatgtcggtttgatggaagcgtcccgcgtccgtatggaagaagggcgggaccagcttaaaaatgccgagagttttgtccgcgagccggaaaactggattttcaaatacgagccggtaggctacttgttggaggataagtaa

SEQ ID NO: 73918 - protein, 101 aa, Unknown
  Obtained from environmental sample
  misc_feature (1)..(101): Xaa is any amino acid
MXXXXGDGRAAHPAKVTDCRYAKYVEMYGKLCWELDALKPDVLDALVTKAIDKYVDVGLMEASRVRMEEGRDQLKNAESFVREPENWIFKYEPVGYLLEDK

SEQ ID NO: 73919 - DNA, 690 bp, Unknown
  Obtained from environmental sample
  misc_feature (1)..(690): n is a, c, g, or t
atgggaaaactgaatattcttctggctgatgaccaaaacctttttgccgaaagcttaaaaacctttttaaataactatgctgaagacatgaatgtggtcggtatcgcgcggaatggcaaagaagcggtagatatggcctctgatataaaacctgacatcatcctgatggatatccgtatgccggagatggacggggtggaggcggtacggcagattagtcccttgtttccggaaatcaagatcatcatgctttctacctacaaagaagacgccctggttcgatctgccttgcttgcaggcgcttgcgggtatttgctcaaagatatttctccgacagagctcattacagcaatacgtgctataaaaagcggggttatgcaaatatctccggaagtagcccaaaatctggtacaggcccgatacaacgtcgataaaggggaatccccgccaggactgtcatcgaatgctaaaacagttttagagagcgacccttttaaatggcttgggcaattgaccaacagggaacgggaaatattcacccttatcgcgaccggctacgataacgaccaaatcgcggaaaaactttttctggcggaacaaacggtgcggaatcatgtaagcacaatctactcaaaacttggcgtcaaagaccggttcgagattatcagattggcaaatcgtatcacttaa

SEQ ID NO: 73920 - protein, 229 aa, Unknown
  Obtained from environmental sample
  DOMAIN (168)...(225): Bacterial regulatory proteins, luxR family
  misc_feature (1)..(229): Xaa is any amino acid
MGKLNILLADDQNLFAESLKTFLNNYAEDMNVVGIARNGKEAVDMASDIKPDIILMDIRMPEMDGVEAVRQISPLFPEIKIIMLSTYKEDALVRSALLAGACGYLLKDISPTELITAIRAIKSGVMQISPEVAQNLVQARYNVDKGESPPGLSSNAKTVLESDPFKWLGQLTNREREIFTLIATGYDNDQIAEKLFLAEQTVRNHVSTIYSKLGVKDRFEIIRLANRIT

SEQ ID NO: 73921 - DNA, 522 bp, Unknown
  Obtained from environmental sample
  misc_feature (1)..(522): n is a, c, g, or t
atgtggaacagcgaaggctcatacgggcattttacgtcatggcataccgccccgcaccgcgactttgtgggcgaatacgccaatgcctgccgcaaagccggcctgcgcgtggggctgtactattcgcccatggactggcgtttcccaggctattttgatcccatagggcagcacaaaaacgcggaattgatgaaaaaacagtgctatgcccaggttgcggaacttacaggcaattaccgccccattgatattttgtggtatgacggggcatggcttggccacaagggcagcgatgccgaagcagcgtggttttgggaacccattgagctcaacaaaatcgtcaaaaaaaacaaccctaaaacggaaataagcccccgtaccagctttatcagcgatttctgctgcgatgaagggatacatgaagtttccggcaacatcctgcccatcctctgggaaaaatgtatgaatatctggaaaggcccctggggctggtcgcccgatatgtatgtgctcgatatttga

SEQ ID NO: 73922 - protein, 173 aa, Unknown
  Obtained from environmental sample
  misc_feature (1)..(173): Xaa is any amino acid
MWNSEGSYGHFTSWHTAPHRDFVGEYANACRKAGLRVGLYYSPMDWRFPGYFDPIGQHKNAELMKKQCYAQVAELTGNYRPIDILWYDGAWLGHKGSDAEAAWFWEPIELNKIVKKNNPKTEISPRTSFISDFCCDEGIHEVSGNILPILWEKCMNIWKGPWGWSPDMYVLDI

SEQ ID NO: 73923 - DNA, 762 bp, Unknown
  Obtained from environmental sample
  misc_feature (1)..(762): n is a, c, g, or t
ttgcaaaaaccgtgtttatgggtataccatagagatggttggtgttttatggaaaaattagaacgctttgataccgattttttgtattttactcacggtgtaagtgacgagccctattatcggtcccaccatcatcccgaatatgaaattttttgccccattgagggaaattcgataaaccgacgcattgacggctacgaatatagcgtaacccccggtagtttgttgtttatccctcccggtgtttcacacgaccataaggttctttcaaaacggctatatcgccatatctcaatccatatagagcctgatttcatagtcgaattgggggagcatctgttccagcctctctttaacccccggcaagcatgttaccaggatgactcgggcttggctggcatctttgccaaatccctcctggaatgtacggacatggatagaaaagtaagggatatagcaataaaaggacgtataatgtctctactgtcccatttttataacttttacaacagacatacaggtaaaattgcttaccggcaggtttcaagtaacaggcggatatctgttatattggattacatctatgacaatctggataaaccgctttcgttggatatactctcccggatttttgccataagcaaagatcatctgaacaaactgtttcgcatagagactggctgttccattgaacgctatattcgtaatctgcggcttggtattgcccgccagcacatcaacatgggatgcggtgcccgataa

SEQ ID NO: 73924 - protein, 253 aa, Unknown
  Obtained from environmental sample
  DOMAIN (27)...(168): AraC-like ligand binding domain
  misc_feature (1)..(253): Xaa is any amino acid
MQKPCLWVYHRDGWCFMEKLERFDTDFLYFTHGVSDEPYYRSHHHPEYEIFCPIEGNSINRRIDGYEYSVTPGSLLFIPPGVSHDHKVLSKRLYRHISIHIEPDFIVELGEHLFQPLFNPRQACYQDDSGLAGIFAKSLLECTDMDRKVRDIAIKGRIMSLLSHFYNFYNRHTGKIAYRQVSSNRRISVILDYIYDNLDKPLSLDILSRIFAISKDHLNKLFRIETGCSIERYIRNLRLGIARQHINMGCGAR

SEQ ID NO: 73925 - DNA, 327 bp, Unknown
  Obtained from environmental sample
  misc_feature (1)..(327): n is a, c, g, or t
atgaaggaaagacgccacgacccacgaatccctctcgaacatattttttatctctccactgtgagcgccggccggaaagtgccgtccgtgctgctcgacatcaccctggccggcgcgcgcgtgggacttcctcctgacgaacccctgccgactgtcggttctgaagtcatcttgcgagatgcctcagttctcgcgtcgtttcttgaaaaccgcgcggcaaccgtcatgtggagcatgggcgtacaattcggcatacgtttcaccgagccgcttgatgtcaatctggaagacatggcaaaactcctgcagtcggaaattttttattag

SEQ ID NO: 73926 - protein, 108 aa, Unknown
  Obtained from environmental sample
  DOMAIN (3)...(104): PilZ domain
  misc_feature (1)..(108): Xaa is any amino acid
MKERRHDPRIPLEHIFYLSTVSAGRKVPSVLLDITLAGARVGLPPDEPLPTVGSEVILRDASVLASFLENRAATVMWSMGVQFGIRFTEPLDVNLEDMAKLLQSEIFY

SEQ ID NO: 73927 - DNA, 744 bp, Unknown
  Obtained from environmental sample
  misc_feature (1)..(744): n is a, c, g, or t
ttgccgcaaaggagggctggttttatgtccgatggaaatgtggtcgttgtagaaaagcgtcaggcggatggtatagcaatagtcaccatcaacaggccggaagcgcttaatgccttgaataacgcggtcgttaccggcttgaaagacgcttttgacgatctgggaaaagatgaaaacgtccgcgtaattatactaaccggagccgccgggaaggcctttgttgcggggacggatatcgccatgatggaaaacagctcgcaggaagaatgccggtcagggttacgcttttttcacaatgtgtttcttgaaatcgaaaacatagaaaaacctgttatcgccgcaatcaatgggtttgctttgggcggcggctgcgaattgtcgctggtttgtgatatccgtgtagcggcagaacaggccaaattcgctttgcctgaaactagtcttggcattataccgggttccggcggaacacagaggctgactaagctgattggaaaaagcaaggcaaaatatatgatgttcagcgcggcgtttattgacgcgcaaactgctttgtcttatggcctggttgatcgtgttgtgtctcaagataaactattgcagacctgtattgatatggcgctggaatttgtaaaacaaccgccgttgtctctcgctttcgcaaagcgcgccatcaatattgctgaggatacggatatacatacgggccttcctatgagacccganctcgtgccgaattcttga

SEQ ID NO: 73928 - protein, 247 aa, Unknown
  Obtained from environmental sample
  DOMAIN (26)...(195): Enoyl-CoA hydratase/isomerase family
  misc_feature (1)..(247): Xaa is any amino acid
MPQRRAGFMSDGNVVVVEKRQADGIAIVTINRPEALNALNNAVVTGLKDAFDDLGKDENVRVIILTGAAGKAFVAGTDIAMMENSSQEECRSGLRFFHNVFLEIENIEKPVIAAINGFALGGGCELSLVCDIRVAAEQAKFALPETSLGIIPGSGGTQRLTKLIGKSKAKYMMFSAAFIDAQTALSYGLVDRVVSQDKLLQTCIDMALEFVKQPPLSLAFAKRAINIAEDTDIHTGLPMRPXLVPNS

SEQ ID NO: 73929 - DNA, 936 bp, Unknown
  Obtained from environmental sample
  misc_feature (1)..(936): n is a, c, g, or t
gtgggtaactatgtctctttttcccctgacgggaaaaaaatcgcctgtgtttataacgataccttcaatcgagcatcgctaggaaaaattattatctgggattttgaagaaggccgtatctttaccgcatttgaacaccataaagcccagggagaacagaatggaataaactggctggaatacagtccggatggaaaatatttgtttgtcggcgataaaaccaataccggaacattatacgatacaacaaactgggatgagtaccttaccacaaatgtaactcgcaattctattactgatgggtacatatcgtttagccaaaacgccggatttatggcggtgttactggatgatcatatagcgataattgatatagcaagcaaagagcaaaccaaaaccataccgctgtcaacaaataatataggccgctatcatagtataactgtaagtcctgatgataaatatatccttgccaacacattaacacaaccgcctaaattggatgtattttatctggactcaggagagaaatacctcgaaatcacttcaggggctattcatagtggccaggctatatatagtcccgacggaagacaatttatttttggcagtaaattgtatgacgcggtacgttttcgggaattaagaacttttgattttgatactgtatttataaataaaaacaatggggcttttaaccgggacggcgataaaatagagttttatactggaaacacgtatgacaggaccggaaagcgtattgcttttaaccccatacgcgaattttctacgagcgtaagtatcagtccaggcggcaaatacaatgcttacggacaaagaaacgaacatccttatccgcgaactcaaactataaggctatgtcaggatcacttttttgagatggcgatgggtagtatgactcccatgggtatataa

SEQ ID NO: 73930 - protein, 311 aa, Unknown
  Obtained from environmental sample
  misc_feature (1)..(311): Xaa is any amino acid
MGNYVSFSPDGKKIACVYNDTFNRASLGKIIIWDFEEGRIFTAFEHHKAQGEQNGINWLEYSPDGKYLFVGDKTNTGTLYDTTNWDEYLTTNVTRNSITDGYISFSQNAGFMAVLLDDHIAIIDIASKEQTKTIPLSTNNIGRYHSITVSPDDKYILANTLTQPPKLDVFYLDSGEKYLEITSGAIHSGQAIYSPDGRQFIFGSKLYDAVRFRELRTFDFDTVFINKNNGAFNRDGDKIEFYTGNTYDRTGKRIAFNPIREFSTSVSISPGGKYNAYGQRNEHPYPRTQTIRLCQDHFFEMAMGSMTPMGI

SEQ ID NO: 73931 - DNA, 759 bp, Unknown
  Obtained from environmental sample
  misc_feature (1)..(759): n is a, c, g, or t
gtggcgttgacgaagccgatagcggttgcgggaataacggtgcctgtagacggaaatccgcctgtgacaacagagcctacggctccgacaggaaccttgactggggccggatatagtacgataacttggacggagagttcggacggtattacatatagtgcgttggccggatcggatttcgcagatggtaactattacaaggcctcgttcacgctcggcaaaggcacgttggagggattcgctgcaaacgttgcgacagacatattcacggttgcaggggcgacgtcagttacaaacggagcggtggcggccggagcggtgtcggtgacgatcgatgcggtattcgagttgaatgtttctgcgcctccgaattatgtggcgttgacgaagccgatagcggttgcgggaataacggtgcctgtagacggaaatccgcctgtgacaacagagcctacggctccgacaggaaccttgactggggccggatatagtacgataacttggacggagagttcggacggtgttacatatagtgcgttggccggatcggatttcgcagatggtaactattacaaggcctcgttcacgctcggcaaaggcacgttggagggattcgctgcaaacgttgcgacagacatattcacggttgcaggggcgacgtcagttacaaacggagcggtggcggccggagcggtgtcggtgacgatcgatgcggtattcgagttgaatgtttctgcgcctccgattatgtggcgttga

SEQ ID NO: 73932 - protein, 252 aa, Unknown
  Obtained from environmental sample
  misc_feature (1)..(252): Xaa is any amino acid
MALTKPIAVAGITVPVDGNPPVTTEPTAPTGTLTGAGYSTITWTESSDGITYSALAGSDFADGNYYKASFTLGKGTLEGFAANVATDIFTVAGATSVTNGAVAAGAVSVTIDAVFELNVSAPPNYVALTKPIAVAGITVPVDGNPPVTTEPTAPTGTLTGAGYSTITWTESSDGVTYSALAGSDFADGNYYKASFTLGKGTLEGFAANVATDIFTVAGATSVTNGAVAAGAVSVTIDAVFELNVSAPPIMWR

SEQ ID NO: 73933 - DNA, 771 bp, Unknown
  Obtained from environmental sample
  misc_feature (1)..(771): n is a, c, g, or t
gtgttgtggctgcccgttctcggcttgtgcgtcttgccgccggcctgggccggcatgctgctgctcgcggccggttgggacaaggcggcgcatctggcgctcgatctggccgtatggccgtgctcgctgcttttggaaagcctgcgcctgcttgacgcgcacggatggcttgaaacgagctggagcatgcggccccactggacggctgtgctgggcgcgggatcgctcatggcgtcgctcgcgcttctgatcggccattccggcgccggccgggcggcccgccgcctggccgggatcggcgcgttgctggcgctggccgccgtgtgcgtgcgttttgcggacctggcgctgcaagaaacgcggatccgcctgctggatgtgggacaggggcaggccgtgctcctggaatggaccggcgggcgaggactgatcgacggcggaggctttgcttcccggcgtttcgacagcggccgggatgtgctccgacccattctgaccgcaaaccgtccgcccgaactcacttttgcggccgtcagccatatggacagagatcacgccggcggcattttcttcatgcttgaagaattcgctgtgccgctgtttgtgaccgggctgggcgaatacggcgaccatgccaaggatgcggacgatgcgaaacatccggcccaagcgcggcagttgatcgggcaggacaaccccgcctggatcgaatcctggccccggcggcaaacccgggggcggcctccatgtccctcgggcaaaagcccttaa

SEQ ID NO: 73934 - protein, 256 aa, Unknown
  Obtained from environmental sample
  SIGNAL (1)...(23)
  misc_feature (1)..(256): Xaa is any amino acid
MLWLPVLGLCVLPPAWAGMLLLAAGWDKAAHLALDLAVWPCSLLLESLRLLDAHGWLETSWSMRPHWTAVLGAGSLMASLALLIGHSGAGRAARRLAGIGALLALAAVCVRFADLALQETRIRLLDVGQGQAVLLEWTGGRGLIDGGGFASRRFDSGRDVLRPILTANRPPELTFAAVSHMDRDHAGGIFFMLEEFAVPLFVTGLGEYGDHAKDADDAKHPAQARQLIGQDNPAWIESWPRRQTRGRPPCPSGKSP

SEQ ID NO: 73935 - DNA, 861 bp, Unknown
  Obtained from environmental sample
  misc_feature (1)..(861): n is a, c, g, or t
ttggttgatgttgtacttgaaccggcttgcggatatggggctttttttgcggagaaatttccgcagaaaaatgttcgttttataggtgctgatattgatccaatggctttgacgattgcgagaaaaaaattctcaaatattgaatttaagaaaataaatgttctttcgcaaatttcacgctcaaaatttggaataggcgaaaatgaaaaactagcgatagttgggaatccaccctacaacgatgtgacttcgcgtgtgaaaaacgatattaaagccgaaccttgcaaaatagacgaagagataaaaactcgcgatttggggctttcttttatgcttgcttttgcaaaactgaaacccgattatatagcggttttgcatccactttcctatttaatcaaaaaaacaaattttgaaaccttaaaacctttaatgcagaattacaaacttttagagacaaaagtttttaacagccaagaattttccgaaacgtctaaaacaaatggatttcccattgtagccgcagtatatgcaaagagcgagcaaggcacaagctatgagcaaattgtcaaaaggagattcaaaactttagaaaaacaggaattttncatttcagatttcgattatatttgcaaatacatttcaaaatatccctctcggcattcaaaagcagatgattttaaatttttcacaatgcgagatataaatgccctaaaaccgttctcgcacttttatagaagaagatactgcaaatacgatttacataccgcaagaaaaccgccttactatgccaacgtgaaaattttcaaagacattgccaaaaaactttccaaccattttggcaaattggaacgttccttttaa

SEQ ID NO: 73936 - protein, 286 aa, Unknown
  Obtained from environmental sample
  misc_feature (1)..(286): Xaa is any amino acid
MVDVVLEPACGYGAFFAEKFPQKNVRFIGADIDPMALTIARKKFSNIEFKKINVLSQISRSKFGIGENEKLAIVGNPPYNDVTSRVKNDIKAEPCKIDEEIKTRDLGLSFMLAFAKLKPDYIAVLHPLSYLIKKTNFETLKPLMQNYKLLETKVFNSQEFSETSKTNGFPIVAAVYAKSEQGTSYEQIVKRRFKTLEKQEFXISDFDYICKYISKYPSRHSKADDFKFFTMRDINALKPFSHFYRRRYCKYDLHTARKPPYYANVKIFKDIAKKLSNHFGKLERSF

SEQ ID NO: 73937 - DNA, 699 bp, Unknown
  Obtained from environmental sample
  misc_feature (1)..(699): n is a, c, g, or t
atgcccagaccgcttaaaccaggccgagtggggctcatgggcggcactttcaacccggttcatctgggccatctgcgcgcggccgaggagatcgccgaaaaacttgaactcgaccaggtctttttcatgccctcggcccgtccgccccacaaggccccgatgcccatagccgcctaccggcaccgactggaaatgctgaagctggccgtctccgaccggccgggctttctggcttcggacctggagagccatctgtcctatcccagctacaccttgaacacggtccgggccttccgggaaaaactgcccgcccgggcccgcctctttttcctggtcggcttggattccttcatgaccataccctgttggcaccaattccgggggctcttcaacctggccgccttcgtggttttcgcccgggccggcctctccgaaacctttgaggatttgggggaaatgcttcaaaagcacgtggagccggaaatcaaatggagcccccggctggaaaccttcgccgcccccaagctcaagcccattcactttcagcccggcggccggttggagatttcctcttcggatctgcgcaaccggcttttggccggcgcctcggtgcgctacctggtccccgagccggtgcgcatctatattgaaacctacggcctctaccgcgcggaagaggccctggccgaggaccgatga

SEQ ID NO: 73938 - protein, 232 aa, Unknown
  Obtained from environmental sample
  DOMAIN (12)...(197): Cytidylyltransferase
  misc_feature (1)..(232): Xaa is any amino acid
MPRPLKPGRVGLMGGTFNPVHLGHLRAAEEIAEKLELDQVFFMPSARPPHKAPMPIAAYRHRLEMLKLAVSDRPGFLASDLESHLSYPSYTLNTVRAFREKLPARARLFFLVGLDSFMTIPCWHQFRGLFNLAAFVVFARAGLSETFEDLGEMLQKHVEPEIKWSPRLETFAAPKLKPIHFQPGGRLEISSSDLRNRLLAGASVRYLVPEPVRIYIETYGLYRAEEALAEDR

SEQ ID NO: 73939 - DNA, 858 bp, Unknown
  Obtained from environmental sample
  misc_feature (1)..(858): n is a, c, g, or t
atgtttatcgcggcggcgctgcttatccccgtcgtgcattttattttgttttggggcgtcgtaaactttaattccattttacttgcgtttcaaaaattcgattggctggaagggaaggacgtgtttacgtgggagaattttaagagcctgcaaaccgaattcgagtttgggacgctgaaggagggcttgcttaatacattttatacctttttgtttttggtgtttttacttccttggggatttttccttacctatttcctttataaaaaaattccgctgtcggggctttggcgcaccgtgctgttcattcccaccatactgcccgcggtcgctatgacctcgattttcgggaatttattggagccgcagggtcccgtgggtaagctttggcagctgcttttcggctcgcacgcgccgccgtttttctcggacccggagtggggaatgaggacggttttgttttatgtgttttggaccaacttcggcgggcagtttattctgttttcgggcgcgatgtcgcggatacctaaggaggtcttagagtccgcgcgtctcgacggggcgggaatgtggcgggagatgcttcaaattatcctgccgctttgctggtctacgatttctatgcttttacttataaatatatccggcttttttatggcgagcggaccgatattgcttttgacgggcggcagcgggaggactatgactgtttcctactggatattcgacgaggtgaaccgtcttaaaaatctcaatcagcccgcggctttgggtatattatgcacgcttatattatttcccgtggttttatcgtcgcgttggggactttctaaggtctacgcgaacgtggaggtttaa

SEQ ID NO: 73940 - protein, 285 aa, Unknown
  Obtained from environmental sample
  DOMAIN (59)...(285): Binding-protein-dependent transport system inner membrane component
  misc_feature (1)..(285): Xaa is any amino acid
MFIAAALLIPVVHFILFWGVVNFNSILLAFQKFDWLEGKDVFTWENFKSLQTEFEFGTLKEGLLNTFYTFLFLVFLLPWGFFLTYFLYKKIPLSGLWRTVLFIPTILPAVAMTSIFGNLLEPQGPVGKLWQLLFGSHAPPFFSDPEWGMRTVLFYVFWTNFGGQFILFSGAMSRIPKEVLESARLDGAGMWREMLQIILPLCWSTISMLLLINISGFFMASGPILLLTGGSGRTMTVSYWIFDEVNRLKNLNQPAALGILCTLILFPVVLSSRWGLSKVYANVEV

SEQ ID NO: 73941 - DNA, 351 bp, Unknown
  Obtained from environmental sample
  misc_feature (1)..(351): n is a, c, g, or t
atgcagcctaaatcggggaacaagatgaaactagagaccaaagttggagcattcttcgtcgcgtccatctgcgtctttgggtggctgatactcaagacggaaaaaatacagatattcaacaaaaaacccaagagggcatactacgccatattcgcccaagcagcgggccttcccaagcagagcaaagtccgcatggcgggcgtggaagtgggcagggtgatggatatccgcctagacaacaacttggctttggttacgttcactgttgacgacacgataagggtttacgccgatgccaccgccagcctggcgaacatagggatacttggcgaaaagtacatagacccttaa

SEQ ID NO: 73942 - protein, 116 aa, Unknown
  Obtained from environmental sample
  DOMAIN (43)...(116): mce related protein
  misc_feature (1)..(116): Xaa is any amino acid
MQPKSGNKMKLETKVGAFFVASICVFGWLILKTEKIQIFNKKPKRAYYAIFAQAAGLPKQSKVRMAGVEVGRVMDIRLDNNLALVTFTVDDTIRVYADATASLANIGILGEKYIDP

SEQ ID NO: 73943 - DNA, 306 bp, Unknown
  Obtained from environmental sample
  misc_feature (1)..(306): n is a, c, g, or t
atgaacgaggaaaaaatcagaaagataaagaaagccggatgggaggttggcgatatagatttgtttttgtcgccggaggaagttgccgttgtggatgtgaaatttgcattggcaaaggctctttacgaaaagcgcaaaaatgcaaaagccactcaaatagaggcggctcagaaaattggcacaagccagtctaaaatagcgaaagcagaaaaggctcatagttccgtttctatggagtttataattcgttctttggctgggctgggggctactagaaaagaaattggaatggctatagcaagatag

SEQ ID NO: 73944 - protein, 101 aa, Unknown
  Obtained from environmental sample
  DOMAIN (41)...(95): Helix-turn-helix
  misc_feature (1)..(101): Xaa is any amino acid
MNEEKIRKIKKAGWEVGDIDLFLSPEEVAVVDVKFALAKALYEKRKNAKATQIEAAQKIGTSQSKIAKAEKAHSSVSMEFIIRSLAGLGATRKEIGMAIAR

SEQ ID NO: 73945 - DNA, 624 bp, Unknown
  Obtained from environmental sample
  misc_feature (1)..(624): n is a, c, g, or t
atggtaggctatgaacgccagcggctgaaaatggccggaatcagaacccatttgctggtgggtttaggctcgtgtttgattatggagctttccataaatctttacgccggagttcagggtttgactaatgccgacccggcgcggcttgccgcgcaagtggtcagcggcatcggtttcttaggcgcgggaacgatcttaaaagaaggttttactataagagggctgacgacggcggcaagcctttgggtagtcgcggcaattgggctggcggtaggcagcggttattatgtcgccgctttggcgaccgcgacgctttcgatctttgcgctcaacgttttgccgcggattgaacgtttgtacgacgtcggcgcttgtgaagcctgtattatggtaaaatcagaagacaagccgggacaggtcggcaaaatcggttcgtatcttggctcaataaacgtgcgaattgttgatataaaaatagaaagtttgaatgatcaacaaattttgatcattttatttttaaactgccccaataaacgcaacatcggcgaaattattcagaaagtatcggctatggacgcgattctatctgtttacgaggaaaaattgtcgaatctaacccattga

SEQ ID NO: 73946 - protein, 207 aa, Unknown
  Obtained from environmental sample
  DOMAIN (1)...(123): MgtC family
  misc_feature (1)..(207): Xaa is any amino acid
MVGYERQRLKMAGIRTHLLVGLGSCLIMELSINLYAGVQGLTNADPARLAAQVVSGIGFLGAGTILKEGFTIRGLTTAASLWVVAAIGLAVGSGYYVAALATATLSIFALNVLPRIERLYDVGACEACIMVKSEDKPGQVGKIGSYLGSINVRIVDIKIESLNDQQILIILFLNCPNKRNIGEIIQKVSAMDAILSVYEEKLSNLTH

SEQ ID NO: 73947 - DNA, 858 bp, Unknown
  Obtained from environmental sample
  misc_feature (1)..(858): n is a, c, g, or t
atgggtcatagcagaagacaacttgcgagaattctgcaaaacggagcttcaaaaataaaggattcgtctgtcaacgcttatgatttagaaaaatattttaaatcggcagtagagcaggaaattaggaaaggcgtatttacggctggggcaaaagagcatgtgtttggttttttccgggaaattgaaacaaaaaacattaaatatgatgaaaacatcgctaattatttcgactttaaggacgagaaaattgatcaagaaaaacatgatttgctcatagcgttaaaaagcagcctaaccgacgccctcgggggaaatatctgcaaatattctgcgtcaaagaaaacaacgggattgctttccgtattgtttaggcaaaataatcagagcggcggaaaaataacttatcggcaccttgacaggttttgcttagatacatataacgctttatcaactattataaagcgccaaataaaagagtttggagaaattaaccgtttagaacgggaaatccaagagcacaatgatttcgcggtaaatgaaacgaaggtctttatcggcagagaagatataataaaagaaattgaatcttatattgagtcagacgacaacaaaccatttgccgtagccggtgatccgggaacaggaaaaacagcgttaatatcgcaagtatataaggcgttaagagaaaaccgccccaattgcaaaattatatcaagatttattggagcaacgcctgattccgccgatatagccctgttgcttcgcggcgttcttgcagaaatagcgcaagaatacggtaataccatatttattcctgaaaagtatcaggaaattttagacaggtggcggaaatattaa

SEQ ID NO: 73948 - protein, 285 aa, Unknown
  Obtained from environmental sample
  misc_feature (1)..(285): Xaa is any amino acid
MGHSRRQLARILQNGASKIKDSSVNAYDLEKYFKSAVEQEIRKGVFTAGAKEHVFGFFREIETKNIKYDENIANYFDFKDEKIDQEKHDLLIALKSSLTDALGGNICKYSASKKTTGLLSVLFRQNNQSGGKITYRHLDRFCLDTYNALSTIIKRQIKEFGEINRLEREIQEHNDFAVNETKVFIGREDIIKEIESYIESDDNKPFAVAGDPGTGKTALISQVYKALRENRPNCKIISRFIGATPDSADIALLLRGVLAEIAQEYGNTIFIPEKYQEILDRWRKY

SEQ ID NO: 73949 - DNA, 690 bp, Unknown
  Obtained from environmental sample
  misc_feature (1)..(690): n is a, c, g, or t
atgaaaacaccaccagaaatagccattgagatttttcgggcaatacctgatcctcgcgtagagaggacgaaggtacatagtcttgaacttattatgtttatagcgttatgcacctacctttccgggggtgagggcttctacgacatgcaagcctatgcacaggcaagggaagggtggctacgcgccactgtgggcatgcagagtgttccgagtcatgatactttcaatcgggtatttcaggcgatctcaccggaatgttttggagaatgtttgattgaactgtccaggcgactgcgggaaaaaatatccggtgatattgttgctcttgatggaaaaactcaccgccggaccggcaaaggcaacgatgcggcgctccacatgctgaatgcatggtctgtggaaaatcgtttggtgcttggtcaactggctgtggaagaaaaaagcaatgaaatcactgctgttccacagttgatggatttgctggatctgcagggctgcgttgtgacagcagatgctttaaattgccagaaagctgtggcgcaaaaggccgtagaaaagaaagccgactatgttttggcggtaaaaggcaaccatcctgctatgcacgatgaaatcaaacgttatatggacgcgtttgcgaggcgtaccccggccggtttgaagcaatggagaaagaccacggacgcatag

SEQ ID NO: 73950 - protein, 229 aa, Unknown
  Obtained from environmental sample
  misc_feature (1)..(229): Xaa is any amino acid
MKTPPEIAIEIFRAIPDPRVERTKVHSLELIMFIALCTYLSGGEGFYDMQAYAQAREGWLRATVGMQSVPSHDTFNRVFQAISPECFGECLIELSRRLREKISGDIVALDGKTHRRTGKGNDAALHMLNAWSVENRLVLGQLAVEEKSNEITAVPQLMDLLDLQGCVVTADALNCQKAVAQKAVEKKADYVLAVKGNHPAMHDEIKRYMDAFARRTPAGLKQWRKTTDA

SEQ ID NO: 73951 - DNA, 378 bp, Unknown
  Obtained from environmental sample
  misc_feature (1)..(378): n is a, c, g, or t
atggcgcagttttatccagaaatatatcgctgtattggctgcaacgcctgcactaaaggctgcccgcaagggcttgaggtcatgcagtatatcgcttacgcgcaaagaggcgagtgggaaaaatgcgcgcacgcctcttttgactgtgtcgcttgcggcatttgcgctgcgcgctgtccggcgcaaatcacccacgcccaagtagggttgctagcccgccgtttgactggcaaatatattttgccggaaagtaaacatttgacgcgccgggcagccgaaattgaaaatggcgattatgaagccgcgctgaaagaattgatggtaaaaccgctggatgaattaaaagacctttataatcaacgggatattgaagcataa

SEQ ID NO: 73952 - protein, 125 aa, Unknown
  Obtained from environmental sample
  misc_feature (1)..(125): Xaa is any amino acid
MAQFYPEIYRCIGCNACTKGCPQGLEVMQYIAYAQRGEWEKCAHASFDCVACGICAARCPAQITHAQVGLLARRLTGKYILPESKHLTRRAAEIENGDYEAALKELMVKPLDELKDLYNQRDIEA

SEQ ID NO: 73953 - DNA, 522 bp, Unknown
  Obtained from environmental sample
  misc_feature (1)..(522): n is a, c, g, or t
ttgaagcataaaggaggtttttggaatttgtttactaatgatatgttggaatccctgaaaagagtggaagcatccaggcaaagtcgtctggacgcggtaatcggcagaatgaacgccgcaacaaaagatgttcttttaaaagagcatcatcctgattacaggcaaagcggttttgcgctgctgcaagcaggcgtcaacaaaggcgataaagttccggcggaattggcggagcttttgcagggaaagagttatctccaaagcagcgagcttgatttaaataaaattgactatgacgttgacgttctgattatcggcggcggtggagctggatcagcggcagccctggaagcgttggcggcaggcgccaagactttgattgtcacgaagctgcgcctgggcgactccaatacgacgatggcggaaggcggcattcaggcggctgatcaagaaaatgactcgccgctgctccattatgtagatgctttaggcggcgggcattaccccaccagccggaattgttaa

SEQ ID NO: 73954 - protein, 173 aa, Unknown
  Obtained from environmental sample
  misc_feature (1)..(173): Xaa is any amino acid
MKHKGGFWNLFTNDMLESLKRVEASRQSRLDAVIGRMNAATKDVLLKEHHPDYRQSGFALLQAGVNKGDKVPAELAELLQGKSYLQSSELDLNKIDYDVDVLIIGGGGAGSAAALEALAAGAKTLIVTKLRLGDSNTTMAEGGIQAADQENDSPLLHYVDALGGGHYPTSRNC

SEQ ID NO: 73955 - DNA, 618 bp, Unknown
  Obtained from environmental sample
  misc_feature (1)..(618): n is a, c, g, or t
atgcctttcccgagggggaaccttggctgtttttggccgatgagtggttcacgcgcggccgaaataagggttccgtggcgaaatttttatttggcgacttggaaccagatagaaaatggagtggggctcatcaggcgcttcttggaacacagcaggcgcttcatcaaatcggacagggccaaaggatttaagggcaagcggcttctgcttttgacaggcgagagcttcgcgccctatctgcaagaagagaccgagaagctaaacgcccaagccggatgccgcatcagggtcgcagcggtacccaatggcgcatttggccgctcggttacggttgccggccttttgtgcggaagagacctcttagacaccgctagaaagcagatggccagccaaaacggggcggaagcaactatggatgctgtcatagtgcctggctcatccctgcgccccaccgctgtaccacgcaacggcccaaaaagcacttttgacgcggacgatggcatattccttgacgacatgacgctggccgagatgcagtccgagctaaaaaccccagtggtcggcggcggggacaacctttcgcagatgctggcgaacatcaaaaaggccgccaattag

SEQ ID NO: 73956 - protein, 205 aa, Unknown
  Obtained from environmental sample
  misc_feature (1)..(205): Xaa is any amino acid
MPFPRGNLGCFWPMSGSRAAEIRVPWRNFYLATWNQIENGVGLIRRFLEHSRRFIKSDRAKGFKGKRLLLLTGESFAPYLQEETEKLNAQAGCRIRVAAVPNGAFGRSVTVAGLLCGRDLLDTARKQMASQNGAEATMDAVIVPGSSLRPTAVPRNGPKSTFDADDGIFLDDMTLAEMQSELKTPVVGGGDNLSQMLANIKKAAN

SEQ ID NO: 73957 - DNA, 948 bp, Unknown
  Obtained from environmental sample
  misc_feature (1)..(948): n is a, c, g, or t
ttgatagggattatcactttcattgtgctgctgtccatgggttcgagcagcgctctggtattatggctggtctgggatgatctgcaaaaaacagcggaagcaaatataacagaggcaaacgaacgttcagcggcagagacggaatataccctggaaaaaacacgttcagaatccatgatattcatgcaggcgttgagcagcttaagaactgagagcagagcggcgaaagaaatggagaatttattttttgaacagaatccccacattgccgcgtttttctttgctgttcccggaaaagcagacgagttgctagtcaatgaacgattttttcgttcgcggagtcttgaatccgcgcgggcggatgcttaccgaaaaaataacagggcggcgctcagacgggctatttcgggggaaacggttttgttaaatgccgcgccatggttttcaacatcaacatctcttttggctttcttttttccctggagcggcggggcgggagcggttttattttctccatcaaacctggaagcttcatttagtcatgggatcaaccagtcttacctcataaacgatacaggcgatattttgattcatcccgattacgacttgctgcggaacgagacgaatgtagcaagccggaagtttatccaatttatttggaataatccggcgcagaatatgcagatcccatatgatgaagacggagtgtcttttatcggcgcattctacaaactgaatctgaacatgggtagttgtacggtgattaccagcatcgaaaaagacaaggtttttgaggaaataaaagctacgataaaacgcaacatcttttttactcttgggngttttaagtatctcaatactgattatttggttttttgcaaaaagcatctctgttcccatcaaagcgctggcagctttcgcgcacatcatcgaaggcggcgactttga

SEQ ID NO: 73958 - protein, 315 aa, Unknown
  Obtained from environmental sample
  SIGNAL (1)...(20)
  misc_feature (1)..(315): Xaa is any amino acid
MIGIITFIVLLSMGSSSALVLWLVWDDLQKTAEANITEANERSAAETEYTLEKTRSESMIFMQALSSLRTESRAAKEMENLFFEQNPHIAAFFFAVPGKADELLVNERFFRSRSLESARADAYRKNNRAALRRAISGETVLLNAAPWFSTSTSLLAFFFPWSGGAGAVLFSPSNLEASFSHGINQSYLINDTGDILIHPDYDLLRNETNVASRKFIQFIWNNPAQNMQIPYDEDGVSFIGAFYKLNLNMGSCTVITSIEKDKVFEEIKATIKRNIFFTLGXFKYLNTDYLVFCKKHLCSHQSAGSFRAHHRRRRL

SEQ ID NO: 73959 - DNA, 726 bp, Unknown
  Obtained from environmental sample
  misc_feature (1)..(726): n is a, c, g, or t
gtggtaaatattatggaccgtcaggtacacgcgaggccgggaacagtattgaacgcgtctaccggagaagacggcatggcggtacgggtgagcgaaggggcggcgctgtttactgatactgccaagaaacaaacacgggaacttattgcaacagcgataattaatctggactcagatggtatggaacgcgaggaaccgtcggttatagtaacgctcccttcgcccaatgcgcgttattataaaaaagggacgggacccctgaatatcaattttgcctgggatagaaaaaatttacggtccggtcaggtcctgaatctggaaattgctgaagaccggaatttcagccgtattgttcgcaccgtcaaaaatctggattcaacggcgagagcatcccttaacacggggcagtggtactggcggctgtccggtgaaaacgccgttcttggcatgggacagtttaccgtggtgaatgccgcagggcctgtacttttaaaccccgcagcgcgtaagttgtttcgtttccagacagatcccccgcttgtgcatttccagtggtcaaaagtagaggatgtttcggcttacattctggaagtcagcgaaacatccgacttcaaatctccccgcatacgcaggcaggtcggcgttgagtacattatcgagtcaaatctgggggaaggaacatggtattggcgggtgataccaatttttccttcggttacgacgtaa

SEQ ID NO: 73960 - protein, 241 aa, Unknown
  Obtained from environmental sample
  misc_feature (1)..(241): Xaa is any amino acid
MVNIMDRQVHARPGTVLNASTGEDGMAVRVSEGAALFTDTAKKQTRELIATAIINLDSDGMEREEPSVIVTLPSPNARYYKKGTGPLNINFAWDRKNLRSGQVLNLEIAEDRNFSRIVRTVKNLDSTARASLNTGQWYWRLSGENAVLGMGQFTVVNAAGPVLLNPAARKLFRFQTDPPLVHFQWSKVEDVSAYILEVSETSDFKSPRIRRQVGVEYIIESNLGEGTWYWRVIPIFPSVTT

SEQ ID NO: 73961 - DNA, 741 bp, Unknown
  Obtained from environmental sample
  misc_feature (1)..(741): n is a, c, g, or t
atgaacacgataataaatgccattatagaaagttatctaaacaatccaaagaagacagattacgctataatgataaatggtaaatggggttgcggaaaaaccttttatattgagcatgatgtcaagaaattatgtgtagataataatttaaaatatatttatatctcattaaatggctgtgataatttcaaaataattagtagtaaaataacttatagattgttattaaaaacatatacaaaagatatggacactgatcttatggataatattttatcaatcggttcagagttagcaaaaacgcatacagcaattgatattgcatttgaagttttggataaatttaagggcgtaataggtaaacctataataaaaaaaatatcagatataaatcctgaaaaaacggttattatatttgacgatttagagaggatttctgacgaaaatattcgtaataatatcataggattgatttatgaaaattacacaaaaaagggatacaaaacaattattgtaggtgatgaaacaaacattaaagaaggaaaataccacacgatcaaagaaaaggccatacgaaggactatatcttatgaaccagacagaaaaatgcaattaaatagttttatatgcaatgagcaatataatcataaaataaaagcatatcttgacaaaaataaggaattatttatacaatatttcattgatttacaaataacaaatcttagaactgtttcgttgtga

SEQ ID NO: 73962 - protein, 246 aa, Unknown
  Obtained from environmental sample
  misc_feature (1)..(246): Xaa is any amino acid
MNTIINAIIESYLNNPKKTDYAIMINGKWGCGKTFYIEHDVKKLCVDNNLKYIYISLNGCDNFKIISSKITYRLLLKTYTKDMDTDLMDNILSIGSELAKTHTAIDIAFEVLDKFKGVIGKPIIKKISDINPEKTVIIFDDLERISDENIRNNIIGLIYENYTKKGYKTIIVGDETNIKEGKYHTIKEKAIRRTISYEPDRKMQLNSFICNEQYNHKIKAYLDKNKELFIQYFIDLQITNLRTVSL

SEQ ID NO: 73963 - DNA, 639 bp, Unknown
  Obtained from environmental sample
  misc_feature (1)..(639): n is a, c, g, or t
atgttgtattttattcggtataagctgattaggatttgttttggtaacaacaataacgaaaggggttttattttgggcacaacacacaaaagacgtaatcgtggatctcaaacaacaaacattaataaagaattacgcaaactcacagaagcgtataatcgaagttttgatgatggtgattataaaaatgcattagaatatcaaaaacgcatattgaagattcaaaaaactaatttacctccgaatagccacgatatagcagtggcacattattttatcggtgtatcgtacggtaaactagagcagtacaaagaagcattaaaacaactcacgctggcacgtaaaatagaagaagatatattgcagccggatgaccctagtaaagccatgacctatgatgcgataggtacagtttatgaaggattgggacaatataataatgcgctaaaattttataagctcgcggaaaaaattttgtcaccggatgacattgatataacaacggtatatgataatatgggcttggtttatgaaaaactagggcaatatgaagaagcattggcgtatcataagctagcattaaaaatggagaaaaaaatattccatctcgtgccgctcggccgatctgatcattgttaa

SEQ ID NO: 73964 - protein, 212 aa, Unknown
  Obtained from environmental sample
  DOMAIN (87)...(120): Tetratricopeptide repeat
  misc_feature (1)..(212): Xaa is any amino acid
MLYFIRYKLIRICFGNNNNERGFILGTTHKRRNRGSQTTNINKELRKLTEAYNRSFDDGDYKNALEYQKRILKIQKTNLPPNSHDIAVAHYFIGVSYGKLEQYKEALKQLTLARKIEEDILQPDDPSKAMTYDAIGTVYEGLGQYNNALKFYKLAEKILSPDDIDITTVYDNMGLVYEKLGQYEEALAYHKLALKMEKKIFHLVPLGRSDHC

SEQ ID NO: 73965 - DNA, 897 bp, Unknown
  Obtained from environmental sample
  misc_feature (1)..(897): n is a, c, g, or t
atgtccgggaacccgatttcaaatcttttactccaggctgaggattcgggggtcactctcgcctcgttgattgacgttgaaaacaggcggcagcttatcagcctcattcgcaaaaacgacacccgctggcaggatatttatatgcgcatcctgcgtctgccgccggcggcttatgacgcgcgcgtcatggacgatctcctggcgagtgatcacagcgaagaggtgtatgcctacttcagctccgtgattacgtactatcgtgaaaatatcgaccgcgtcgtctggctggcgaagctttactttgaacgcgaaaaacgcgaagacgcgctctcgctgaatctgcccgatctgatcggcgcgatgctggacatcatggccatcgtgaaccgcgatatcaacaacaaatccaacgtgggcgtcaaccgcaggcgatttaacacactctacgatattcttattaaggaaaatgggctggagcgctttatcgaagaggaatcgcgggagaccgtcgcgaaaatcgtgggcgtattgccggtcatcgctgatgttatcgacgaaactgaatttttgcggctcacaagccggctgcgtgaggtgcatcccgggctggaacttggcggacgcaaacaaaccgagagcgcgcgcgagattcaccccttccttgtcacgcaaaccggctataatcagaaacaggccgagtataaaaatattgtcgaggttgagatcccggcgaactccaaggatatttcccttgccgttgaaaagggcgacctctccgaaaacgccgagtacaaggccgcgcttgagcatcaggaacagctcaaggcccgcgtatcaaacctcgatgaagagctcaaaaaggcgcggatcgtcgccgcccatgacgtttcacgatga

SEQ ID NO: 73966 - protein, 298 aa, Unknown
  Obtained from environmental sample
  DOMAIN (216)...(290): Prokaryotic transcription elongation factor, GreA/GreB, N-terminal domain
  misc_feature (1)..(298): Xaa is any amino acid
MSGNPISNLLLQAEDSGVTLASLIDVENRRQLISLIRKNDTRWQDIYMRILRLPPAAYDARVMDDLLASDHSEEVYAYFSSVITYYRENIDRVVWLAKLYFEREKREDALSLNLPDLIGAMLDIMAIVNRDINNKSNVGVNRRRFNTLYDILIKENGLERFIEEESRETVAKIVGVLPVIADVIDETEFLRLTSRLREVHPGLELGGRKQTESAREIHPFLVTQTGYNQKQAEYKNIVEVEIPANSKDISLAVEKGDLSENAEYKAALEHQEQLKARVSNLDEELKKARIVAAHDVSR

SEQ ID NO: 73967 - DNA, 477 bp, Unknown
  Obtained from environmental sample
  misc_feature (1)..(477): n is a, c, g, or t
atggagcggatgcgaattcggggaggtgcggtgatggtagcttacaccgaacgcacaggccagacaatcgccgctatccgcgattacgacaccaagaagctgattatcgccaatacgcccgtggtgattaaggacaagtacgacagcctcggcagtcccgcgtcaccgaagctggacgggatgccgcgcgtacacaacccgcaagccggagaggagcatatcgtgaacacgctggacatgatagccgacatgaacaagcgttacgaaaacgccgtggtgttcgtagcgtggttcgaacccatgtggcttgccctgacggacgcggagcgccacatcctcgaaacctacaagcactccgatatccgctccggcttaatcggcgaaaccgccgaagacctgaactactcgccgcgccacttgcgccggacgcgccagcgggctttaacgaaactggagaagctgttgtacggcgattaa

SEQ ID NO: 73968 - protein, 158 aa, Unknown
  Obtained from environmental sample
  misc_feature (1)..(158): Xaa is any amino acid
MERMRIRGGAVMVAYTERTGQTIAAIRDYDTKKLIIANTPVVIKDKYDSLGSPASPKLDGMPRVHNPQAGEEHIVNTLDMIADMNKRYENAVVFVAWFEPMWLALTDAERHILETYKHSDIRSGLIGETAEDLNYSPRHLRRTRQRALTKLEKLLYGD

SEQ ID NO: 73969 - DNA, 699 bp, Unknown
  Obtained from environmental sample
  misc_feature (1)..(699): n is a, c, g, or t
ttgtgtacatctacaaccatacccacactaaaccgagttttagcttatctcaccacaaaaacatctttaaataatagtaaactatctattacagaaattttaccattattcgaaacgatcaaactccaaattcaggtcaacgaagaaattcttttaaatgtgttagacaagttgaacaaagatgctgaagaaaaaataacagaaactaacattaaagatcttgtacgatttcctatttttttcaaatattcaattgccacaaaaaacgatttaacagatcacttgaataaaacgattgtagaggcgttgtctgatattccatgtagtgtactctatcaacaacgatataatgttaacgactactggatggcaattattacgcatctaatagacagtgattatttaaagaagttaccagataatttgatagaacttgggaaaaagatacttaatgatattgctactagtacacagaatattcctgactctacaaatctattgcaaagaatatttgacaaattagacaaaaagaatatatcagcacatatcaaaaacataagagatgagttttgtaatggcaatactctattaatgcggcgctatttaaatatttccaaccctggtttgagcaacagggaaacttatttgacagaaaccctgaacccgtttccaaaaatcctaaaccccataaaaatttga

SEQ ID NO: 73970 - protein, 232 aa, Unknown
  Obtained from environmental sample
  misc_feature (1)..(232): Xaa is any amino acid
MCTSTTIPTLNRVLAYLTTKTSLNNSKLSITEILPLFETIKLQIQVNEEILLNVLDKLNKDAEEKITETNIKDLVRFPIFFKYSIATKNDLTDHLNKTIVEALSDIPCSVLYQQRYNVNDYWMAIITHLIDSDYLKKLPDNLIELGKKILNDIATSTQNIPDSTNLLQRIFDKLDKKNISAHIKNIRDEFCNGNTLLMRRYLNISNPGLSNRETYLTETLNPFPKILNPIKI

SEQ ID NO: 73971 - DNA, 333 bp, Unknown
  Obtained from environmental sample
  misc_feature (1)..(333): n is a, c, g, or t
ttgggaaatacgccacggacacgccgggcgccaccgaagcgtccggcgccgcggccgagagggccctcaggtccgaagccagcgtctgcgcgtcgctctccgtgggcgcgtcaatccacagcgtccgccgcccgcccaggcacgaccagtggcccagaagcagcgccaggcccgccggcgcggtccagcggagcgaggagaactgctggtgcggcagcgcaggcgctcccagcgcgcgcagcatgtcccgcagttcggttgtgtcctgctgttccatcaggctccgtctcgccgcgcccgggcgcgatgcacatattgtcccatcattggtga

SEQ ID NO: 73972 - protein, 110 aa, Unknown
  Obtained from environmental sample
  misc_feature (1)..(110): Xaa is any amino acid
MGNTPRTRRAPPKRPAPRPRGPSGPKPASARRSPWARQSTASAARPGTTSGPEAAPGPPARSSGARRTAGAAAQALPARAACPAVRLCPAVPSGSVSPRPGAMHILSHHW

SEQ ID NO: 73973 - DNA, 333 bp, Unknown
  Obtained from environmental sample
  misc_feature (1)..(333): n is a, c, g, or t
atgcgcgggagcggcggtggcggcggtggaggcggtgttgttggagcaactgcagcaggtggcggcagaggtggtggtggcggtgttggagcaactgcagcaggagtaggcggcggaggtggtgttggcggtgttggagcaactggagcaggtgcaggtgcaaccacaggtgcattattggggacagttttttcaacttcttgtgaaaacaccacagagatggcgaataaaagaaataaacttataattttgctaataaaaaacatattgagactgaatataataaaaatttttcctttatatcaaatttttgggtttttaacgattttttag

SEQ ID NO: 73974 - protein, 110 aa, Unknown
  Obtained from environmental sample
  misc_feature (1)..(110): Xaa is any amino acid
MRGSGGGGGGGGVVGATAAGGGRGGGGGVGATAAGVGGGGGVGGVGATGAGAGATTGALLGTVFSTSCENTTEMANKRNKLIILLIKNILRLNIIKIFPLYQIFGFLTIF

SEQ ID NO: 73975 - DNA, 609 bp, Unknown
  Obtained from environmental sample
  misc_feature (1)..(609): n is a, c, g, or t
atggtagtttcggcgctcattaagtttttctactttccaaacgtgctatccataacaatcaacaaacataatgctgggcaaaggctagaccgctttttgcgcaaggcttttccagttgcgccacttggtttgctgttttctgttatacgcaaaaaaaaggtgagggtgaatggggtagtgggaaaatctgctcaaatgctgtgcgaaaatgatgctgtgcaaatttatgaaaatttgccgcaagttcaaaaaaaagttacttttgagcaaacaaaaacttatgcaaaagaaaagctgtgttttgtttttcaaaattcggattttgcaattctcaacaaaccttgcggccttgccagtcaatctggcagcggtgttaaagaagaggaatgtttggttggaatgcttgaaatttgggcacaggaacagggcattgattttaagccagccttggtacatcgcttggataaagaaacatcgggctttgtaatagcggctctttctgggcaggctgcgcgtgagtttggaaatattattagagagagaaaaataaagaagggattatttggctttagtgaaagggcatctgccgcaaaaaaagggaaaaaatag

SEQ ID NO: 73976 - protein, 202 aa, Unknown
  Obtained from environmental sample
  DOMAIN (27)...(73): S4 domain
  misc_feature (1)..(202): Xaa is any amino acid
MVVSALIKFFYFPNVLSITINKHNAGQRLDRFLRKAFPVAPLGLLFSVIRKKKVRVNGVVGKSAQMLCENDAVQIYENLPQVQKKVTFEQTKTYAKEKLCFVFQNSDFAILNKPCGLASQSGSGVKEEECLVGMLEIWAQEQGIDFKPALVHRLDKETSGFVIAALSGQAAREFGNIIRERKIKKGLFGFSERASAAKKGKK

SEQ ID NO: 73977 - DNA, 369 bp, Unknown
  Obtained from environmental sample
  misc_feature (1)..(369): n is a, c, g, or t
atgatccaaggtggcgatttcacaaataaaaacggcaccggaggtcacgctgccgccggcgaaggcgagaatataggcgatgtttacgaccctcgcttgaggcacattagaggtgctctttcttgggcaaaaaccagtgcgccaaattccataggcagccagttttttattgttcacgcagaagacggcgcacattttttagaccaccctccagacgggcattcacacgaaggctacacagtttttgggcagctttacgagggttttggcaccctagattccattgcagagtcaaaaactgatagcagagacaagccaaaagaggaaattatcattgaaaacgtggaaattactactttatccctatga

SEQ ID NO: 73978 - protein, 122 aa, Unknown
  Obtained from environmental sample
  DOMAIN (1)...(118): Cyclophilin type peptidyl-prolyl cis-trans isomerase/CLD
  misc_feature (1)..(122): Xaa is any amino acid
MIQGGDFTNKNGTGGHAAAGEGENIGDVYDPRLRHIRGALSWAKTSAPNSIGSQFFIVHAEDGAHFLDHPPDGHSHEGYTVFGQLYEGFGTLDSIAESKTDSRDKPKEEIIIENVEITTLSL

SEQ ID NO: 73979 - DNA, 894 bp, Unknown
  Obtained from environmental sample
  misc_feature (1)..(894): n is a, c, g, or t
atggaaaacactgttaaccaggaattgaatgacaatgtaagagaagccattaaacagggccttccgccgtttaatacaaaaaaacaggaagcggcaatcggccctgttaatattaatggcaacggcgttcccgcaaacggcgttgattttataaattcctattacaataacattaacgctaaagttgaagccgaaaaaagcaatactaccgtcactcaaaacggatacataccgtatcagacccataatgaaaccccgaaaaacatcgacaaattccttgttgaggaatacggcaacataatgaacgcttcattgacaggcacaccctattccggttccgtcactcccgcccaacttaaaaccctgtcctccggcattgaaaagaaaatggcaagtgacccggcttatatgtccgggattgtgaaccaggcgcagcagaatgtggttggctttaattatatgccttatgataaagaggattttataactaaagcccgggatccctcaagcagggaatacaagctgttgaatgagacaattgcaattcatgtgaaggacattataaaaaacaataaagcgtcgttcaacggggaatttcaggaattaagcaaagaattgacggataaagtgaaaaaaacggaaactgaaagaaaaccttcaagccaggcaactgccgccaaaaccactgcaagtaanaccactaccgcanaaacaacttccggtaaaacgaccactagtaaaacaactgccgccaaaaccactngcagtaaaaccgctgctgccaaaacaacttccagtaaaactacctgcagtaaaacactgccgccaaaanncactggcgaagaacactacagcaaagaaagacggactgccttttcatcgcgctgctgctga

SEQ ID NO: 73980 - protein, 297 aa, Unknown
  Obtained from environmental sample
  misc_feature (1)..(297): Xaa is any amino acid
MENTVNQELNDNVREAIKQGLPPFNTKKQEAAIGPVNINGNGVPANGVDFINSYYNNINAKVEAEKSNTTVTQNGYIPYQTHNETPKNIDKFLVEEYGNIMNASLTGTPYSGSVTPAQLKTLSSGIEKKMASDPAYMSGIVNQAQQNVVGFNYMPYDKEDFITKARDPSSREYKLLNETIAIHVKDIIKNNKASFNGEFQELSKELTDKVKKTETERKPSSQATAAKTTASXTTTAXTTSGKTTTSKTTAAKTTXSKTAAAKTTSSKTTCSKTLPPKXTGEEHYSKERRTAFSSRCC

SEQ ID NO: 73981 - DNA, 495 bp, Unknown
  Obtained from environmental sample
  misc_feature (1)..(495): n is a, c, g, or t
gtggcgcattcctggggtagtgataacgaaataaacaactgcgccgcgcttaatcctggtattaactgtgctggcggtacatattatggacgaatacacggatatagtgaaggaaccataacattttcgggcaacatagcatttgaaggcatgttgaatccagccggcaacactacatggagtgataaaggcggcgcggcaaagaatggtgaagatatttcaaagtctgctatcaatgctgtcggcactatcggcgtttcgtacatctgttcgctcaacgctgccggcactccgccattaacgtgggcagtcagttcgggcgagcttccttcgggcttaacgctaaatgcaacgtcgggcttaatatcgggcacaccggcagcgacaggcgtatcgccgttcacggtaacagttacgggcaatggaacagcaagccgcgagttttcgataaccatcaacgagcctgtagtaaaaccgacatactcggccatctga

SEQ ID NO: 73982 - protein, 164 aa, Unknown
  Obtained from environmental sample
  DOMAIN (101)...(143): Putative Ig domain
  misc_feature (1)..(164): Xaa is any amino acid
MAHSWGSDNEINNCAALNPGINCAGGTYYGRIHGYSEGTITFSGNIAFEGMLNPAGNTTWSDKGGAAKNGEDISKSAINAVGTIGVSYICSLNAAGTPPLTWAVSSGELPSGLTLNATSGLISGTPAATGVSPFTVTVTGNGTASREFSITINEPVVKPTYSAI

SEQ ID NO: 73983 - DNA, 681 bp, Unknown
  Obtained from environmental sample
  misc_feature (1)..(681): n is a, c, g, or t
atgcaggccgtgccgctcgacgatgtccgggcggtgaagatctatctcggactgccgcttttcggccaggcgtgcgccatcgggaggcacgcccgagctggcccagcgtcagcagcgggacgtcggcatggagatctttcagcccattgttgtggagcagcacaggaactgcntggtgtggtccgtgagctccaaagagaaggctgcatgaaggctggcgacaagatcgggctactcggattctccgccggaggcgcatccgcactgctggcgctggcggagcatcatgtgatgatcggcgcggccattctgctgaatccgtccactggcctgacggcatcggttcaggcgtacgaacatgcaacaggcaagccatattcatggacacctcagagccgggcgctcgccgcccgcaccgacgcagtcaagcacgccgtggacatcgccgcagggacaccgcctcccgccctgctggtgctcgaaggaagccaggatgatctcatcgcacacgaagacctggtgaagctccagaatgtcttggagcccctttatgcccaggcgcacgaatccgcgcggctggggtatctcacggtgcaggggctgcaacacaacatcaccgggcctcatgtggatgacgagcttgctcgacagattgctgattggtacaacatgtacctttaa

SEQ ID NO: 73984 - protein, 226 aa, Unknown
  Obtained from environmental sample
  misc_feature (1)..(226): Xaa is any amino acid
MQAVPLDDVRAVKIYLGLPLFGQACAIGRHARAGPASAAGRRHGDLSAHCCGAAQELXGVVRELQREGCMKAGDKIGLLGFSAGGASALLALAEHHVMIGAAILLNPSTGLTASVQAYEHATGKPYSWTPQSRALAARTDAVKHAVDIAAGTPPPALLVLEGSQDDLIAHEDLVKLQNVLEPLYAQAHESARLGYLTVQGLQHNITGPHVDDELARQIADWYNMYL

SEQ ID NO: 73985 - DNA, 717 bp, Unknown
  Obtained from environmental sample
  misc_feature (1)..(717): n is a, c, g, or t
gtgctggctggccagttccacgatgcgcaccaggatcaggccgccggccacgttcagatagccccgcagcagcagcatccacaggcgggtgctgcgcgtcatgcgcggcggctcgagggttgccagcggcggcatgcgccacagggcgcgcgccgcggtatcgcctgcgcgctgcggctccttgccaagcaagaacatcgccgccgccgcggcggccgctgcgacaccgccgccgctgagagtcatcatgatggcgtgatcgctgatctgcggatacagcaccgaggcggtgaggatgatcgagagcagcagcaggcccaggatgatcaagcccgtgcagagattgagccagcggccgttcacccacggcccgagcaccgccttgtcattgcacagcagcagcaagagcaccgtggccgagggcagcagcacgcccgccagcgtctgcaccgcgttggtcaaaaggcccagcggggtccccggggtcaggaccagcaccgccgccaggagcacgagcgcagcatagttggcaaaaaagctgcgtgcgtcgctgggctggcggtgcagggagtgcttgagcgacaagacatcccccaccgcgtaggcggtggagaccgacaccgccatcgcgccgatgatgctggcatcaagcagcgccacggcgaagaaggccccggccagcggaggcgcgctccagggcgccccgggaggggctga

SEQ ID NO: 73986 - protein, 238 aa, Unknown
  Obtained from environmental sample
  misc_feature (1)..(238): Xaa is any amino acid
MLAGQFHDAHQDQAAGHVQIAPQQQHPQAGAARHARRLEGCQRRHAPQGARRGIACALRLLAKQEHRRRRGGRCDTAAAESHHDGVIADLRIQHRGGEDDREQQQAQDDQARAEIEPAAVHPRPEHRLVIAQQQQEHRGRGQQHARQRLHRVGQKAQRGPRGQDQHRRQEHERSIVGKKAACVAGLAVQGVLERQDIPHRVGGGDRHRHRADDAGIKQRHGEEGPGQRRRAPGRPGRG

SEQ ID NO: 73987 - DNA, 552 bp, Unknown
  Obtained from environmental sample
  misc_feature (1)..(552): n is a, c, g, or t
atggagagaacgccgactgcgcctttgcgccaaggacgcgatcttggtcttttgaaaccggagcggtatgccttgttcgccgtcaagcgagaagctctccagcgcgctttagaccttcttgccgctagaaaaatcgcgccgtccgccgcgataaacgaaaaactctcgcttcttggcaccagcgaaatcaggacaagcgtttccttatacgagcttttaaaacgccccgatctttcttattacctcctctgccgcgcgtttgacctgccggaaattccgcccgccgtcaaagaacaagtcgaaatatccgccaagtacgaaggatatattaaaaaacaaattgcgcaggtggaaaaatccagccgtcttgacgaaaaaaccattcccgccaatattgattattctcaaattcaaggccttgcgctggaagcccggcaaaaacttgctcaaatccgtccgctttccgttggtcaagcgtctcgcgtctcaggcgtttcgcctgccgatatcgctattttaacggtatggctgaaaagaaagtgggaagcgtaa

SEQ ID NO: 73988 - protein, 183 aa, Unknown
  Obtained from environmental sample
  misc_feature (1)..(183): Xaa is any amino acid
MERTPTAPLRQGRDLGLLKPERYALFAVKREALQRALDLLAARKIAPSAAINEKLSLLGTSEIRTSVSLYELLKRPDLSYYLLCRAFDLPEIPPAVKEQVEISAKYEGYIKKQIAQVEKSSRLDEKTIPANIDYSQIQGLALEARQKLAQIRPLSVGQASRVSGVSPADIAILTVWLKRKWEA

SEQ ID NO: 73989 - DNA, 870 bp, Unknown
  Obtained from environmental sample
  misc_feature (1)..(870): n is a, c, g, or t
ttgccgcccgcgccgccgcttaactttctgttagcggagaagggattagcggcgaatggaactaaaaacgcggctatcgccgctaaattgccagattgtgaacaatctgaagtgagaaaaattttttcatcaacaattcaccgcaacccttntcagccgcgtaaaaattttaatcaggaatctttagatgaattagccgcctcaattaaaacatacggcgtcatccaacctcttctagtcaggccgcacggcgcggattatcagcttatcgcgggcgaaaggcggcttcgcgcttctcatctggccggtcttaccgaagtgccggtcattgtacgaaatatgactgatcaagaaatggcggaatttgccctgattgaaaacctgcaacgggaagatttgcattttttagaagaagccgcgggtttcgcgaaacttattgccgattttcaaattacgcaggaaaccctggccaaacgcatgggcaaaagccaatcattcattgccaacaaactgcgtcttttaaaactgcctgaaaaagtgcgccaagaaatattgaaccaaaacctgaccgaacgtcacgccagagctgttttgaaactggaaggcgaagcggcgcagcttgaaataattgaactaatcagccaaaaaaaacttaatgtccgccagacggaagaattaattgacaaatacctggaaagccttgctcaagaagacgcctctgacgaaactcctaaacaaaaaatgctgagaattattaaagacgtccgtatttttatcaacgccatcaaaagcgttgccgaccaaatgaaaaataacggcatggacgttgactatcaacaagatttgacggcgaattctcggccgatctga

SEQ ID NO: 73990 - protein, 289 aa, Unknown
  Obtained from environmental sample
  DOMAIN (39)...(128): ParB-like nuclease domain
  misc_feature (1)..(289): Xaa is any amino acid
MPPAPPLNFLLAEKGLAANGTKNAAIAAKLPDCEQSEVRKIFSSTIHRNPXQPRKNFNQESLDELAASIKTYGVIQPLLVRPHGADYQLIAGERRLRASHLAGLTEVPVIVRNMTDQEMAEFALIENLQREDLHFLEEAAGFAKLIADFQITQETLAKRMGKSQSFIANKLRLLKLPEKVRQEILNQNLTERHARAVLKLEGEAAQLEIIELISQKKLNVRQTEELIDKYLESLAQEDASDETPKQKMLRIIKDVRIFINAIKSVADQMKNNGMDVDYQQDLTANSRPI

SEQ ID NO: 73991 - DNA, 987 bp, Unknown
  Obtained from environmental sample
  misc_feature (1)..(987): n is a, c, g, or t
atgcggaagcaggcggctgnccttcaaaaaggtcgccccttcgctacgcgtggccctgaccggcgttccgggaggccccagcctccccgacatccttcaggttctcggacggacggaaaccctggcccgcctggacagggttctgcacgcgccggagcggacgcattccggttctgcataatagttgggagaactgtcatgccttttggatacaacgggaaaattctcgtggtggatcttgccgccggaacatggacggcggaggaacacgatgagacttggtaccgtacgtattggggaggcggggctttggcttcgtggtacatgcacaaactcatccccaaaggatgcgaccccttaagcccccaaaacgtgctggtattcgccacgtccgtgctgtgcggcgcgccgttgtccggcttctcccgtctgaccgtggccgcgaagagtccgctcacggacgctttcggcgaatcggaagccggaggctatcttggcccggcactcaaacatgcgggctttgatgccgtcgtctttaccggcaaagctacaaaccccgtgtatttgtatatcaacaagggcgaagtttccctgcgcgatgccggaaaattccggggaatggaaaacgcgcccctgcacgacgccctcaaaaaagaactgggcgaaaacaccatccgcgtggcatccatcggtcccgctggtgaaaacctggtgcgctacgcctgcatcatcaacgaactcgcccatgtcaacggacgctgcggcatgggcgctgtcatggggtcgaagaatctgaaggcccttgtctgcctcggtgatgaaaacagcatcagctatgccgatcccgaactgctcaaggcggtgggcgcgcggcaccgtaaggctatcagcgaacacatgcccaacgtgaatatcggcaaaaacggcacgccgatacacgtcatgaccctgcaaggcggcggcatgctgcccacccctcggccataa

SEQ ID NO: 73992 - protein, 328 aa, Unknown
  Obtained from environmental sample
  DOMAIN (71)...(274): Aldehyde ferredoxin oxidoreductase, N-terminal domain
  misc_feature (1)..(328): Xaa is any amino acid
MRKQAAXLQKGRPFATRGPDRRSGRPQPPRHPSGSRTDGNPGPPGQGSARAGADAFRFCIIVGRTVMPFGYNGKILVVDLAAGTWTAEEHDETWYRTYWGGGALASWYMHKLIPKGCDPLSPQNVLVFATSVLCGAPLSGFSRLTVAAKSPLTDAFGESEAGGYLGPALKHAGFDAVVFTGKATNPVYLYINKGEVSLRDAGKFRGMENAPLHDALKKELGENTIRVASIGPAGENLVRYACIINELAHVNGRCGMGAVMGSKNLKALVCLGDENSISYADPELLKAVGARHRKAISEHMPNVNIGKNGTPIHVMTLQGGGMLPTPRP

SEQ ID NO: 73993 - DNA, 810 bp, Unknown
  Obtained from environmental sample
  misc_feature (1)..(810): n is a, c, g, or t
atgccctcatcttcagctgaagtcggagggctccgtgacctgcgagacctgccagcggatactgtacctgccgcacttccagccgaaatgaccacagcggttttggggagcggattcaaagagcgccttgaaaatgtgcgggcgagaatccgccttgccgccgagacctgcggccgcgacccaggctctgtctcgctgctggccgtttccaagttccaccccccggaggcgctgcgcgaggcgatggactgcggcgtcacccactttgccgaaaactacgtgcaggagtgcgcggccaaggccaccgccctgtcgggcatgtgcggcgccgccggcgcgtcttcgggcgccacattcgctacattcgcgctgataggcccactgcagcgaaacaaggcgaagccggcgttgcagcatttcagtgaactgatgaccatagacaggccggaactggcttcgaggctggcgacgctggcggaagaactgggcctgagccgcgacgtctgggtacaggtggacctatggggcgaagagaccaagatgggcggctgccccaagacgggaatccagccgacactcgacgcgctgaaaggctcccggaggctgtccctaaaggggttcatggccatccccccctacggggcgacgtcggcctttggcgaacttgcggagctgcgcgaggactggcagcagcaccttgggcgcggactacagctttcaatgggcatgagcgacgacctggaggacgccatcagggcggggtcggaccaagtcagggttgggaccgcgctgtttggggaacggacataa

SEQ ID NO: 73994 - protein, 269 aa, Unknown
  Obtained from environmental sample
  DOMAIN (36)...(269): Alanine racemase, N-terminal domain
  misc_feature (1)..(269): Xaa is any amino acid
MPSSSAEVGGLRDLRDLPADTVPAALPAEMTTAVLGSGFKERLENVRARIRLAAETCGRDPGSVSLLAVSKFHPPEALREAMDCGVTHFAENYVQECAAKATALSGMCGAAGASSGATFATFALIGPLQRNKAKPALQHFSELMTIDRPELASRLATLAEELGLSRDVWVQVDLWGEETKMGGCPKTGIQPTLDALKGSRRLSLKGFMAIPPYGATSAFGELAELREDWQQHLGRGLQLSMGMSDDLEDAIRAGSDQVRVGTALFGERT

SEQ ID NO: 73995 - DNA, 834 bp, Unknown
  Obtained from environmental sample
  misc_feature (1)..(834): n is a, c, g, or t
ttgtcgaaagagtttaacggtgaaaaaatgagtaattttatttctacaaaggccgaagtgaaagactatatttgcgcgcggactccgctaattatcattcattcctccgaaagagaacgtgtggaacgaatgttaaaagagctggcggcggagttattgtgtaacatatcttattacacagatgcaaaacaagtatgcaatctcggcaataacaacggtcaaaccgttaatgtagacaacgatccgttgcgatatatcgcttccgcgttcaaaaaaaacagaaacactacgtttgcgtttggggatgtaaggcgcataaatgaagacaacgtttacagtagagaattattaaacatactctatttggctaaagaaacaaacagcacgttgatcttgataactgcagatttcgtatggtcgcgattagctcaattcggaatgcttaccgccttaagttatccggacatagacgaacggatttcacaaatgcaagcgtttttaaccgcgtaccgtaacaaatacgttattgaatgggatgatgatgatatgcgccgggccgctacgttgctcagaggtttttccgagatacaaattgaaaatattttgtctaccacgctgataagcaacggcgggttattaaaaaatcacatatatgagctgacaagccaaaagagccggttgtacggtgcggtatcaagcattcagcttgtgcaagtaagccaaacgttggaggtatccgggcttgaacggttaaaaaaatggttgattgataaaagaaaggtctttttcgcgtctgacgatgaactcaaacatcgtgatttagacacaccctaa

SEQ ID NO: 73996 - protein, 277 aa, Unknown
  Obtained from environmental sample
  misc_feature (1)..(277): Xaa is any amino acid
MSKEFNGEKMSNFISTKAEVKDYICARTPLIIIHSSERERVERMLKELAAELLCNISYYTDAKQVCNLGNNNGQTVNVDNDPLRYIASAFKKNRNTTFAFGDVRRINEDNVYSRELLNILYLAKETNSTLILITADFVWSRLAQFGMLTALSYPDIDERISQMQAFLTAYRNKYVIEWDDDDMRRAATLLRGFSEIQIENILSTTLISNGGLLKNHIYELTSQKSRLYGAVSSIQLVQVSQTLEVSGLERLKKWLIDKRKVFFASDDELKHRDLDTP

SEQ ID NO: 73997 - DNA, 570 bp, Unknown
  Obtained from environmental sample
  misc_feature (1)..(570): n is a, c, g, or t
atgagctggcagctgacctatcaattcgcggatatgattccccttacatacgtcgggatggctgttgggaaatccgttatgaccgagcttgctcctattttaaccgctatggttttggcagggcgcgtaggtgcttccatgtgttccgagcttggtacaatggctgtgaccgagcagttggatgcctataatgtgctggggatgaatccttataaatttttaatagttccgcgcatttccgcctgtattataatgcttccagttctaactatactcagtatttttgttgggcttttgggtggctttgttgtggcttatctatacaaagaagtctcttttcacatgtttttttctggagttcggttgagttataaagactgggattttgcggttggccttataaaagcagcactctttggattttttatctcaagctatgcctgttactttggttattacaccataaacggcgcagaaggcgttggcaaaagcacaaaggcaacggttgtattcagcatgacttcaattttgataggcggttttgcgctgtcaaaaattttgctgatttaa

SEQ ID NO: 73998 - protein, 189 aa, Unknown
  Obtained from environmental sample
  DOMAIN (3)...(188): Domain of unknown function DUF140
  misc_feature (1)..(189): Xaa is any amino acid
MSWQLTYQFADMIPLTYVGMAVGKSVMTELAPILTAMVLAGRVGASMCSELGTMAVTEQLDAYNVLGMNPYKFLIVPRISACIIMLPVLTILSIFVGLLGGFVVAYLYKEVSFHMFFSGVRLSYKDWDFAVGLIKAALFGFFISSYACYFGYYTINGAEGVGKSTKATVVFSMTSILIGGFALSKILLI

SEQ ID NO: 73999 - DNA, 810 bp, Unknown
  Obtained from environmental sample
  misc_feature (1)..(810): n is a, c, g, or t
atgggtattctgcataaaatggtggaaatcctgcaaaaattagacccaaagaatgaagattggcgaagactacaagaagaaaaagcaaccggcgaacttaaagatgccatcaaaattgaagaccaacaagaacgcgaaatccgactgaaggaaatcagcgatatttttgaaaataacaaatcagattatggacggaaactctttctgatagaaaactgtatcttcggcgtggacatacaacctattgccgtacagattagcaagttgcgctttttccttagtttggttattgaacaaacgccgaccaaagacgcaaacgataactacggcataaaaccgttgccgaatttagagactaaatttgtggcggctaatacgctgatcggcatagaaaaggaaggtactatatttagaaccgcagagatgattgaaaaggaaaacgaactgaagcaagtacggcacgaatattttacggcgaacgatcgtaagaaaaaacgtttgttgcaaggtaaagacaaaaagctgcgtatggaattggccaaaatgctgaaaggacttggattcggtgtaaacgcggctgaccaaatcgcgagttttgatccttacgaccaaaataatagcgccggatggtttgatgcggagtggatgtttggggtggagcaaaaaaaggacgggttaaatgaacctttgaatgacggggaggggtattttgatatagttattgggaatccgccgtatggagcaattattctgaatgtgacnaaaatattttcaacttattatactactgcngaaactatncagaaataa

SEQ ID NO: 74000 - protein, 269 aa, Unknown
  Obtained from environmental sample
  misc_feature (1)..(269): Xaa is any amino acid
MGILHKMVEILQKLDPKNEDWRRLQEEKATGELKDAIKIEDQQEREIRLKEISDIFENNKSDYGRKLFLIENCIFGVDIQPIAVQISKLRFFLSLVIEQTPTKDANDNYGIKPLPNLETKFVAANTLIGIEKEGTIFRTAEMIEKENELKQVRHEYFTANDRKKKRLLQGKDKKLRMELAKMLKGLGFGVNAADQIASFDPYDQNNSAGWFDAEWMFGVEQKKDGLNEPLNDGEGYFDIVIGNPPYGAIILNVTKIFSTYYTTAETXQK

SEQ ID NO: 74001 - DNA, 972 bp, Unknown
  Obtained from environmental sample
  misc_feature (1)..(972): n is a, c, g, or t
ttgatggccgagttgccccaagaggagctaccggcagacgaggaagcgcttgaagagccgcagactgatgaggaggagggcatagtattccaagagccgctggctgttgaagatgcggtggaggagtctccggctgccgaagaggaacctgttaccgaggatatgccccaagaggagctaccggcagacgaggaagcgcccgaagaacctcaggctgttgaagatgcggtagaggagcctctagctgccgaagaggaacctgttgccgaagatatgccccaagaggagctatcggcagacgaggaagcacctgaagaaccgccaactgatgaggacgagcatatagtatttcaagagttgctggttatggaagatgcgccccaagaggaggagttggcagccgaagacacgcctgaagacctaccacaggtttttgaggaatcgtccgaagaacctcaggctattgaagatgcggtagaagagcctccggctactgaagaggaacctgttgccgaggacatgccccaagaagagctatcggctgaaaaggatgtgctccaaaagccaccgattgataaagatgacgatatgatatttctccaggaggagccgccgaccggtaaggatgatgatatagtatttttccaagagtcaccggctgttgaaaatgtgcccaaaaagtcgccggttgttgaggatacgccgaaggaaccggttgttaaacgtacatttaaaagaccgctgattgttaaagatttatttcgggaaatactaaaaagaagcggtaaaaaagaagaagattacgganatatggtacttttaggacaattttctgcgcnaatgttagaaaaatattcatttggccgcagagatctttcgagaaaagagggaattaaaagtgatatccttctgccttatgtggaaatcaatcaagatatgtatgattgggcccntgaaaacantaaattatga

SEQ ID NO: 74002 - protein, 323 aa, Unknown
  Obtained from environmental sample
  misc_feature (1)..(323): Xaa is any amino acid
MMAELPQEELPADEEALEEPQTDEEEGIVFQEPLAVEDAVEESPAAEEEPVTEDMPQEELPADEEAPEEPQAVEDAVEEPLAAEEEPVAEDMPQEELSADEEAPEEPPTDEDEHIVFQELLVMEDAPQEEELAAEDTPEDLPQVFEESSEEPQAIEDAVEEPPATEEEPVAEDMPQEELSAEKDVLQKPPIDKDDDMIFLQEEPPTGKDDDIVFFQESPAVENVPKKSPVVEDTPKEPVVKRTFKRPLIVKDLFREILKRSGKKEEDYGXMVLLGQFSAXMLEKYSFGRRDLSRKEGIKSDILLPYVEINQDMYDWAXENXKL

SEQ ID NO: 74003 - DNA, 339 bp, Unknown
  Obtained from environmental sample
  misc_feature (1)..(339): n is a, c, g, or t
gtgccagagacattaaaccctttacgttatcctggttccaaaagggctttagtagattatatagaagaactacttattgttaatcatcttgacggctgtcgatttactgagccttatgcaggaagcgccgctgtcgggatcgaattgttacgtcggaatataatcaatgctcttgtcctttgtgaaaaagatattttgttatttgctttttgggaatgtgttttcagaaaaacaaaagcactctgcaaaaaaattgcagatactccagtaacgataaaaacatggaaagaattaaatatttatcgtcaagaaaaaaaaataactaaaaataatttttaa

SEQ ID NO: 74004 - protein, 112 aa, Unknown
  Obtained from environmental sample
  misc_feature (1)..(112): Xaa is any amino acid
MPETLNPLRYPGSKRALVDYIEELLIVNHLDGCRFTEPYAGSAAVGIELLRRNIINALVLCEKDILLFAFWECVFRKTKALCKKIADTPVTIKTWKELNIYRQEKKITKNNF

SEQ ID NO: 74005 - DNA, 588 bp, Unknown
  Obtained from environmental sample
  misc_feature (1)..(588): n is a, c, g, or t
atgggcacatcagaggggagaagaaacggcggttcgtcacggagaccagcaaggtggaaatgctgtggaccaaaaccaggcggaccacttccaaaaactttctttgaaacaattagttggagaggtaaactagaccctaaagaagaaaagcatcaaggacttcttgtgtcagtaaatgaattatttaaactttcaaataaccagataaaccgtaaaaaaggatatgaattattccccattgcaaccggaatggtattgagaacagcgtatgaacaggcattaagattgcaactcataaaagttaacctgtggggtgtttaccaccaatcattacataaagattcttttccaacactatcaggtatggaaaattttatcaaacaagatggtaataaagcgcaagtattttccaaaaaagaaatgctatgtgcttttgatagtataatagcagcaaaacatcgcgagtttttaaatgccaacattcattttcctggaagaattaatgttaccccagatactctagaaggcattgctagtggtggtatgttctatttaattcagaacataataaacaatttattgccataa

SEQ ID NO: 74006 - protein, 195 aa, Unknown
  Obtained from environmental sample
  misc_feature (1)..(195): Xaa is any amino acid
MGTSEGRRNGGSSRRPARWKCCGPKPGGPLPKTFFETISWRGKLDPKEEKHQGLLVSVNELFKLSNNQINRKKGYELFPIATGMVLRTAYEQALRLQLIKVNLWGVYHQSLHKDSFPTLSGMENFIKQDGNKAQVFSKKEMLCAFDSIIAAKHREFLNANIHFPGRINVTPDTLEGIASGGMFYLIQNIINNLLP

SEQ ID NO: 74007 - DNA, 360 bp, Unknown
  Obtained from environmental sample
  misc_feature (1)..(360): n is a, c, g, or t
gtggtatcgcgcgaaatgagcctgcccctcttcgtgctggcgcgcaccgcgtttatcagtcttgaactgttggtagtcgccgccttgtaccatgtcatgtttcgcatgattgtaccggacagggcggatttttccctggtatttcaagtgattgcctatgcatcggcgccggcgttgctgggggtggttccggtgttggggtcgctggtcggctttatctggagcattgcctgcagccttgtgggctgccgctatgccttacgcatcagttggcggcagacgctgctggcgctcggccccctgtatctggtcatcacctttctgtttttgcagttgagcgttgccgcgcatggcctgtga

SEQ ID NO: 74008 - protein, 119 aa, Unknown
  Obtained from environmental sample
  misc_feature (1)..(119): Xaa is any amino acid
MVSREMSLPLFVLARTAFISLELLVVAALYHVMFRMIVPDRADFSLVFQVIAYASAPALLGVVPVLGSLVGFIWSIACSLVGCRYALRISWRQTLLALGPLYLVITFLFLQLSVAAHGL

SEQ ID NO: 74009 - DNA, 927 bp, Unknown
  Obtained from environmental sample
  misc_feature (1)..(927): n is a, c, g, or t
gtggctcgcgctcgtcaacgagctgctgcaagaacccgcctttgccgaggaagaaatcgcacgggaaaaaacaaccagacggcagccatccgctcgggcgaggacaggccgctgggcctgcttttccgcaagttgccgccttttttgtttcccggcggccatccttacggctatctcaagctcggcctgcccgaacagatacaggcgttcagcgctgacgagatccgcgccttctggtccagacaggcgatgcagccctgcgtcattgccgtagcgggcgatttcgaccgcgaaaaaattcttgcctttgcccggacgcgagcgagcgccgccggcgcgtccgaagcgctgcgcctcccggagccggcatggggcgcgggacgtgagatgaatctcacgctgccggacagacagcaagcgcattacatgctcattttcaaaaccgtccctgccgtgcatcccgatgcgcccggcctggagcttttggaaagcatcctttccgggcaaagcggcccgctttttgtcgagttgcgcgacaagcagggtctggcgtatacggtggccgcctttgcccgcttgtcgcaggcagcggggtacatggctttctacatcggcgcgcatcccgcaaaacttgcgcaagccgaagcgggttttcgcaaggtgctcaaggacctgcacgaaaagcccctgcctgccgcaagcctgacgcggggcatcaaccgcatggaagccgactattaccgctcacgccaaagtctggcttcccgctccggcgaagcggccatgctcgcggcgatgggccgtcccttaagcttcagccgcgaccggatcgaaaaagcccgcagcctgacgccgcaggaaatgcagcgtctcatccgcgagtatttgaaaccggaaagcgcatatacggcacgagtgcttccctaa

SEQ ID NO: 74010 - protein, 308 aa, Unknown
  Obtained from environmental sample
  DOMAIN (69)...(242): Peptidase M16 inactive domain
  misc_feature (1)..(308): Xaa is any amino acid
MARARQRAAARTRLCRGRNRTGKNNQTAAIRSGEDRPLGLLFRKLPPFLFPGGHPYGYLKLGLPEQIQAFSADEIRAFWSRQAMQPCVIAVAGDFDREKILAFARTRASAAGASEALRLPEPAWGAGREMNLTLPDRQQAHYMLIFKTVPAVHPDAPGLELLESILSGQSGPLFVELRDKQGLAYTVAAFARLSQAAGYMAFYIGAHPAKLAQAEAGFRKVLKDLHEKPLPAASLTRGINRMEADYYRSRQSLASRSGEAAMLAAMGRPLSFSRDRIEKARSLTPQEMQRLIREYLKPESAYTARVLP

SEQ ID NO: 74011 - DNA, 432 bp, Unknown
  Obtained from environmental sample
  misc_feature (1)..(432): n is a, c, g, or t
atgatcagatcggccgagaagcccgagcccggggatgagccggcactcgccgccagcgtgcatcctgatccggcggaggatgcggtggcggcccctgagagcgccagtgccccggccgcggcgccacccggcgcagaagccccgggcaccaagcccatcgccgcggagcgcgcgcctgtgccgcagcacagctggagcgtgcaggtgggcagctacggcaccaagatgagcgcgcagcgcatggtgagcgagctcattgcgcagggtgtgcccgcctacgtgtcggcgagccgcatcaaccgccacaagacggtgtatcgcgtgcgcgcgccggctccagatcgcgacagcgcgcttgatctcgccttgcaactgcgcgaggcgggctacgacgtcagcctggcacggcctgcagcgagcgcatcgcggtag

SEQ ID NO: 74012 - protein, 143 aa, Unknown
  Obtained from environmental sample
  DOMAIN (61)...(136): Sporulation related domain
  misc_feature (1)..(143): Xaa is any amino acid
MIRSAEKPEPGDEPALAASVHPDPAEDAVAAPESASAPAAAPPGAEAPGTKPIAAERAPVPQHSWSVQVGSYGTKMSAQRMVSELIAQGVPAYVSASRINRHKTVYRVRAPAPDRDSALDLALQLREAGYDVSLARPAASASR

SEQ ID NO: 74013 - DNA, 621 bp, Unknown
  Obtained from environmental sample
  misc_feature (1)..(621): n is a, c, g, or t
ttgtttgttccttggcactttccgctacataaagaccccaagatacaaggtgcatccaaaaaagcagagtacgcattcaaagaacaatatcctgctatatacaaccatttacgtcggtacaaagaacaattatcaaatagaaataaaactgagacaggaatacgctatgaatggtatgctttacagcgttggggagcagattattgggaggatttttttaaacagaaaataatttggaaaattatcggaaatcaaatggctttttctattgattcaaacaaatatatcgtcaataatgcttgttacattttaacaggtttaggattagaatatctactttccgttttgaactcaaaaatcataacttggtacagtttcattaccaatatgaataaaacaggtgttggcgatgttcaggttggtggacaaaacgtaaacttatttccaattccgttattatctgaaattggacaaaagccatttattgaattggtagaaaagatcatttcaaaaaaagagaaaaacgaagacacaagtgttcttgaaacgaaaattgaaaacatggttaatgaattatataatcttacctctgaagaggctgatttcttatgctctctataa

SEQ ID NO: 74014 - protein, 206 aa, Unknown
  Obtained from environmental sample
  misc_feature (1)..(206): Xaa is any amino acid
MFVPWHFPLHKDPKIQGASKKAEYAFKEQYPAIYNHLRRYKEQLSNRNKTETGIRYEWYALQRWGADYWEDFFKQKIIWKIIGNQMAFSIDSNKYIVNNACYILTGLGLEYLLSVLNSKIITWYSFITNMNKTGVGDVQVGGQNVNLFPIPLLSEIGQKPFIELVEKIISKKEKNEDTSVLETKIENMVNELYNLTSEEADFLCSL

SEQ ID NO: 74015 - DNA, 441 bp, Unknown
  Obtained from environmental sample
  misc_feature (1)..(441): n is a, c, g, or t
atggggaaacctgttatcctttctaccggtatgagcgagctttcagaaattgacaaggctgttagctatatagataaagataatttgttaatactgcactgtgtttcgcaatatccggccatgccagaaaacatcaatttaagggcaattcaaaccttgcgggatcgttacggtgttccggtaggttattcggggcatgagcttgatacgattatctcggcggtagctgttggtatgggggcttgtgcagttgaacggcattttactcttgatcgaaaaatgtggggcagtgaccataaagcgtccattgagcctgatgagatgaaagagatgataaaaaatattcgtttggttgaacaggcgctgggtgatccaataccgcgctgtttgcctgtagaagaaccggttaaagtgaaactgcgcagagtgaacagtttatga

SEQ ID NO: 74016 - protein, 146 aa, Unknown
  Obtained from environmental sample
  DOMAIN (1)...(127): NeuB family
  misc_feature (1)..(146): Xaa is any amino acid
MGKPVILSTGMSELSEIDKAVSYIDKDNLLILHCVSQYPAMPENINLRAIQTLRDRYGVPVGYSGHELDTIISAVAVGMGACAVERHFTLDRKMWGSDHKASIEPDEMKEMIKNIRLVEQALGDPIPRCLPVEEPVKVKLRRVNSL

SEQ ID NO: 74017 - DNA, 435 bp, Unknown
  Obtained from environmental sample
  misc_feature (1)..(435): n is a, c, g, or t
atgaaactgatactgattgatgtagatggagtattgaccgatggacgtgtaacactggatatatacggaaacgaaacaaaaacaatttcctatcgtgatctggacgcaatcgcggtgggaagaaaagcagggtatgattttgcttttgttacaggtgaagatacggaaatggtgcgagtgttggcaaaacgctttttcattgaacgggtttatgctggctcaaaagacaaacttaaagctatgcaggaaatctcaaaagagtttgatatacctttgagcggattactttatatcggcgacagcgaccgtgatgcgccggcacttgaagctgtcggcttgngaattgcccccgccgatgncagcgtaagcgcgaaagtcgctgctcatgttcaaacgacagtaaaggcgggtacggtgtttgctcgaagtggttga

SEQ ID NO: 74018 - protein, 144 aa, Unknown
  Obtained from environmental sample
  misc_feature (1)..(144): Xaa is any amino acid
MKLILIDVDGVLTDGRVTLDIYGNETKTISYRDLDAIAVGRKAGYDFAFVTGEDTEMVRVLAKRFFIERVYAGSKDKLKAMQEISKEFDIPLSGLLYIGDSDRDAPALEAVGLXIAPADXSVSAKVAAHVQTTVKAGTVFARSG

SEQ ID NO: 74019 - DNA, 477 bp, Unknown
  Obtained from environmental sample
  misc_feature (1)..(477): n is a, c, g, or t
atgtgcatagcgaacgccggcaagtcggtggctgtatgcaggggagatggcggaatgcagcttatnatacaagagctggctgtgattagaggacggaatctgcctataaagctgtttgtcatcaataaccatggctatgcgtccatccggaatatgcaaaacaaccattttgctggcagacacacaggatgtgataaaaacagcggtttgcatttaccgtctntgcgtggtatggcaacggcatacgatattccatatttttacgctgaaacgctggatcaactggacgaagcgataaaaacagcgctgtcaatgtccggcgcaacgctgtgtgaaattaccgttaccggggactgccttgttacgccgcgcaccgcgacgaaagttatgccggacggttccatgcgctcatctccactggaaaaccagtttccatttttaccggacgatgaagtgaaaacgaatatgctgatttaa

SEQ ID NO: 74020 - protein, 158 aa, Unknown
  Obtained from environmental sample
  DOMAIN (1)...(113): Thiamine pyrophosphate enzyme, C-terminal TPP binding domain
  misc_feature (1)..(158): Xaa is any amino acid
MCIANAGKSVAVCRGDGGMQLXIQELAVIRGRNLPIKLFVINNHGYASIRNMQNNHFAGRHTGCDKNSGLHLPSXRGMATAYDIPYFYAETLDQLDEAIKTALSMSGATLCEITVTGDCLVTPRTATKVMPDGSMRSSPLENQFPFLPDDEVKTNMLI

SEQ ID NO: 74021 - DNA, 933 bp, Unknown
  Obtained from environmental sample
  misc_feature (1)..(933): n is a, c, g, or t
ttggcaaacgacggcgataccgttgccgagggtacgcttgcggccccggctgcggagccgaaaaagtcaaaacaaataacaattgccgccccgataccggcaaaaacatggcacggcgtttatcttaacctgagtttccgtctggcaaagagcctgatatgggcgcaaaagggttttgaaacggcggcagcccagtacgagattcccgtcgaaaaagcgcggaacatcccctgggaaaaaaccttcgcccctgtggaaaccagcgagcaggacgaatccgttgttattgaaggcgaaacatttaaatatattttcaataaattttacggttcttttgaatcaattaaacgcaacggagcggaactgctgcgcggacggccaggcttgagcgtatggcgcgcgcccacggacaatgaccggtacgtcaaatcacagtggcttgaggaaaaccttgatcgcataacaagcaaggtttattccgttacaatggaagacggcggcactggcggggccgcctgcgacgggaccgcctgcggcggccttgtaataagggtaagcggaagcctgggcgcgcctgcccggcggccttttgccgtaaccgacgtaagttacacaattctgccctggggggagattcagataaacatcgccgccgacctgcgggacgacatgatattccttccccgtttcgggatggaattcgccatgcctgagggcaatgagtttcttgagtatttcggacttggccccgatgaanattattgcgacatgaatcagcatgtccgcatgggccgctttaagtcgcgtgtatctgaacaatatttcccctacatcaaacccccaggacacggaaatcacgggcacgttaantgggcagcggtttacgactctntcggtcggggggcttttgttcaaagccgcgggcgcttttga

SEQ ID NO: 74022 - protein, 310 aa, Unknown
  Obtained from environmental sample
  DOMAIN (95)...(310): Beta galactosidase small chain
  misc_feature (1)..(310): Xaa is any amino acid
MANDGDTVAEGTLAAPAAEPKKSKQITIAAPIPAKTWHGVYLNLSFRLAKSLIWAQKGFETAAAQYEIPVEKARNIPWEKTFAPVETSEQDESVVIEGETFKYIFNKFYGSFESIKRNGAELLRGRPGLSVWRAPTDNDRYVKSQWLEENLDRITSKVYSVTMEDGGTGGAACDGTACGGLVIRVSGSLGAPARRPFAVTDVSYTILPWGEIQINIAADLRDDMIFLPRFGMEFAMPEGNEFLEYFGLGPDEXYCDMNQHVRMGRFKSRVSEQYFPYIKPPGHGNHGHVXWAAVYDSXGRGAFVQSRGRF

SEQ ID NO: 74023 - DNA, 702 bp, Unknown
  Obtained from environmental sample
  misc_feature (1)..(702): n is a, c, g, or t
gtgcccagtccattcgactttgccgcgcagggcatgttgttcgtcccgcccggcctgcccgaaaggaaggcagccaaggacggcgtcggggaggccgcgtgggtcgaggcgtcgctggaggccatgacccgtctgctggcggcctcgtgcggtcgcgcactgttgcttttcaccagccggaagatgctgtcggcgttcaagacgcgcctacagtcaggcatgccctccatcacttttttcgtgcagggcgaggggctgtcaagggcacagctcctgcaccgcttccgaaagacgccgaacgccgcgctgctggggctggcctcgttctggcagggcattgacctgccgggcgacgccctctgcttggtcatcgtggccgcgctgcccttcgccccgcctgacgatcccgttgtgcaggccaggatcagggaggccgacgccatcaagagaggcttgggctttgcgggcatacaggtgccccagatgacgctcaagctcaagcagggcataggccgcctcatacgcacgcgcaccgacaggggcgtggtctgcatactggacccgcgactcatgctgccctccgaggacccgaacggcaagagctacgcggcccaagtccgcgccgcacttccaccgttccccatcacgagggactgggggaaggtggaagaatttttgcgggggctgcgcggcgggtggtga

SEQ ID NO: 74024 - protein, 233 aa, Unknown
  Obtained from environmental sample
  misc_feature (1)..(233): Xaa is any amino acid
MPSPFDFAAQGMLFVPPGLPERKAAKDGVGEAAWVEASLEAMTRLLAASCGRALLLFTSRKMLSAFKTRLQSGMPSITFFVQGEGLSRAQLLHRFRKTPNAALLGLASFWQGIDLPGDALCLVIVAALPFAPPDDPVVQARIREADAIKRGLGFAGIQVPQMTLKLKQGIGRLIRTRTDRGVVCILDPRLMLPSEDPNGKSYAAQVRAALPPFPITRDWGKVEEFLRGLRGGW

SEQ ID NO: 74025 - DNA, 963 bp, Unknown
  Obtained from environmental sample
  misc_feature (1)..(963): n is a, c, g, or t
ttgaattacctgaagcagcaggtgggattgaaagttgcagccaacaccgcaatcacaggagcaaccaaaaccaaaatcacttatgattccaaaggcttggtcacggcaggggatgacttggcggctgcggacttgcccagtataaccgtggcggcgagtacaacaaacacggatgctggaaccgcagccaaaaccgacacaatccccaatctgttcaagtggataagggaaggcttgaattacctgaagcagcaggtgggattgaaagtggcagccaacaccgcaatcacaggagcaaccaaaaccaaaatcacttatgattccaaaggcttggtcacggcgggggcggacttggcggctgcggacataccagagcttccgcagagcaagattacgaatcttacaaacgatttagcggcaaagcaaacgcaactcaatggcacaggctttgtcaaagcaagcggaacaacaataagctacgacgacaaatcttatctgcctttgactggcgggacattaaccggcgcactgacattgagcggcgcacctactgccgattcgcacgcagctacaaaggcttatgtggatgcggctattcaaggattggacataaaagcgagttgcaaagtggctacaacagcaaacataactctatcaggtacgcagacaatagacggcatagctgtagccgccaatgaccgcgtattggtaaaaaaccaaactaccgcatcgcagaacggtatttacacggtagcttctggttcgtggactagggcaactgacttcaacaccgcagcgaagattacatctggcgcattcacgttcatagagcaaggtactacgaatgcggatacgggctgggtattgaccacggacggaacaatacagtgggaacaaccgcgctcgcgttcacgcagttcagcgcggcgggggtcacttcggtgtctgccaatagtcccttga

SEQ ID NO: 74026 - protein, 320 aa, Unknown
  Obtained from environmental sample
  misc_feature (1)..(320): Xaa is any amino acid
MNYLKQQVGLKVAANTAITGATKTKITYDSKGLVTAGDDLAAADLPSITVAASTTNTDAGTAAKTDTIPNLFKWIREGLNYLKQQVGLKVAANTAITGATKTKITYDSKGLVTAGADLAAADIPELPQSKITNLTNDLAAKQTQLNGTGFVKASGTTISYDDKSYLPLTGGTLTGALTLSGAPTADSHAATKAYVDAAIQGLDIKASCKVATTANITLSGTQTIDGIAVAANDRVLVKNQTTASQNGIYTVASGSWTRATDFNTAAKITSGAFTFIEQGTTNADTGWVLTTDGTIQWEQPRSRSRSSARRGSLRCLPIVP

SEQ ID NO: 74027 - DNA, 567 bp, Unknown
  Obtained from environmental sample
  misc_feature (1)..(567): n is a, c, g, or t
atgagaaccgaagccgcccgttgcggcgaaagcctcgcccttgcggcggagggtaagcggatatgcctggtttccagcggcgattcggggatttacggcatggcgtccctggttctggaaatggcccccgattatcccgcagtatcggtagaaatactgccgggcgttaccgccgcgttaagcgggggtgcgcttctgggggcgcccctagggcatgatttcgcagtaataagcctgtcggatctccttaccccctgggaattgattgcgaaacgactgcaccaggcagcagcgggtgattttgccatctgcatttacaatcccgcaagccatagccgggcggattatcttcaaaaagccgcggcgattctcctggaaaccttgcctccggagcggatatgcggtcttacctggaacataggacgggagggagaaagcgcccggatatgccgcctggacaatcttggaaaagcggaggctgatatgtttactacggtgttcatagggaacagtaaaactgccgtgattaacggaaagatggttacccccaggggctatcatgaataa

SEQ ID NO: 74028 - protein, 188 aa, Unknown
  Obtained from environmental sample
  DOMAIN (1)...(156): Tetrapyrrole (Corrin/Porphyrin) Methylases
  misc_feature (1)..(188): Xaa is any amino acid
MRTEAARCGESLALAAEGKRICLVSSGDSGIYGMASLVLEMAPDYPAVSVEILPGVTAALSGGALLGAPLGHDFAVISLSDLLTPWELIAKRLHQAAAGDFAICIYNPASHSRADYLQKAAAILLETLPPERICGLTWNIGREGESARICRLDNLGKAEADMFTTVFIGNSKTAVINGKMVTPRGYHE

SEQ ID NO: 74029 - DNA, 750 bp, Unknown
  Obtained from environmental sample
  misc_feature (1)..(750): n is a, c, g, or t
atgcgaaaaccgcttatagctgcaaactggaagatgcaccttgatgttaaagaggcagcggaactggcggatgctgtttgccgcggcagtacggactattccaaaaccgatgtgatgcttgcgccaagttttacgaatatcgcggcagtgtcagcgtctgttaagtccgccggaaagccggttattgttgccgcccagaatgtttacaccgaagatagcggcgcgtttactggggaggtaagcatccctatgataaaaggcgcgggagccgacgcggtaatcctggggcactccgagcgcagaaatattttcagggagactgatgagtttattaaccttaaaacacataaatccattaaagcaggcctcatggttgtgctgtgtgtgggtgagcttttgcaggagagggaagcgggtgtggcgtttgaggtagttctggcgcagcttggcaaatcccttgcgggagtcagagatttaagcaaagtggttatcgcgtacgaacccgtatgggcaataggtactgggaaaacagcttctcctgaagacgcgcaggcaatgcacgcggaaatacgcgggtttattgcgcggatatacggcggcagcgccgcggaatcaatacgcgtattatacggtggcagcgtaaagcctgacaatatatcggatttgatgaaaaaagacgatatcgacggtgcccttgtaggaggcgcaagcctgaaagccgattcgtttttaaaaatcattaactattga

SEQ ID NO: 74030 - protein, 249 aa, Unknown
  Obtained from environmental sample
  DOMAIN (4)...(247): Triosephosphate isomerase
  misc_feature (1)..(249): Xaa is any amino acid
MRKPLIAANWKMHLDVKEAAELADAVCRGSTDYSKTDVMLAPSFTNIAAVSASVKSAGKPVIVAAQNVYTEDSGAFTGEVSIPMIKGAGADAVILGHSERRNIFRETDEFINLKTHKSIKAGLMVVLCVGELLQEREAGVAFEVVLAQLGKSLAGVRDLSKVVIAYEPVWAIGTGKTASPEDAQAMHAEIRGFIARIYGGSAAESIRVLYGGSVKPDNISDLMKKDDIDGALVGGASLKADSFLKIINY

SEQ ID NO: 74031 - DNA, 882 bp, Unknown
  Obtained from environmental sample
  misc_feature (1)..(882): n is a, c, g, or t
atgttccgctaccttcaggatcagggggcgtcatttcttgagctattgcaggggggggttgattttatgcagcttacacccgcccagtatgaaaaacagacagacacggaacggttcggcgcaatgtataataagtacaactatcttgccgactcatatacatatatcggatataaccttacccgcaagccgtttgatgacaaacttgtccgtcaggcgctcagctatgctaccccccggcaggagattatcgacagcgttttgcatgggcatggggttccggctacagggccttataaaccgggtacttattggcacaatcctgatgtgccggcttacgccgctgatgtggcaaaggcgcgggaacttcttgaagagtccggctggaaactgaatgaaaaaggtattttaacgaaagataaaaaacctttccgcattgagcttctgacaaaccaaagcaacactacgcgcatacagatagcggagatccttcagaaaagctggaaagagcttggcattgaagtatctatccgcgtggcggagtggggcgcgtttataagccagcatattgacaaacgtaattttgacgctgtcatactcggctggaatattgtgcttgatcctgacccgggcgatgtatggagttcatcttcgtgtacggataagaagtcgctgaattttgtctgttttaaaaatgaggaggctgacaggctgatgacggaggggacagcgactttcgatcctgtgaaacgcaaggcctgttacgacagatttcaggagatacttgcggaagaacagccttatacgttcctgtttgttcccgagtccctttcagccgtctcaaacaggttatgggggagagcctgcctcggccgattctga

SEQ ID NO: 74032 - protein, 293 aa, Unknown
  Obtained from environmental sample
  DOMAIN (2)...(224): Bacterial extracellular solute-binding proteins, family 5 Middle
  misc_feature (1)..(293): Xaa is any amino acid
MFRYLQDQGASFLELLQGGVDFMQLTPAQYEKQTDTERFGAMYNKYNYLADSYTYIGYNLTRKPFDDKLVRQALSYATPRQEIIDSVLHGHGVPATGPYKPGTYWHNPDVPAYAADVAKARELLEESGWKLNEKGILTKDKKPFRIELLTNQSNTTRIQIAEILQKSWKELGIEVSIRVAEWGAFISQHIDKRNFDAVILGWNIVLDPDPGDVWSSSSCTDKKSLNFVCFKNEEADRLMTEGTATFDPVKRKACYDRFQEILAEEQPYTFLFVPESLSAVSNRLWGRACLGRF

SEQ ID NO: 74033 - DNA, 879 bp, Unknown
  Obtained from environmental sample
  misc_feature (1)..(879): n is a, c, g, or t
ttggtttcccggacggacaaaacacttgtttggaaaaatgttaattattttgaaaatacatttgacgctgtaatggaaaaagggggcgcagcaccgggtatagatcggagtgttcaccgacaatcaccgaacgtatgtgttgatgggagtattgaaaaaaggtggataattgaagacggacgacgatttttactaaagggcagcaggtataaacgtatgcaagaaccatttaatgaaatgatagcgtctatgattttggatgaatataaaattaaacatgttggatataaattaggaaggacaaaggattatataccttatagcatctgtgaatgtatgtgcgatgcaaatacggaatttttaaatgcacaatggattatacaaaaggaaccgcaaggaatgaaagatatgtatgcccattttttagatatatgtaaaaaatacggaataccggatgtaaaagagcgaatggatgaaatgatgtggctggattttattattgggaacgaagatcgccatcgtgggaatttcggtattctgcggaattcagatacattgaaatgggaaagtgttgtaccgatttttgataatggcaactcattgttttttgataaaagcgatgatgaaattaccgaaaacggcatagattcattgggaaaggcttttggagacagcaacaggctcaatttaaaactgttggatgttcctatatggtatgacccgtcaaagaaggatacgattataggtatagtggctcaaggtctgcaaaacaacgaaagaataaaaatccaaaggattaatgatattattgaaatagtaaaagaacgtttttctgtttttgaaagaagtatacagagcaacgacttatttcatgcgtaa

SEQ ID NO: 74034 - protein, 292 aa, Unknown
  Obtained from environmental sample
  misc_feature (1)..(292): Xaa is any amino acid
MVSRTDKTLVWKNVNYFENTFDAVMEKGGAAPGIDRSVHRQSPNVCVDGSIEKRWIIEDGRRFLLKGSRYKRMQEPFNEMIASMILDEYKIKHVGYKLGRTKDYIPYSICECMCDANTEFLNAQWIIQKEPQGMKDMYAHFLDICKKYGIPDVKERMDEMMWLDFIIGNEDRHRGNFGILRNSDTLKWESVVPIFDNGNSLFFDKSDDEITENGIDSLGKAFGDSNRLNLKLLDVPIWYDPSKKDTIIGIVAQGLQNNERIKIQRINDIIEIVKERFSVFERSIQSNDLFHA

SEQ ID NO: 74035 - DNA, 900 bp, Unknown
  Obtained from environmental sample
  misc_feature (1)..(900): n is a, c, g, or t
atgacgagggcgatcagaattaacaatgatttagacgatgcttataatgcccgtggagtggcttattataataaaggcgatttagataatgcacttgaagactataataaggctattgccttaaaccctaaaaacaaacatgtctggattaatcgcggacttctctacatggacaaaagggattgggataaagctattgaggacttcaaccaagcaatcgccttaaatccaaaagaagctgaatattggtataggcgcggaaatgcatataataataaaggtgaattaaagcaggccattaaagactggactgaggcgatcaaaataaaacctgattttgtggaagcctatttcaatagaggaatggtttatggtttagaagaacattgggatcaatgtatccatgattgggaaatagttttaaaaattaaagctgataatcaaaatattaaagaatatctttcaaaagcttattacattcggggaaataatacaggtaataatggaaacattgatatagcaataaataattttaatagagcaatagagttaaaacctgactttgcagaagcgtattatgatcgaggtaaatgttattatataaaagaacaatgggatagatgtatatatgattggaataatgctttagaacttaaattggaagatccggaactaaaagatggtcttgcttctgcttataacagattgggagtcattgaaggcatcaatggtaaccatgatatggcaataatgaattttaatcaagcaatagaactaagaccaaattattatgatgcttggattaatcggggaaaagtttatagtaacaagaaggagttatatagggccattgaggactataaccatgcaattggtatagaacccaatcgcgttnnctag

SEQ ID NO: 74036 - protein, 299 aa, Unknown
  Obtained from environmental sample
  DOMAIN (230)...(263): Tetratricopeptide repeat
  misc_feature (1)..(299): Xaa is any amino acid
MTRAIRINNDLDDAYNARGVAYYNKGDLDNALEDYNKAIALNPKNKHVWINRGLLYMDKRDWDKAIEDFNQAIALNPKEAEYWYRRGNAYNNKGELKQAIKDWTEAIKIKPDFVEAYFNRGMVYGLEEHWDQCIHDWEIVLKIKADNQNIKEYLSKAYYIRGNNTGNNGNIDIAINNFNRAIELKPDFAEAYYDRGKCYYIKEQWDRCIYDWNNALELKLEDPELKDGLASAYNRLGVIEGINGNHDMAIMNFNQAIELRPNYYDAWINRGKVYSNKKELYRAIEDYNHAIGIEPNRVX

SEQ ID NO: 74037 - DNA, 726 bp, Unknown
  Obtained from environmental sample
  misc_feature (1)..(726): n is a, c, g, or t
gtggacgccggtactgccatcattaccgttaccacagttgaccaaggtaaaaccgttagctgctctgtagaggtaaaagaagccgacgctaataccgtgcgtgtaacaggcgttacccttaacaaggaatccgcttccctggctcttggcggtacggaaacccttacggcaaccattgaacccccagacgcaaccaataaaaccgttacatggaacagcagcgatacttcggtcgcgagagttaataacggcgttgtcaccgcgttgtcaggcggtgtcactacgatcactgttaccacccgagacggcggacacaccgccgagtgcgagataaccgtccaggttccggtaaacaatgttatccttagccagatatctttaatgatgaacgagggtaacgaaataacccttactgcaaccgtaatacccgcaaacgcgaccaataaggatgttacctggaagagcagcgatgagaatgtcgcgactgttgacgacggactggtatacgcggcgggtcccggtaatgccaccattaccgttaccacagttgacggcaataaaaccgctacctgcgctgtagaagtaagggatcttggctatattgagtcggatggaacagggacgctcaaatccctggggaaagccgcggaaggggcacaaacctattatatcgacttccagaatggaaatgacgcaaatgatggcaaaaccccccttgccccctga

SEQ ID NO: 74038 - protein, 241 aa, Unknown
  Obtained from environmental sample
  DOMAIN (34)...(111): Bacterial Ig-like domain (group 2)
  misc_feature (1)..(241): Xaa is any amino acid
MDAGTAIITVTTVDQGKTVSCSVEVKEADANTVRVTGVTLNKESASLALGGTETLTATIEPPDATNKTVTWNSSDTSVARVNNGVVTALSGGVTTITVTTRDGGHTAECEITVQVPVNNVILSQISLMMNEGNEITLTATVIPANATNKDVTWKSSDENVATVDDGLVYAAGPGNATITVTTVDGNKTATCAVEVRDLGYIESDGTGTLKSLGKAAEGAQTYYIDFQNGNDANDGKTPLAP

SEQ ID NO: 74039 - DNA, 570 bp, Unknown
  Obtained from environmental sample
  misc_feature (1)..(570): n is a, c, g, or t
ttgccgtcaactgtggtaacggtaatggtggcattaccgggacccgccgcgtataccagtccgtcgtcaacagtcgcgacattctcatcgctgctcttccaggtaacatccttattggtcgcgtttgcgggtattacggttgcagtaagggttatttcgttaccctcgttcatcattaaagatatctggctaaggataacattgtttaccggaacctggacggttatctcgcactcggcggtgtgtccgccgtctcgggtggtaacagtgatcgtagtgacaccgcctgacaacgcggtgacaacgccgttattaactctcgcgaccgaagtatcgctgctgttccatgtaacggttttattggttgcgtctgggggttcaatggttgccgtaagggtttccgtaccgccaagagccagggaagcggattccttgttaagggtaacgcctgttacacgcacggtattagcgtcggcttcttttacctctacagagcagctaacggttttaccttggtcaactgtggtaacggtaatgatggcagtaccggcgtccactatggtgagctga

SEQ ID NO: 74040 - protein, 189 aa, Unknown
  Obtained from environmental sample
  SIGNAL (1)...(19)
  misc_feature (1)..(189): Xaa is any amino acid
MPSTVVTVMVALPGPAAYTSPSSTVATFSSLLFQVTSLLVAFAGITVAVRVISLPSFIIKDIWLRITLFTGTWTVISHSAVCPPSRVVTVIVVTPPDNAVTTPLLTLATEVSLLFHVTVLLVASGGSMVAVRVSVPPRAREADSLLRVTPVTRTVLASASFTSTEQLTVLPWSTVVTVMMAVPASTMVS

SEQ ID NO: 74041 - DNA, 492 bp, Unknown
  Obtained from environmental sample
  misc_feature (1)..(492): n is a, c, g, or t
atgtcaaaattattcaaactcctcctcgctaccgccgccctactgacggcttttagcatttccgcgaaagcgcaaacaaacaacgaagaaaacatgaaacgtgtacacgaatttctaaaaagatgtggcgaatattatctcgccacggttgaaggcgaccaaccgagagtgcgtccgttcggaacggctgtcatttacgaaaacaagctttacatccaaaccggaaagcgcaagaatgtagccaaacaaatgatggctaaccccaaagtagagatttgcgcctacgataaatcgtccggaacatggctacgcatcgaagccactgttgttcccgacgaacgtgtagaagccaagcaatttatgcttgacgaacatccgtcgctcaaaagaatgtattccgctacggacgacaatacgtttgtgctttatttgaaaaacgccactgcgacgttttcaggttttaacggcgaaccggaaatcgttaaattttag

SEQ ID NO: 74042 - protein, 163 aa, Unknown
  Obtained from environmental sample
  SIGNAL (1)...(24)
  DOMAIN (32)...(116): Pyridoxamine 5'-phosphate oxidase
  misc_feature (1)..(163): Xaa is any amino acid
MSKLFKLLLATAALLTAFSISAKAQTNNEENMKRVHEFLKRCGEYYLATVEGDQPRVRPFGTAVIYENKLYIQTGKRKNVAKQMMANPKVEICAYDKSSGTWLRIEATVVPDERVEAKQFMLDEHPSLKRMYSATDDNTFVLYLKNATATFSGFNGEPEIVKF

SEQ ID NO: 74043 - DNA, 327 bp, Unknown
  Obtained from environmental sample
  misc_feature (1)..(327): n is a, c, g, or t
ttggacgttgacggacaaaccgcacaactgctcggcattatgctgtggtgtttcatcgaaggattttatcagcgcaaacacgaatatccctacaaagacaaagataaactgacgaaatacatcgttaccgttgaagaacacaatcaggaaatcgtattttacaaaagcaaaaacaccgaccgttggtggatggaaatccccggccacgaagacaaagccaagtttcaatcgcactatatgttgccttgtagttatgccgactacgaacaggccatgcggaacgaactccccgaccgttgggtagcggctttagcacggtttgtgtga

SEQ ID NO: 74044 - protein, 108 aa, Unknown
  Obtained from environmental sample
  misc_feature (1)..(108): Xaa is any amino acid
MDVDGQTAQLLGIMLWCFIEGFYQRKHEYPYKDKDKLTKYIVTVEEHNQEIVFYKSKNTDRWWMEIPGHEDKAKFQSHYMLPCSYADYEQAMRNELPDRWVAALARFV

SEQ ID NO: 74045 - DNA, 534 bp, Unknown
  Obtained from environmental sample
  misc_feature (1)..(534): n is a, c, g, or t
atgcagaaatttgtaacagccgaagaggccgtaaaagtgattaagagcaacgacattgtgcatattcacagtgttgctgctgctccgcaaaagttaattcaggcgatgtgcgaacgcggtcgtcgcaaggaatttaagaatgttcatgttcagcatcttcataccgagggcgatgcaccgtattcaagccctgagtttgaaggtatttttcaattggattcgtttttcgttgggcacaatgtgcgcaaagacacacaggccggttatgccgattatatccccgtatttttgcacgaaacgcagcggttaattcgcgaagggtatcgccgtccgaatgtaacgatgatacaggtttcgacacccgacaagcatggttatgtttcgatgggcacttccgtagatgccacattggctgctgttcaatgcgccgatancgtgattgggcgtatcaatccaaatgtgccgcgagcctttggcgatgncatgattaaactttcggaaatagatattttctgtgaagatatacacccttga

SEQ ID NO: 74046 - protein, 177 aa, Unknown
  Obtained from environmental sample
  misc_feature (1)..(177): Xaa is any amino acid
MQKFVTAEEAVKVIKSNDIVHIHSVAAAPQKLIQAMCERGRRKEFKNVHVQHLHTEGDAPYSSPEFEGIFQLDSFFVGHNVRKDTQAGYADYIPVFLHETQRLIREGYRRPNVTMIQVSTPDKHGYVSMGTSVDATLAAVQCADXVIGRINPNVPRAFGDXMIKLSEIDIFCEDIHP

SEQ ID NO: 74047 - DNA, 720 bp, Unknown
  Obtained from environmental sample
  misc_feature (1)..(720): n is a, c, g, or t
atgcggcagctccagatgaccgatttcagcacctacttcaagcatgtcatgggcgacaacaccggcgaggagatcatttttctcctggacgccttggccaccaacctgaccagcttcttccgcgaagaccagcatttcaccttcatggccaacaccatgctgccggccctggaggccaagtgccgggccaagggcaaccgccggctgcgcatctggagcgcggcctgctcctcgggcgaagagccctacaccatcggcatagtgatcctggaaaaaaacccctatttcgggcagggcggcgattgcaaaatcctggccaccgacatttccaccaaggtcctgggcgtggcccaaaagggcctctacggcccggaacggatgaaaaccgttccgcccatgctggtgaccaaatatttcaagaagacctccggggaaaaaggctccaccatgtaccaggtcgtcccccagctccgggatctcatcgccttccgccgcctgaacctgatggaccccctgcccttcaaaaatccactggacctcatcttttgccgcaatgtcatgatttatttcgataaagccaccataggccgccttataaacaaatactatcagatcctggcccccggcggctacctgttcataggccattccgaaagcctgtcgggtctatcgcacgaattcaagtacgtcaagccctgcatctaccagaagggagaatga

SEQ ID NO: 74048 - protein, 239 aa, Unknown
  Obtained from environmental sample
  DOMAIN (35)...(237): CheR methyltransferase, SAM binding domain
  misc_feature (1)..(239): Xaa is any amino acid
MRQLQMTDFSTYFKHVMGDNTGEEIIFLLDALATNLTSFFREDQHFTFMANTMLPALEAKCRAKGNRRLRIWSAACSSGEEPYTIGIVILEKNPYFGQGGDCKILATDISTKVLGVAQKGLYGPERMKTVPPMLVTKYFKKTSGEKGSTMYQVVPQLRDLIAFRRLNLMDPLPFKNPLDLIFCRNVMIYFDKATIGRLINKYYQILAPGGYLFIGHSESLSGLSHEFKYVKPCIYQKGE

SEQ ID NO: 74049 - DNA, 369 bp, Unknown
  Obtained from environmental sample
  misc_feature (1)..(369): n is a, c, g, or t
gtgagcgccgccggctgcaacgcctgcgaggcggactgcaatgtgctgaccacgccagttttcgaccttggccgattcggaattgattttgtggccgggccgcgccatgccgacggcatcgccgtgaccgggccggtgagcgagaacatgcgccaggccacgctggacacctttgaggctgtgccggatccgcgcctggtcatcgcggtgggtacttgcgccatttccggcggccttttccgggattccggggaatgtcacaagggcgtctccatgctgcccgtggatctgtatattcccggctgtccgccgcatccctggtccattctggacggcctgctggccttgcagggccggtctttgcgctga

SEQ ID NO: 74050 - protein, 122 aa, Unknown
  Obtained from environmental sample
  DOMAIN (11)...(117): NADH ubiquinone oxidoreductase, 20 Kd subunit
  misc_feature (1)..(122): Xaa is any amino acid
MSAAGCNACEADCNVLTTPVFDLGRFGIDFVAGPRHADGIAVTGPVSENMRQATLDTFEAVPDPRLVIAVGTCAISGGLFRDSGECHKGVSMLPVDLYIPGCPPHPWSILDGLLALQGRSLR

SEQ ID NO: 74051 - DNA, 603 bp, Unknown
  Obtained from environmental sample
  misc_feature (1)..(603): n is a, c, g, or t
ttgaggctgtgccggatccgcgcctggtcatcgcggtgggtacttgcgccatttccggcggccttttccgggattccggggaatgtcacaagggcgtctccatgctgcccgtggatctgtatattcccggctgtccgccgcatccctggtccattctggacggcctgctggccttgcagggccggtctttgcgctgacacggcggaaaggagacatggtgtgcggcgcttcatcctgcattatgtgtccgcattgttgatagccgttttgtcgctgtccgcctgccaatcgcgcgcctacaaacgtgctttgcgggtcaatccaagggaggcgctggccgaccggcaactgcaaacgcgcagatttgcagccggcgacaagcaggccatgttgcatgccgccacagccgtgctgctggatttaggcttcatgattgatgaaacggacatcacgctgggcatcctgatcggttcaaagcggcgtgatgcaaccacgttaatgggcgcaaccgcgttgacactccatttcattggtgaaacgctcaggacaatttccaacttttttgccatatttcgatttctcggcggaagggaggcgagataa

SEQ ID NO: 74052 - protein, 200 aa, Unknown
  Obtained from environmental sample
  misc_feature (1)..(200): Xaa is any amino acid
MRLCRIRAWSSRWVLAPFPAAFSGIPGNVTRASPCCPWICIFPAVRRIPGPFWTACWPCRAGLCADTAERRHGVRRFILHYVSALLIAVLSLSACQSRAYKRALRVNPREALADRQLQTRRFAAGDKQAMLHAATAVLLDLGFMIDETDITLGILIGSKRRDATTLMGATALTLHFIGETLRTISNFFAIFRFLGGREAR

SEQ ID NO: 74053 - DNA, 555 bp, Unknown
  Obtained from environmental sample
  misc_feature (1)..(555): n is a, c, g, or t
ttgcgccacgccaataccccgccctacccgaagtgcaacccggtacatcgcttagatagggacacatcgggcgcggtgctgttcgctaaagacgccgaacaaggagcggcgttaggaaacctattccgcgacaacttagtgaccaagagatacgccgcgttggtacgcggacacccggatattgaaacgcccttcagcatagataaaccgatagcgcccgatccgaacgcgaagataggcggttccccgtgcaagttcatgacagacgaaaacggcaagcccgcgtgtacgattattgaggaggcgaagcgttgctgcaacggatattcactgctgaccgtaagaccgctgaccggcagaacccaccaaatccgcgtacacctggcgtcgataggcctcccgatagccggagacaaaatttacggcggaaccgacgaagttcaacgccaagcgctgcactgcgagtcgctgtcattcatccacccgtatacaaacaccgaatgcgtcataacagcgccgttacctgaatggtggtttaattttttaatgttttaa

SEQ ID NO: 74054 - protein, 184 aa, Unknown
  Obtained from environmental sample
  DOMAIN (4)...(130): RNA pseudouridylate synthase
  misc_feature (1)..(184): Xaa is any amino acid
MRHANTPPYPKCNPVHRLDRDTSGAVLFAKDAEQGAALGNLFRDNLVTKRYAALVRGHPDIETPFSIDKPIAPDPNAKIGGSPCKFMTDENGKPACTIIEEAKRCCNGYSLLTVRPLTGRTHQIRVHLASIGLPIAGDKIYGGTDEVQRQALHCESLSFIHPYTNTECVITAPLPEWWFNFLMF

SEQ ID NO: 74055 - DNA, 405 bp, Unknown
  Obtained from environmental sample
  misc_feature (1)..(405): n is a, c, g, or t
gtggtgtgggaactcctcacgaacgcgatgttctacggcatcgcccaagagaaccccgagaacaggcagcattgggacttcgacttcgagctgccggagaacgtagccgttgaaacggccgtggccgtggataccgagaagtacgcggtctccatcatagacaagggcgggcggcttaagaagcaagacgttttatattggctccaccgccaaatagcgcgcaacgacaacggatacccattgggactgtttgatacgcacgggcgcggtctgttcattgcccgcagatacatcgataggttgattgtaaacataaatcgggacaagcagacggagcttataatcatcaactatttgaatcaggattattcgggatctaagcctatttatattaatgagatttaa

SEQ ID NO: 74056 - protein, 134 aa, Unknown
  Obtained from environmental sample
  misc_feature (1)..(134): Xaa is any amino acid
MVWELLTNAMFYGIAQENPENRQHWDFDFELPENVAVETAVAVDTEKYAVSIIDKGGRLKKQDVLYWLHRQIARNDNGYPLGLFDTHGRGLFIARRYIDRLIVNINRDKQTELIIINYLNQDYSGSKPIYINEI

SEQ ID NO: 74057 - DNA, 627 bp, Unknown
  Obtained from environmental sample
  misc_feature (1)..(627): n is a, c, g, or t
gtgatggcggtggacaggcaacgtattgacgagctcggcatcaattacgtggaaaggctcacgctttatgaggaatattcctcgcgtattcgcaacttggttcaggaccttgttgagcgggaagacatcgaaatatgcagtattgatggttgggctaaggcccccgccgagctggtgaaatctttgaatgtccatcatgagacggccgacgactcgtccgagcttgagtcgatcccagacctggtgacggtgagagtgcttttgcgtttccccgaggacgtatacaaggcagaggaaatcatctgctcagagttcaaggtggatctcgaaaactccgttccgtcaagcaggctggatgatccctttcggtacggctatccatctgtgttatactccctgtcccttttggagagccgcgcctccctgagggagtggcgcaaatacaaggacttgtccttccgcctggagctgcgcacggtgctgcaggaggcgtgggccaccatttccccgcgtgtcatgatgaacgtggactccgtctcgaaaaaaaactcaagcgcaggctgtttcgcctggcggcgcttattgaggaagccgacgaggggtttctgtctctgtggggtgaagtga

SEQ ID NO: 74058 - protein, 208 aa, Unknown
  Obtained from environmental sample
  misc_feature (1)..(208): Xaa is any amino acid
MMAVDRQRIDELGINYVERLTLYEEYSSRIRNLVQDLVEREDIEICSIDGWAKAPAELVKSLNVHHETADDSSELESIPDLVTVRVLLRFPEDVYKAEEIICSEFKVDLENSVPSSRLDDPFRYGYPSVLYSLSLLESRASLREWRKYKDLSFRLELRTVLQEAWATISPRVMMNVDSVSKKNSSAGCFAWRRLLRKPTRGFCLCGVK

SEQ ID NO: 74059 - DNA, 504 bp, Unknown
  Obtained from environmental sample
  misc_feature (1)..(504): n is a, c, g, or t
atgaaacagtcgcttcaaaatcttgactgcncatgttttgcttgccggggatattcctctacatcggcaatgagggaagcggctntaagatttattgaaaagacggaacaaggcagggaaaatataattttctatctgggggatcatgatccgagcgggcaagacatgacgcgggatataagtgatcggcttaattcattatttcgtgcgaccgtaaaggtagaacgtatcgcattgaacagggatcaagtggaactatatgacctgccaccgcagccgttaaaaaccaatgaaaaaggcgagcttacagatacccgcgccccaggatacataaaagagcatggaaaatcatcatgggaacttgacgcgttaagaccggaaatactggacgggcttataacggacgctataaaaaacaacctagaccaaaaaaaatataataaggcattaagcaggcaaaaaagggaaaggcaacaaatacttaaacttatagattctctttag

SEQ ID NO: 74060 - protein, 167 aa, Unknown
  Obtained from environmental sample
  misc_feature (1)..(167): Xaa is any amino acid
MKQSLQNLDCXCFACRGYSSTSAMREAAXRFIEKTEQGRENIIFYLGDHDPSGQDMTRDISDRLNSLFRATVKVERIALNRDQVELYDLPPQPLKTNEKGELTDTRAPGYIKEHGKSSWELDALRPEILDGLITDAIKNNLDQKKYNKALSRQKRERQQILKLIDSL

SEQ ID NO: 74061 - DNA, 873 bp, Unknown
  Obtained from environmental sample
  misc_feature (1)..(873): n is a, c, g, or t
gtgatgtgtcagatcngccgagcggcacnagaaccgataagccccgtgaaggaggaatccgtcgcggccctattaaccgaatacgcaatagaggacgccaaaacccccgttcaattcaccccgaccgcgcgcgctcgcaacccgaaacccaaatccgtcgccgacggccaaacctctatcggcagcatcatggagcaggcaaagccccaccacgtctatcgccccgcccgctataaccggccgaacctgaaccttataacctcggaaagcacaagccttcaagaattccaaattgacgccgaacttaaaaagggaatgttggacgcgaaacttaaagaattcaacgtcaacgccaaggtcggcgaaaccacggtcgcgcccgcaatcacgcggtttgaaatcgtgcttggacttggcacccgcgcgaacgacgtgtaccggttggaaaatgactttcaggtaatcttgggcaccgaaaacatccgcatgaccgccggcaaaaacgcgattgggatagaggtccccaacaagtccgtcggcaaagtctctatccgcgacatcttgacatccaaggaatggcagggctctaaatcccccctgacagtcgctattggcaaaaacatcaccaacgaaattgtaatcggcgacataggcgcgatgccgcacatgttgattgcggggtcaacgggctctggtaaatctgtttgcatcaacaccatattgacgtcgcttgtctaccgcgccgaccccgccgacgtgaaacttcttttggtcgacatgaaacttgtggagcttggaatgtacaatgaaatctcgcatatgcttatcccgcggtcaatcggcgaagtccaaccacgcaatccatgcccctga

SEQ ID NO: 74062 - protein, 290 aa, Unknown
  Obtained from environmental sample
  DOMAIN (183)...(290): FtsK/SpoIIIE family
  misc_feature (1)..(290): Xaa is any amino acid
MMCQIXRAAXEPISPVKEESVAALLTEYAIEDAKTPVQFTPTARARNPKPKSVADGQTSIGSIMEQAKPHHVYRPARYNRPNLNLITSESTSLQEFQIDAELKKGMLDAKLKEFNVNAKVGETTVAPAITRFEIVLGLGTRANDVYRLENDFQVILGTENIRMTAGKNAIGIEVPNKSVGKVSIRDILTSKEWQGSKSPLTVAIGKNITNEIVIGDIGAMPHMLIAGSTGSGKSVCINTILTSLVYRADPADVKLLLVDMKLVELGMYNEISHMLIPRSIGEVQPRNPCP

SEQ ID NO: 74063 - DNA, 786 bp, Unknown
  Obtained from environmental sample
  misc_feature (1)..(786): n is a, c, g, or t
atgactatgacaataaaactttttgcagcgattgctgccgtagtccttttgggtgcttgctcatcgggcgaaaaaaagcaggaagtacaggcgctcaaggtgtcggagaaccgccgctttttggttaccgccgatggtaaaccctttatgtggctaggcgatacaggttggctgctgcacaagctcaaccgcgagcaaacggagcagtatctggaaaaccgccgtcagctggggtttaacgtgatacaaacctcagtgctgcactccctcaacgtaaaaaatgcctatggatgcaaggcggtagttgacggtgatgcctcgcgcccgttggttactccgggcaacgaccccgcagactcggcgcagtacgactactgggaccaccttgactatgcggttgaccttgctgcctctaagggcatgtacgttggtattgtgccggtgtggggcgacaatgttaaggcaggcagggtgagccgtgagcaggctgcagcatacgccaaattccttgccgagcgttacgccaaccgcaacaacgtggtgtggctcaacggcggcgatattgtgcctaccgattctatggaaacgtggaatattataggcaatacgctgcgcgagtacgcgcccaaccacctcattacgtttcacccctttgggcgttcgcgttcaagccaatggtttcacaacgcgccgtggttggatttcaacatggtgcaatcgggacaccgcacctacgagcaagaccccaacggtattgggcaggacactggcggcacattgctatga

SEQ ID NO: 74064 - protein, 261 aa, Unknown
  Obtained from environmental sample
  SIGNAL (1)...(22)
  misc_feature (1)..(261): Xaa is any amino acid
MTMTIKLFAAIAAVVLLGACSSGEKKQEVQALKVSENRRFLVTADGKPFMWLGDTGWLLHKLNREQTEQYLENRRQLGFNVIQTSVLHSLNVKNAYGCKAVVDGDASRPLVTPGNDPADSAQYDYWDHLDYAVDLAASKGMYVGIVPVWGDNVKAGRVSREQAAAYAKFLAERYANRNNVVWLNGGDIVPTDSMETWNIIGNTLREYAPNHLITFHPFGRSRSSQWFHNAPWLDFNMVQSGHRTYEQDPNGIGQDTGGTLL

SEQ ID NO: 74065 - DNA, 906 bp, Unknown
  Obtained from environmental sample
  misc_feature (1)..(906): n is a, c, g, or t
atggatctcacagatgcagtaaaatggattaacaccaatgctgcttatcgaggcaactatgttattgtcattggacaaaatgaaatagtctcgcctttattattatcgactggcaacagacgtgtaaacgtaacacttagaagtaatggcccagaacgcaatataacttttgacacgccaagtcgcccttcagcatctctttttaccattggaaatggcgttacttttactcttgaagatggaataattctggtaggtttgcatgttgacagccggccaatggttagagttagcggcggtgtttttgtaatgaacggcggaaccataaaagataattttttacctatgagaacgatgactattagttcttcatgggatgtgaaggataatgtaggcggtggtgtatctatagaaaatggtagctttgtaatgcataacgggaccatcagtggcaattttgctacttcgggaggtggtgtatctgtaggagaagatgcagttttcattcttaatggcggtactatcaacggaaatatagcttgttatggtggtggtatttctagtagcggtaatttcacaatgcgtggcgggataattagtaataattctgcaagagatggttatctttcttccggtggtggtgttgtaatttatgctgggatatttactatggagagtggtattatcagaggaaattacggtgctgtaggtggtggtgtgagcattcaaagctatgggaaatttaacgtcaactttattaaatcaggcggtactatttttggttctgatgcgtctgaaggtcagtcaaaccttacttttggcggtgtcggagatgctgtactgtttaggacttgggatgattggttttggatacgaaacactaccgccggagaaattcgtgtatga

SEQ ID NO: 74066 - protein, 301 aa, Unknown
  Obtained from environmental sample
  misc_feature (1)..(301): Xaa is any amino acid
MDLTDAVKWINTNAAYRGNYVIVIGQNEIVSPLLLSTGNRRVNVTLRSNGPERNITFDTPSRPSASLFTIGNGVTFTLEDGIILVGLHVDSRPMVRVSGGVFVMNGGTIKDNFLPMRTMTISSSWDVKDNVGGGVSIENGSFVMHNGTISGNFATSGGGVSVGEDAVFILNGGTINGNIACYGGGISSSGNFTMRGGIISNNSARDGYLSSGGGVVIYAGIFTMESGIIRGNYGAVGGGVSIQSYGKFNVNFIKSGGTIFGSDASEGQSNLTFGGVGDAVLFRTWDDWFWIRNTTAGEIRV

SEQ ID NO: 74067 - DNA, 696 bp, Unknown
  Obtained from environmental sample
  misc_feature (1)..(696): n is a, c, g, or t
atgttattatcggattaccagcaacaagctaatcaatttatatcggcacttgtagaaatacaagcggaatttgatagtaattttgaaactattcaccaaaaaatattgaacacaaatgaaaaaaaatgtattgtctcaataaatacacataaatcgcaattgtctaatattgttcaaaagattaaagaaaataatattgtttttgaggaattaaatacaaacaaaaaggtattagtacgagaaatttggacatacatggcagcgggttgtcatgatgaaattttaaaattagagcagcggaaagtaaagtatcaaagaattgaattgatggccgataatttgatacataaaaataatatgaaaattgctgcttcaagacaaaagattgaacaattaagagggaaaactgtaaccacaaaagaagctgtggataatatcaatattattttgaagaacgcagggtttgaaggttttgaaattaaagaaacagtacttagtgagaacaatatttcacaatattatctaaatagaccaaacaagccatgcgatgagcatgtatttaaaaaattaagtgagggtgagaaaaattttgtttcgtttttatatttttatcaactttgtataggcacagatgatattttgcataatagtatcaaaaagaaaattattgttattgacgacccagtatctagttaa

SEQ ID NO: 74068 - protein, 231 aa, Unknown
  Obtained from environmental sample
  misc_feature (1)..(231): Xaa is any amino acid
MLLSDYQQQANQFISALVEIQAEFDSNFETIHQKILNTNEKKCIVSINTHKSQLSNIVQKIKENNIVFEELNTNKKVLVREIWTYMAAGCHDEILKLEQRKVKYQRIELMADNLIHKNNMKIAASRQKIEQLRGKTVTTKEAVDNINIILKNAGFEGFEIKETVLSENNISQYYLNRPNKPCDEHVFKKLSEGEKNFVSFLYFYQLCIGTDDILHNSIKKKIIVIDDPVSS

SEQ ID NO: 74069 - DNA, 624 bp, Unknown
  Obtained from environmental sample
  misc_feature (1)..(624): n is a, c, g, or t
ttgcacaatactgcaaaccctaaggacactttttttataagcggtagctccaacctgacggaggccggtatagggcagaggaaaacaagcaacaacgcggaactgaatattgtggataccgggatgaactcccagtataaagaattaaaggaatggtttgacaagttatggaaaaacagcgcgaaggaggacaagaccgtagtgcatccgggcggcaaagaggttaaaacaaattttaaaaagtatctgatagaggaaatatcgaaaatatttaagatatacacaccggacgatatttacctgaagattttgacggagatggatttgtgcgcggatactgaaatggtcgataagtcgctacggaattctaaggtatataacgcgttgtacgatttccaaaaggctggcgttgtaagtttggtgcggacgttgaacgaaaacaacggagctattcttgccgacgccgtagggcttggtaaaacatggacagcattggcggtcattaaattctatcaaaaaaacggctatgatactgtagtgatttgcccaaaaaagttaaaatacaattggctcaagtggacaaaaaggtttcatccaaattcagacggacggttctcggcctaa

SEQ ID NO: 74070 - protein, 207 aa, Unknown
  Obtained from environmental sample
  misc_feature (1)..(207): Xaa is any amino acid
MHNTANPKDTFFISGSSNLTEAGIGQRKTSNNAELNIVDTGMNSQYKELKEWFDKLWKNSAKEDKTVVHPGGKEVKTNFKKYLIEEISKIFKIYTPDDIYLKILTEMDLCADTEMVDKSLRNSKVYNALYDFQKAGVVSLVRTLNENNGAILADAVGLGKTWTALAVIKFYQKNGYDTVVICPKKLKYNWLKWTKRFHPNSDGRFSA

SEQ ID NO: 74071 - DNA, 888 bp, Unknown
  Obtained from environmental sample
  misc_feature (1)..(888): n is a, c, g, or t
atggttgatactgacgaggaaataaccggatacggtctgatttatttcggcagaatcgaagcgggtatggaaaccgtgaaattgatcgttgaaagagtactagccccggtgatcatgggccaggaaccccattttgtccgcaaaatccgaaacgaaatgtgtgtggcaactgaatattttggcactgcgggggtggcgaattttgccatatccgcgatagattgcgccctctgggatatcatgggaaaaaaagccgggcttcctgtggcaaaactgctgggcgtccgttgggaagctattccggcctacgccatggtgggctggtattttgagggcggcgccggggagtttatgaagcactgtactgaggcggtggaagaaggtttccgggccctcaaaattaaagtagggaaggggcccctcaaagacgatatcgaaaggatacggctgatacataaagaattcggggacgatttcagggttatggtggacgccaactgtatctttgacgaagccgaggcgagctaccgcggaaaagcctatgatgatgagaacgtgtactggtttgaagagcccctgcagccctatatgagggacgcccacgcacggctggcacagcggatcaaaacccccatcgccatcggggaaaactactatacaaggcaccagttctacgatgtgatcaaagccggctgcgccggcatagtccaggtagaccgccggcgcgccggcggccccacggagtggcttgacattgccgccatatccgaagccgcgggcctgaaactggcgagccacggcggcggccccatagaggtaaatatcctctgcgccctggaaaacgccatctacctgaaacagggagcctcaaaaacggggacaatataa

SEQ ID NO: 74072 - protein, 295 aa, Unknown
  Obtained from environmental sample
  DOMAIN (6)...(94): Mandelate racemase / muconate lactonizing enzyme, N-terminal domain
  misc_feature (1)..(295): Xaa is any amino acid
MVDTDEEITGYGLIYFGRIEAGMETVKLIVERVLAPVIMGQEPHFVRKIRNEMCVATEYFGTAGVANFAISAIDCALWDIMGKKAGLPVAKLLGVRWEAIPAYAMVGWYFEGGAGEFMKHCTEAVEEGFRALKIKVGKGPLKDDIERIRLIHKEFGDDFRVMVDANCIFDEAEASYRGKAYDDENVYWFEEPLQPYMRDAHARLAQRIKTPIAIGENYYTRHQFYDVIKAGCAGIVQVDRRRAGGPTEWLDIAAISEAAGLKLASHGGGPIEVNILCALENAIYLKQGASKTGTI

SEQ ID NO: 74073 - DNA, 540 bp, Unknown
  Obtained from environmental sample
  misc_feature (1)..(540): n is a, c, g, or t
atgtgtaatcctccaggtggtgattggagtggtttatcaatttacttaaataattgtgaataccgttggttgtcattgcctcgcattagtaatagcaaacgtcctgaccatgtttcggaaatgtttattgcgaatactaaaccaattctttttattattgagtcaaaagaattcggaaaagatctagaaaaaaatataggagaacgattaaaagcctatattgtttggttgatgagatttccgccaagtgcatataaaagtaaaaaaaatggtgaatggaaggatactaatgagatcataaatatagaagattttgaaatggtttctgtcggagcatatattaatgatacaagatataataattccgagatacttcaaaaaagcaagtgcgatttgctttttttgcttacaccaaataaaatatcaaacacttgggaaattgaaattaaaccgaatcccgcttctaaaaaatcaaaagaaataaaaatgatattacttcatcactggaaaagagaaaaaagtacaatacaaatcagatag

SEQ ID NO: 74074 - protein, 179 aa, Unknown
  Obtained from environmental sample
  misc_feature (1)..(179): Xaa is any amino acid
MCNPPGGDWSGLSIYLNNCEYRWLSLPRISNSKRPDHVSEMFIANTKPILFIIESKEFGKDLEKNIGERLKAYIVWLMRFPPSAYKSKKNGEWKDTNEIINIEDFEMVSVGAYINDTRYNNSEILQKSKCDLLFLLTPNKISNTWEIEIKPNPASKKSKEIKMILLHHWKREKSTIQIR

SEQ ID NO: 74075 - DNA, 528 bp, Unknown
  Obtained from environmental sample
  misc_feature (1)..(528): n is a, c, g, or t
atgaaattggattatggcacataccttgacaaggtacttggctgctggcttggtaagtgcatttccggaactataggcgctccctgtgaagggcgaaaagaactatttgattttaagtttgaccccaaatcaatcgaagaaatgctgcccaatgatgacctggatcttcaggttttatggcttgaggttatggagaagaagggaatttattttacttccgaggatttggccgacgcgtttctgaaccagtgtccatacgcgcccggtgaatatcagatatttaagaaaaattatgcgaaaggtatacggccgccatattcaggtacttttaacaacagcattttttatgatggtaatggctgcccaatccggtcggaaatatgggcttgtgtagcgccggggaatccgaaattagccgcgtcccttgcatggaaagatggtattatagatcatggtaatgaatctgtgaatgccgaggcttttctggcttccctggagcagtcgcttttttttgaagcgatatattaa

SEQ ID NO: 74076 - protein, 175 aa, Unknown
  Obtained from environmental sample
  misc_feature (1)..(175): Xaa is any amino acid
MKLDYGTYLDKVLGCWLGKCISGTIGAPCEGRKELFDFKFDPKSIEEMLPNDDLDLQVLWLEVMEKKGIYFTSEDLADAFLNQCPYAPGEYQIFKKNYAKGIRPPYSGTFNNSIFYDGNGCPIRSEIWACVAPGNPKLAASLAWKDGIIDHGNESVNAEAFLASLEQSLFFEAIY

SEQ ID NO: 74077 - DNA, 846 bp, Unknown
  Obtained from environmental sample
  misc_feature (1)..(846): n is a, c, g, or t
atggacgcctgcccattccccggcattccggcctacctgaacaaacagccgcctgaaaccataggtatcgccggagcgcgtgttacccatgtccactgcgacaaccgcgcggacgcggaggatgtttcatgctgttcgcttgtgccgaatattgtggaaaagccggaagatatgattggaaaagtggatgccgtcatctgcgcgacagatatcggaaacgagcatgtggcgcgatgccgtccctttatggaagccggtgtccctatgttcatcgacaagcccatgacagataacgaggatgatctgcgtacctttgtaaaatggtatgaggaggggaagcgtttcctttcgtcttcatcaatgcgttatgtgaaatccatggagccgttttacataaaccattacgaaatcggccggctcatgtatgtgtgccagccaatgtgcaagaaatgggagacctacggcatacacgcccttgaggaagtttttccgcttcttggagaaggctttgtttccatacagaacaccggtacctgcgagcgcaacatgatccacataacccatgcatccggctgcgatgtgcacattccactcagtgccggtatgtacggcgctttcggctgtacgatgctgattggaagcgctggcaacaagctcatcaccgacagcgattcatactattcattcaaaaaacaaaacgaagtatttatcaattaccttcgtacaggggaacgtccttttcccttttccgaaaccattgagcttgccaagctggtaataggcggaatactaagcagggaagagaaaggacgccgtgtattgctttcggaaataaatgaaaggtaa

SEQ ID NO: 74078 - protein, 281 aa, Unknown
  Obtained from environmental sample
  misc_feature (1)..(281): Xaa is any amino acid
MDACPFPGIPAYLNKQPPETIGIAGARVTHVHCDNRADAEDVSCCSLVPNIVEKPEDMIGKVDAVICATDIGNEHVARCRPFMEAGVPMFIDKPMTDNEDDLRTFVKWYEEGKRFLSSSSMRYVKSMEPFYINHYEIGRLMYVCQPMCKKWETYGIHALEEVFPLLGEGFVSIQNTGTCERNMIHITHASGCDVHIPLSAGMYGAFGCTMLIGSAGNKLITDSDSYYSFKKQNEVFINYLRTGERPFPFSETIELAKLVIGGILSREEKGRRVLLSEINER

SEQ ID NO: 74079 - DNA, 669 bp, Unknown
  Obtained from environmental sample
  misc_feature (1)..(669): n is a, c, g, or t
atggctggcagaccgccaaaattaggtctggactgggccgggtggaatgttgatttgtttgataacgacccgaagattgataagttattaagcgcgcaaggttgtatggggtttacgatttatttctttttgtgtcaaaaaatttacggttctcatggctattattactcatggagctacgccgacgcgcctattacggcaagtaaactaggcggcggcgcaagcgcgaattctgttgaagagacagtaagatactgcttgcggattagtctttttgacgaaaggctgttcgtggagtggaacatcttaacgagtagaggcatccagaaaaggtaccgtcaggctgcccttgccagaaccgataaatcaataatcgcggaatactggctgttaaacgcaagcgaaacagccggtctgttcccgcattccctaaagcctgattccggcccggttatccttactcaggagaggaaaggagaggataggaaaggagaggaaaataaaggaaaggagagtaaagaaaagatttttttaaaatcctctccttttttaacagaagaggaaagtaaaggagaggaaacaaaaagagtaccaatgccggaacaggtgaaaggttttcttaaccagttaaaaaacaatttgccggtgatgccgaagaaagaaggttaa

SEQ ID NO: 74080 - protein, 222 aa, Unknown
  Obtained from environmental sample
  misc_feature (1)..(222): Xaa is any amino acid
MAGRPPKLGLDWAGWNVDLFDNDPKIDKLLSAQGCMGFTIYFFLCQKIYGSHGYYYSWSYADAPITASKLGGGASANSVEETVRYCLRISLFDERLFVEWNILTSRGIQKRYRQAALARTDKSIIAEYWLLNASETAGLFPHSLKPDSGPVILTQERKGEDRKGEENKGKESKEKIFLKSSPFLTEEESKGEETKRVPMPEQVKGFLNQLKNNLPVMPKKEG

SEQ ID NO: 74081 - DNA, 504 bp, Unknown
  Obtained from environmental sample
  misc_feature (1)..(504): n is a, c, g, or t
atgtaccctcgatatccagtacgatataatgatacttatattacctggcaatttgaagcgcacagagaaataaccgaaacaatttttattccatcagaccagcaaggtttaataattcacgtcggcgccaataccgaccaacaattactcttgcctttgccggtggacatgcgatgcgacgcgctggggctgactgacggacagcccattgtcatcccacgcgaagcagccaataaatccattgacctgcttgaccttgccaccgtcaaagtcagtatggagcgggctaaaatcggggcgtaccaaaaccgattagaacatattatggataatttgggcgtttacgacgtcaacatttcctccgccgaaagccgcctgcgcgatttgaacgtagcggccgaaatgaaagaattagtccggcaccaaaccattttcgaagcttcgcaggcgatgattgttcaagccaatagtgttttgcaaaatgttttgacctttttaaaataa

SEQ ID NO: 74082 - protein, 167 aa, Unknown
  Obtained from environmental sample
  DOMAIN (74)...(145): Bacterial flagellin C-terminus
  misc_feature (1)..(167): Xaa is any amino acid
MYPRYPVRYNDTYITWQFEAHREITETIFIPSDQQGLIIHVGANTDQQLLLPLPVDMRCDALGLTDGQPIVIPREAANKSIDLLDLATVKVSMERAKIGAYQNRLEHIMDNLGVYDVNISSAESRLRDLNVAAEMKELVRHQTIFEASQAMIVQANSVLQNVLTFLK

SEQ ID NO: 74083 - DNA, 705 bp, Unknown
  Obtained from environmental sample
  misc_feature (1)..(705): n is a, c, g, or t
atgaatgatttgattgcgaccagggatagctatggtgtcgcccttgcagaacttggcgcgatgcatgacaatctcgttgtactggatgccgatttagcgtccgccaccaaaacaagcgtgttcagaaagcaatttcctgacaggcattttaactgtggtattgcagaggccaacatgatggatgtggcggcgggtatgagtactttaggtcttgtgccctttgtgtctacttttgccatgttcgccgcaggacgcgcttttgagcaagtgcgtaacactatcgggtatccgaaactgaatgtgaaaatcggtgcaacacatggtggtatttccgtgggcgaggatggagcaagtcatcaatgctgtgaagatttcgccttgatgcgtgcaattcccggcatggttgtactttctccaggtgatgatattgaggcaagggctatcgttaaagctgcttatgcgattgagggtccggtttatatgcgttttgggcgattacctattcctgtttttcatgacaaggattttaaatttgaaataggaaaaggcgagcaactaacggatggtaatgatgtagccattatcgctaccggattgatggtgtcagaatctttggaagcggctaanaccctgaaagagaaaggcatatctgcacaagtaattaatatttgtaccattaaaccccttgatgagggaatattctga

SEQ ID NO: 74084 - protein, 234 aa, Unknown
  Obtained from environmental sample
  DOMAIN (5)...(170): Transketolase, pyridine binding domain
  misc_feature (1)..(234): Xaa is any amino acid
MNDLIATRDSYGVALAELGAMHDNLVVLDADLASATKTSVFRKQFPDRHFNCGIAEANMMDVAAGMSTLGLVPFVSTFAMFAAGRAFEQVRNTIGYPKLNVKIGATHGGISVGEDGASHQCCEDFALMRAIPGMVVLSPGDDIEARAIVKAAYAIEGPVYMRFGRLPIPVFHDKDFKFEIGKGEQLTDGNDVAIIATGLMVSESLEAAXTLKEKGISAQVINICTIKPLDEGIF

SEQ ID NO: 74085 - DNA, 903 bp, Unknown
  Obtained from environmental sample
  misc_feature (1)..(903): n is a, c, g, or t
ttgcgctgcttgagttttgatgataaatatgaagactacgttcagaaaatcaaaagtaatattggaaatgattcttatgatcaaaaattgttagaacgttggattaaaattgtaaagccagaatatgggcaaaacccagacgttggtgaactattgattcgctcgcacaggattgtaggcgccacatgcattggcctagccaaaaaaaagatagggttggagaggcttatctttgatttaacaataatagatgaggcgggaaaggcattgcctgccgagttgcttgtaccctttattcgttcaaagaaagtcattataatcggagaccataaacagttgccacctacgattgacgtagcacttatggatgatgaaaaaatagagattgaagatagggatatttacaaggatgaattgtttgatatcagttttttctcgagactttgggacaaagcacctgattcaaataaaactgttttaacgacacagtatagaatgccatccgttatcggaaacatgataagcaagttattttatgatggaattgttcggaatggcactggaaccgatgaaaaatacaccctattgccagatttattgcccactaacatcgtattcgtagatatgtcaaatgataaaacttatagagaaagcgacaaaaacggcgttattaacaagcgagaagcagttgccgtgagcatggttatcaatgaaataagaaaaagctgcaaggagcggattgctgttataactccatatcggcaacaaagacgcgagttattaaaatccataagagattattgtcctaggaaatttgttaatatcgacgtgcatacagttgatgcttttcaaggagatgaagcggagattgtatatanttgcacacgcgtttcacaaaaatga

SEQ ID NO: 74086 - protein, 300 aa, Unknown
  Obtained from environmental sample
  misc_feature (1)..(300): Xaa is any amino acid
MRCLSFDDKYEDYVQKIKSNIGNDSYDQKLLERWIKIVKPEYGQNPDVGELLIRSHRIVGATCIGLAKKKIGLERLIFDLTIIDEAGKALPAELLVPFIRSKKVIIIGDHKQLPPTIDVALMDDEKIEIEDRDIYKDELFDISFFSRLWDKAPDSNKTVLTTQYRMPSVIGNMISKLFYDGIVRNGTGTDEKYTLLPDLLPTNIVFVDMSNDKTYRESDKNGVINKREAVAVSMVINEIRKSCKERIAVITPYRQQRRELLKSIRDYCPRKFVNIDVHTVDAFQGDEAEIVYXCTRVSQK

SEQ ID NO: 74087 - DNA, 594 bp, Unknown
  Obtained from environmental sample
  misc_feature (1)..(594): n is a, c, g, or t
atgtccgtagaccgtaccggcagcatgggcaagcgcgactacgctattctaattcttgccgcctacctgggcctgcgcagttccgacattgtaagcctctcgttcgacgacatagactatgcggcaaaaacaattaaaattatccaagccaaaacagcgcgcccgctgacactcgttatgaacggcgaggtggaagaggcaatcgccgattatatcaggggcggcaggccccaatcatcaagcggcaggatatttctaggttcccaggcgccataccagccgctttctgcaggggcgggctatgcgatcgcaataaagtatttcaacctcggcgggattaaggcgcaggggcgaagacgcgggacgcacgcgttgcgggcaagctacgcgacagcgcttgtggcaaaaggcgtgccatacgcggcggtaaaggaagccctggggcacgaagaccaggaatcggccaaatactatgtccgagtggatgtcaggcgtttaagggcatgcgccctggacgttccaaaaccgataggcgcttttgcagtgatgctagaacctaatgttcgcgccgatctggaaggggcgttgccatga

SEQ ID NO: 74088 - protein, 197 aa, Unknown
  Obtained from environmental sample
  DOMAIN (1)...(168): Phage integrase family
  misc_feature (1)..(197): Xaa is any amino acid
MSVDRTGSMGKRDYAILILAAYLGLRSSDIVSLSFDDIDYAAKTIKIIQAKTARPLTLVMNGEVEEAIADYIRGGRPQSSSGRIFLGSQAPYQPLSAGAGYAIAIKYFNLGGIKAQGRRRGTHALRASYATALVAKGVPYAAVKEALGHEDQESAKYYVRVDVRRLRACALDVPKPIGAFAVMLEPNVRADLEGALP

SEQ ID NO: 74089 - DNA, 717 bp, Unknown
  Obtained from environmental sample
  misc_feature (1)..(717): n is a, c, g, or t
gtgtttaatggagtacttggtaaaagtgagcaagaattcattttatcagaaaaaatggaattcaaaaacggtaaactcacatcatctgtaactattcgtgctggttggggtatggctaatcagatacgtgactatattaacggtaaagaagttttcgatacaaaaggacaaaaagttgttcgcttttatttcaacaagcaaggcatactattttatgaaaaagaacgtgaaacgtataatccaaagtccgtgttcagtgatattgcaaatacaaaaaatggctcatcagaaatatatagtttatttggaaaagaatgttttaaatttccaaagcctgttgatattgtaaaatatttattgtttttggcgagtaaacccgattccattattctcgatagcttcgccggttccgccaccaccgcccacgccgtcctaaacatgaacaaacaagacggcggcactcgccgcttcatcctaatagaaatggaagactacgccgacaccatcaccgccgagcgcgtcaagcgagtaatagacggctacggcggcggtgagaatggcgatagcggtaaaaataaaaacgcagtcgccggaacaggcggcggttttacttattatgaactcggcgagtgtcttttattagaagacggcaacctcaatgaagatattgacaaagaaaaatcatggagtatgtatggtacaccgaaacgcgggtag

SEQ ID NO: 74090 - protein, 238 aa, Unknown
  Obtained from environmental sample
  DOMAIN (2)...(173): DNA methylase
  misc_feature (1)..(238): Xaa is any amino acid
MFNGVLGKSEQEFILSEKMEFKNGKLTSSVTIRAGWGMANQIRDYINGKEVFDTKGQKVVRFYFNKQGILFYEKERETYNPKSVFSDIANTKNGSSEIYSLFGKECFKFPKPVDIVKYLLFLASKPDSIILDSFAGSATTAHAVLNMNKQDGGTRRFILIEMEDYADTITAERVKRVIDGYGGGENGDSGKNKNAVAGTGGGFTYYELGECLLLEDGNLNEDIDKEKSWSMYGTPKRG

SEQ ID NO: 74091 - DNA, 621 bp, Unknown
  Obtained from environmental sample
  misc_feature (1)..(621): n is a, c, g, or t
ttggcatatgatgataatggtgatttcgaccttgcgataaaggactacgacaaaaccattgaactagacccaaaatatgtagttgcctacaaaagccgcgggatcacgtataaaaaaaaaggcgactacgactctgcaataaaagactacgacaaagccattgaactcgacccgaaatatgcttttgcctacaacagccgcgggaacgtctataaaaacaaaggcgaccatgaccgcgcgatagaggactacgacaaagccattgagctcgacccgaaatatacaagtgcctacaacggtcgtgggaacgcttataaaaacaaaggcgactacaactctgcaataaaggactacgacaaagccattgaactcgacccgaaatatgcttttgcctacaacaaccgcgggaacatgtatgccaacaagggcgactactacaccgcaatagaggattacgaaaaagccattgaactcgccccgaaatttccaaaagcctacaacaaccgcggagtcgcgtattataacaagggcgactacgacaccgcaataaaggactacgaccaagtcattgaactcgacccgaaatatgcacttgcctacaacaaccgctgggaacggtaa

SEQ ID NO: 74092 - protein, 206 aa, Unknown
  Obtained from environmental sample
  DOMAIN (27)...(60): Tetratricopeptide repeat
  misc_feature (1)..(206): Xaa is any amino acid
MAYDDNGDFDLAIKDYDKTIELDPKYVVAYKSRGITYKKKGDYDSAIKDYDKAIELDPKYAFAYNSRGNVYKNKGDHDRAIEDYDKAIELDPKYTSAYNGRGNAYKNKGDYNSAIKDYDKAIELDPKYAFAYNNRGNMYANKGDYYTAIEDYEKAIELAPKFPKAYNNRGVAYYNKGDYDTAIKDYDQVIELDPKYALAYNNRWER

SEQ ID NO: 74093 - DNA, 522 bp, Unknown
  Obtained from environmental sample
  misc_feature (1)..(522): n is a, c, g, or t
gtggtcaaagccgccgcggaggattccagtatcggcataacgctcgtcaaaaatccagcagacctggcgccggcggtcgaacgcacgctgtccgcttacggagaggtttttgtcgaggagtttatctccggcgccgaagtgaccgtgggcgttctgcccatccgcggcaaactaatcgctctgccgattttggaattgcgccccaaaaacgagttctacgatttcgaatccaagtacacgcccggcggcacggagtttattctgcctgcggaactggcgccggcagtgacggaaacggtgcaaaatctcgcgcggcaggcttaccaggccttaaactgcgcgggtgcggcgcgcgtggacttcgtcgtacaggacagaaaaaatccgtacatcctggaaatcaacaccaatccgggtatgaccgaccagtccgacctgccggcggaagccaaagcgctcggtattgaatttcccgacctggtggaaatgattttattgtcggcgggcacgggaaaactatga

SEQ ID NO: 74094 - protein, 173 aa, Unknown
  Obtained from environmental sample
  DOMAIN (1)...(166): D-ala D-ala ligase C-terminus
  misc_feature (1)..(173): Xaa is any amino acid
MVKAAAEDSSIGITLVKNPADLAPAVERTLSAYGEVFVEEFISGAEVTVGVLPIRGKLIALPILELRPKNEFYDFESKYTPGGTEFILPAELAPAVTETVQNLARQAYQALNCAGAARVDFVVQDRKNPYILEINTNPGMTDQSDLPAEAKALGIEFPDLVEMILLSAGTGKL

SEQ ID NO: 74095 - DNA, 888 bp, Unknown
  Obtained from environmental sample
  misc_feature (1)..(888): n is a, c, g, or t
atgttcgccaattacctgccggtatcgccgaaaacttttaaactgctcaaggtgctctcctccacggagaaaacgaaaattaagggggtcaatcccgcaagcatcgacaactaccccgcgtatgatttctacggtaaacccatccctgcttcttacgcagccgcaggcgcggtacaggatgaaaccgaatccgacgggtactatattgaaccaataccgtacaacccctctgcgggatcgataaccggctatagccctattcctggtgatacagacgggctttacgcttttaattcagaagatcctctggaattttccaacaacaccaactacgttcttgactactgggtggtgaacggggtaaacggggcgacaccctccgcaaatcagcatatgcgggtaatggcggtaacttaccataatgttacggtgaacgctacgtataattctttatacaacgccctgaacaatcaacaaaacggggaccggctcaacttcagcgtcgccacccccttaacgaccaccatttccataaccggcgcattgccggccataaccaaagacatcatcattaacggaaacggcataacgctggcgaaaagcgggacatgggacggcagtttgctgactattaacagcggcgccacggtggcactcagccgcgtcaggtttgacggcggcgccaccaccggcgacggcggggcgatcaacaactcaggaacccttgccatagagtccagcattttcagcggcaatacttctgaaagccagggcggcgcgatttacaacaacggaaccctgactgtagcagccagcaccttctttaacaacagtccgactactattcagcggcgcaattacagcggtaccgaaggaccgttaccctga

SEQ ID NO: 74096 - protein, 295 aa, Unknown
  Obtained from environmental sample
  misc_feature (1)..(295): Xaa is any amino acid
MFANYLPVSPKTFKLLKVLSSTEKTKIKGVNPASIDNYPAYDFYGKPIPASYAAAGAVQDETESDGYYIEPIPYNPSAGSITGYSPIPGDTDGLYAFNSEDPLEFSNNTNYVLDYWVVNGVNGATPSANQHMRVMAVTYHNVTVNATYNSLYNALNNQQNGDRLNFSVATPLTTTISITGALPAITKDIIINGNGITLAKSGTWDGSLLTINSGATVALSRVRFDGGATTGDGGAINNSGTLAIESSIFSGNTSESQGGAIYNNGTLTVAASTFFNNSPTTIQRRNYSGTEGPLP

SEQ ID NO: 74097 - DNA, 798 bp, Unknown
  Obtained from environmental sample
  misc_feature (1)..(798): n is a, c, g, or t
atggaattagcaagtgaagtgacaaagaaaccgaatctgtttaagtctgcaacaagtgaattgtcgcaggatggtttttttgcgtggttgatacagtgggctgatgagagcaatagaggtttcaatgaaagcctcgttaattgtgcacaagattttgtcaggtacttaatatcaaaacagtttccgtcgtatgaaaaaccgattacaaaaagtgtatgtggaagacagtgggataatatagatatatgggctgaaattaatgacgaaatatttgttattgttgaagacaaaacatatacaggagagcattcgaatcagttggaaagatatatagaaactgccaacaaatattgcggagagaaaaagtatacgttggtttgtatatacctgaaaacgggtacggaagccaaatctttccttgaacaagttgtggaaaaagggtttgctgttgtagagaggaaagacttattaggtaaattccttccgcataagaacaaaatagatagtgatatttttagcgatttcgttgaaaaaatacaagaacaagaggatcgcgaaaatagttttgaaaccgaattgattaaaaattggcattgggactgctggattggattttatcgatatttagaatctcaaatagatgtaaaaggttggaaatacgtacctaaccaatctggcgggtttatggggttgtggtggaattttaaagattggaataccgttaatgtatatctacagattgagaatggaaaactgtgtttcaagataggttacatatacgaaaactgcaagaaatga

SEQ ID NO: 74098 - protein, 265 aa, Unknown
  Obtained from environmental sample
  misc_feature (1)..(265): Xaa is any amino acid
MELASEVTKKPNLFKSATSELSQDGFFAWLIQWADESNRGFNESLVNCAQDFVRYLISKQFPSYEKPITKSVCGRQWDNIDIWAEINDEIFVIVEDKTYTGEHSNQLERYIETANKYCGEKKYTLVCIYLKTGTEAKSFLEQVVEKGFAVVERKDLLGKFLPHKNKIDSDIFSDFVEKIQEQEDRENSFETELIKNWHWDCWIGFYRYLESQIDVKGWKYVPNQSGGFMGLWWNFKDWNTVNVYLQIENGKLCFKIGYIYENCKK

SEQ ID NO: 74099 - DNA, 909 bp, Unknown
  Obtained from environmental sample
  misc_feature (1)..(909): n is a, c, g, or t
atgcacgtagtccaccccttccatcccatgctgctcgccgccgtgcgccgggtnttcgacgcgcacgcggccgtgctcttcatgccggacgagacaggacggtttaccgcgctggccgcggattgtcccgacaataccgtcaaaatcggcgccccagccgaaccgggcaaaggcttggtcggctggattctgcgcaaccggcagccgctgatcatcaacaatttcgaccagcgcagcagcagcctcggctattatggatcgcgcgacgcaggccgcatcgcggccttcatgggctgcccgctggacaacggcggcgtgctgtgcgtggacgcagtccagccccacgtcttcaacgaggaacacacggaaggcctgaaagccctgggggcgctgtttgacctgccggccccggcgtccgctgacattgaggaagtgcgccgctactttgcccggctggaacgcctccaggaactgcgcgtgcggaatgcgcaatggaagacctatctcccggcttttctcaagctgacggcggaagctacgcgttttgatcacgcggccttcgccgtccggcccgacaacaacgaatcgttcatcattgaggcggaaagcgcgcccatcttgctggccgacggcgcttttccgcaactgcccatcgccgggggcgtggtcggctgggtgttccgcaacgtcgtgcccgtgcataacgaaggtctggacggcacgcaggcggcgtccttgtatggcaaactcaaaggcgtgccggatttccgctccgtggtctgcctgcccgtcacggtcaacaaggccaccacggctgccttgtgccttggcggcatcgatccccgccccatcccccaggccatgcgcagtttcatccgcatggcgacagacgaactcgtgcagttctga

SEQ ID NO: 74100 - protein, 302 aa, Unknown
  Obtained from environmental sample
  DOMAIN (3)...(136): GAF domain
  misc_feature (1)..(302): Xaa is any amino acid
MHVVHPFHPMLLAAVRRVFDAHAAVLFMPDETGRFTALAADCPDNTVKIGAPAEPGKGLVGWILRNRQPLIINNFDQRSSSLGYYGSRDAGRIAAFMGCPLDNGGVLCVDAVQPHVFNEEHTEGLKALGALFDLPAPASADIEEVRRYFARLERLQELRVRNAQWKTYLPAFLKLTAEATRFDHAAFAVRPDNNESFIIEAESAPILLADGAFPQLPIAGGVVGWVFRNVVPVHNEGLDGTQAASLYGKLKGVPDFRSVVCLPVTVNKATTAALCLGGIDPRPIPQAMRSFIRMATDELVQF

SEQ ID NO: 74101 - DNA, 312 bp, Unknown
  Obtained from environmental sample
  misc_feature (1)..(312): n is a, c, g, or t
atgatcagatggcacgagaacgcgggcgcttcgcccagcaacagggaagcgctgatcacgctcggcctgttttttggctacttcatctggtggtatgcctgcgcgtacggactgggcggcggcgatccggaaacatacagctacgtcgccggctttccggcctggtttttttatagctgcattgtcggctatcccctgatgtccctggtcttgtggctggctgtccgcctgtttttccgcgacatgcccctggacgcgcatccggacaaggccgccgattccgcgccggccgccgattcttccaatttgtga

SEQ ID NO: 74102 - protein, 103 aa, Unknown
  Obtained from environmental sample
  DOMAIN (11)...(90): Protein of unknown function (DUF997)
  misc_feature (1)..(103): Xaa is any amino acid
MIRWHENAGASPSNREALITLGLFFGYFIWWYACAYGLGGGDPETYSYVAGFPAWFFYSCIVGYPLMSLVLWLAVRLFFRDMPLDAHPDKAADSAPAADSSNL

SEQ ID NO: 74103 - DNA, 588 bp, Unknown
  Obtained from environmental sample
  misc_feature (1)..(588): n is a, c, g, or t
atggcgcgagggcgggatgcagttcttcaggccgcgncccgcncagatcacggccacgagcacgaccatggacgccgccatcatgatgacgncctgaatgcagtccgtcagggccacggcccgatagccgcccaccgtggtatacaggatgacggtcaatccgaaaatggtcaggccgacgatgtaggggtagccggtcatggcctggaacaggcgcgccccgccgataaactgggccagcatggaggccatgaaaaaaacgatcagggccgcggacgtgatcaaaaccagcagatcgctgccgtagcgggcgcgcagaaagtccgtgatgcccacggcgcccgtgcgccgggcaacgatggcgaaccgcttgccgaacacgcccagcgtcagaaaggtggtcggcacctggatcatggccaacaacacccaactcaggccgagggtgtaggcgatgcccggcccgccgataaagctgctggcgctggtgtaggtggccacgatggtcatggccaggacaaagccgcccatggtccggccgccgataaagtattcctcaagaaaactggaggatccggacgaggctga

SEQ ID NO: 74104 - protein, 195 aa, Unknown
  Obtained from environmental sample
  misc_feature (1)..(195): Xaa is any amino acid
MARGRDAVLQAAXRXDHGHEHDHGRRHHDDXLNAVRQGHGPIAAHRGIQDDGQSENGQADDVGVAGHGLEQARPADKLGQHGGHEKNDQGRGRDQNQQIAAVAGAQKVRDAHGARAPGNDGEPLAEHAQRQKGGRHLDHGQQHPTQAEGVGDARPADKAAGAGVGGHDGHGQDKAAHGPAADKVFLKKTGGSGRG

SEQ ID NO: 74105 - DNA, 489 bp, Unknown
  Obtained from environmental sample
  misc_feature (1)..(489): n is a, c, g, or t
gtgtcgccggtcgcgcccgcgcactcgaatccgccttcgccgttcgccgtcaagacttggttgattgcgcagtcgttcgccacgcccaatcccgccaaggcctcgccggttatgtatcccgcgtcgttgtcgaacgcgctgacctcggtcggtatggccgcgatcgcgttcgcctgggcggtcgccgcggcgcccgccgcgtcaaacgcgcttgtcgccgcgaatgccgccgtgcccagcgttccgccgtccgccaaattgcccgacgcgtccagcaccgcgacgtttcccgccgccgccggaacggccttgtcggccttgtccgcgaccgcgcttgaaacatcggccttggtcgccaagtcgtccagcgcgacgccggagtccacgaattgtccgtttccgtccataaccgcgacgttatcggcggtgtcgcctgtctgcaactccgcttgcccgaaacgtccgttccgctcggccgctcggctataa

SEQ ID NO: 74106 - protein, 162 aa, Unknown
  Obtained from environmental sample
  misc_feature (1)..(162): Xaa is any amino acid
MSPVAPAHSNPPSPFAVKTWLIAQSFATPNPAKASPVMYPASLSNALTSVGMAAIAFAWAVAAAPAASNALVAANAAVPSVPPSAKLPDASSTATFPAAAGTALSALSATALETSALVAKSSSATPESTNCPFPSITATLSAVSPVCNSACPKRPFRSAARL

SEQ ID NO: 74107 - DNA, 312 bp, Unknown
  Obtained from environmental sample
  misc_feature (1)..(312): n is a, c, g, or t
atggcttttctctttaagctgcaaaaaatccttgaatacagggaacaactggaagatcaagccaaggtggccctggcccgggtacaacaactgcatattgaggaagagcgccgcaacgaactcttgaaagcgctgctcacggaacaggaaagcaagctgtattccgatgccctgctgccgacgggcgaacgctggttgctggaacactttattcgcggcgtgcgtgaagacttgcaaggttcccacctgcgcttgcgcaccctggcccagatggggcagaggcccgcagaacgctgtgctcggcctatctga

SEQ ID NO: 74108 - protein, 103 aa, Unknown
  Obtained from environmental sample
  misc_feature (1)..(103): Xaa is any amino acid
MAFLFKLQKILEYREQLEDQAKVALARVQQLHIEEERRNELLKALLTEQESKLYSDALLPTGERWLLEHFIRGVREDLQGSHLRLRTLAQMGQRPAERCARPI

SEQ ID NO: 74109 - DNA, 486 bp, Unknown
  Obtained from environmental sample
  misc_feature (1)..(486): n is a, c, g, or t
gtgcggatgggtatcaataccggaccgatggttgtggggaatatgggaagccggacacgctttgattataccatgatgggggattcggttaatcttgcttcaaggttggagggcgtgaataaatactataagacttttattctggcgtcggaattcaccgttcaggaggtcggtgattttatcgcgcggcgcgagatcgatgttttgcgggttgtgggcaagcaggcgcccgtgaaggtgtatgagcttgtctgtccgcgcgcctcggcggacgctaaaaccatggatctgcttgcgtgttttgaggaggggcttgagctctacaaaaaaagggagtgggcaaaagccggagagactttccgcaaagctttggcgcttgaacccggggacggcccgtcgcaggtctatatagatcgctgcgcccagttttccgccgccccgccgccggatttctgggatggcgtgtacgagatgaaatccaagtag

SEQ ID NO: 74110 - protein, 161 aa, Unknown
  Obtained from environmental sample
  DOMAIN (97)...(130): Tetratricopeptide repeat
  misc_feature (1)..(161): Xaa is any amino acid
MRMGINTGPMVVGNMGSRTRFDYTMMGDSVNLASRLEGVNKYYKTFILASEFTVQEVGDFIARREIDVLRVVGKQAPVKVYELVCPRASADAKTMDLLACFEEGLELYKKREWAKAGETFRKALALEPGDGPSQVYIDRCAQFSAAPPPDFWDGVYEMKSK

SEQ ID NO: 74111 - DNA, 888 bp, Unknown
  Obtained from environmental sample
  misc_feature (1)..(888): n is a, c, g, or t
atgaaaaatctgacggacataaaacaccgcatgaagggcatttccgaaacgcggcaaataaccaacgctatggaaactatttcaatagcgaaaatgcgcaaggcgttgaaaaaatatgaaacgaaccttgcttattttaaccgcgtccgcaccacgataagcgaaattataagctataccaaggaaaatacgcataggtatttaaccgaacggattgcgcccgacggagaaaaacgcgcgcttttaatcgttatcgcctccgataaaggcctttgcggcgggtataattataatgtgttaaataaagcgcttgacgttatgaagggttttaaggaggtcagcattttcaccgtgggctatatgtcgcacgagtttttcaaccgccgtaaaatcccgattgacgcggagtttatccataccacgcttaatcccacctttaacgacgcgcggcaaattgccgacaatataatctcgctttacgagctgaatatgatggaggaggtttacgtcgtgtataccgccatggaaaattcgtcaacggcgcgccccgacgtaatcaaactgttgccgctttcgggtaaggagttcgcattgccgcaaaaggaaggcgacggggaggagacttattttaaggaaataatttacgacccttcgccagatatagttttagacgctttggtcccgcaatacctcgcgggggtaatttacggcgcgttggttcagtccgtcgcaagcgagcacagcagccgccgcttagccatgagcaacgcgacaaaaaacgctaacgagattttagaacgccttaacttagattataaccgcgcccgagcagaatctgtaaccaacgagctgagtgaaataataacgtcctctatgaatgtgaaataa

SEQ ID NO: 74112 - protein, 295 aa, Unknown
  Obtained from environmental sample
  DOMAIN (3)...(292): ATP synthase
  misc_feature (1)..(295): Xaa is any amino acid
MKNLTDIKHRMKGISETRQITNAMETISIAKMRKALKKYETNLAYFNRVRTTISEIISYTKENTHRYLTERIAPDGEKRALLIVIASDKGLCGGYNYNVLNKALDVMKGFKEVSIFTVGYMSHEFFNRRKIPIDAEFIHTTLNPTFNDARQIADNIISLYELNMMEEVYVVYTAMENSSTARPDVIKLLPLSGKEFALPQKEGDGEETYFKEIIYDPSPDIVLDALVPQYLAGVIYGALVQSVASEHSSRRLAMSNATKNANEILERLNLDYNRARAESVTNELSEIITSSMNVK

SEQ ID NO: 74113 - DNA, 813 bp, Unknown
  Obtained from environmental sample
  misc_feature (1)..(813): n is a, c, g, or t
ttggacctcgcgggtaaaatcattgtgcccggcctgattgatatgcacgtgcatctgcgcgagcccggccaagaggaaaaagaaactatcaagaccggcagcaaggcggcagtggccggcggatttacaagcattgcctgtatggccaataccgacccggtggccgacgatgtcagtatcatcaagcacatcaaagaagtggccgagcgcaacggcatcgttcacgtaatgccgatcggcgcctgcacactggggttaaaaggcgagcacatcacgcaaatcggcgagatgcagagattcggcgccgcggctttttcggatgacgggcagtccatcaccaatgctctggttatgcgccgggtgctggaatatgcccggatgttcgggacgacggttatcgcgcattgcgaggacaaatccctgaccaacggcggctcgatgaacgaaagcgccttgtctacccggctcggcctgcccggcataccgcgcgccgcggaaacatccgtggtcgcccgcgatatcgaaatggctaaaaatttcggccgggtgcatctggcacatatttccaccaaagagagcctggagctcatccggcaggccaaaaaacaaaaaataccaattacctgtgaaactgcgccgcattatctgctcctcaccgaggaagctgtcggcgcttacgacaccaatgccaaaatgaacccgcctctgcgtcaggaacaggacagactggcgctcattgacgcgttaaaagacggcactatgatatcattgtaccgaccacgccccgcacacgctctcggccgtgggcgataa

SEQ ID NO: 74114 - protein, 270 aa, Unknown
  Obtained from environmental sample
  DOMAIN (7)...(270): Amidohydrolase family
  misc_feature (1)..(270): Xaa is any amino acid
MDLAGKIIVPGLIDMHVHLREPGQEEKETIKTGSKAAVAGGFTSIACMANTDPVADDVSIIKHIKEVAERNGIVHVMPIGACTLGLKGEHITQIGEMQRFGAAAFSDDGQSITNALVMRRVLEYARMFGTTVIAHCEDKSLTNGGSMNESALSTRLGLPGIPRAAETSVVARDIEMAKNFGRVHLAHISTKESLELIRQAKKQKIPITCETAPHYLLLTEEAVGAYDTNAKMNPPLRQEQDRLALIDALKDGTMISLYRPRPAHALGRGR

SEQ ID NO: 74115 - DNA, 924 bp, Unknown
  Obtained from environmental sample
  misc_feature (1)..(924): n is a, c, g, or t
ttgatagccgagcggcacgagcggcacgagcggcacgagggtaagttgaaaatagcaattacagaccttaaagccggagttggcagaacccaacaacaagtagacggcctgtcggatatgcttacggcttcactttttgaaacagggcaatttaccattatagaaagatcgcaggtaaatagaattatcacagaacggaactttcaaaaatcaagcctgagtaacgctcagataaagacaatcggcaatattcttggcgttgacgctctgcttatcggtacagttaattttactgtccgcgagagaacccttgaagatgttattaccgatatggcaaaaggcgaatacaatgtggacattcgccttgtatcggttgaaacaggagagatattgtcggcgtcgggcagtaatcaatatgttaatcaaaccgaaagaaatttgatgagaactatagcgcatgaattgaccgaaaatttgatagtgtccagttccggtacaagtcaaaagggagttgttgcgttatatggatatttatatgtgtatcccgaagacttggggaaattttcaaccgcgccgcaggcaattattacagccataaacaaaaataacacacacggctttaatgactggaggttgccgactgaggaagagggggctttgctcaattcaaacaaagcaaaattgggaatgttgaataacacaatatatgcgcatgatagaagtttcaataattcagattctttctcagttagattggtaagaacagaagttttagtacagaaaacagatactaatcctgttgtaaatcaataccttgaagaacctgattttgactttggcagagtacctgtgttaaatggatccgtgtcagtaagatttattgtaataatccacgagatcaaatataactattacaaatgttaa

SEQ ID NO: 74116 - protein, 307 aa, Unknown
  Obtained from environmental sample
  misc_feature (1)..(307): Xaa is any amino acid
MIAERHERHERHEGKLKIAITDLKAGVGRTQQQVDGLSDMLTASLFETGQFTIIERSQVNRIITERNFQKSSLSNAQIKTIGNILGVDALLIGTVNFTVRERTLEDVITDMAKGEYNVDIRLVSVETGEILSASGSNQYVNQTERNLMRTIAHELTENLIVSSSGTSQKGVVALYGYLYVYPEDLGKFSTAPQAIITAINKNNTHGFNDWRLPTEEEGALLNSNKAKLGMLNNTIYAHDRSFNNSDSFSVRLVRTEVLVQKTDTNPVVNQYLEEPDFDFGRVPVLNGSVSVRFIVIIHEIKYNYYKC

SEQ ID NO: 74117 - DNA, 762 bp, Unknown
  Obtained from environmental sample
  misc_feature (1)..(762): n is a, c, g, or t
gtgttcactacggctttcatgccttggcatttccagaaggaacagaatctgttcctgcggcggcagggctttgaactacatctcgtggcctccccggatgactattttgaagaaacctgcctccgcgacggcctgatcgcccaccctctagacattccacggcgcccctcgccttggcgggatattaaggcccttaaaaatttgatgcgtttatttcgggatattcgtccagacattgtccatgcaggcgctcccaaatccgcttttttagccatgatggcggccagactcaccggcgtaaaaaaccgcttcttcgcctgccatggaaccgtaaccgagcggcgcatcggggcaatgaggctgttttaccgacttatggaaggaatcaccgccaggctggccaatcatcgagtctggtgcgtgtcgccgtccttgttggcgtttgcgacccaaaatggcatcataccggccggtaaagggtttgtgatcggccaaggttcggccaatggctttcgtgaagcctggctggatgaagccgccacccccctccctgaggcgctggcccgactggaacgcgaaaaagccgccaagggttttcctgttgtaggcttcatggggcgtttatgccgcaagaagggaatcgagaccattgcggaagtctggcccgaaatcagaaaggattttccggaggcgcgcttgcttctgtgtggtccctgggatgctgaagactccgtggcggcctcgtgcccggaagctttttga

SEQ ID NO: 74118 - protein, 253 aa, Unknown
  Obtained from environmental sample
  misc_feature (1)..(253): Xaa is any amino acid
MFTTAFMPWHFQKEQNLFLRRQGFELHLVASPDDYFEETCLRDGLIAHPLDIPRRPSPWRDIKALKNLMRLFRDIRPDIVHAGAPKSAFLAMMAARLTGVKNRFFACHGTVTERRIGAMRLFYRLMEGITARLANHRVWCVSPSLLAFATQNGIIPAGKGFVIGQGSANGFREAWLDEAATPLPEALARLEREKAAKGFPVVGFMGRLCRKKGIETIAEVWPEIRKDFPEARLLLCGPWDAEDSVAASCPEAF

SEQ ID NO: 74119 - DNA, 636 bp, Unknown
  Obtained from environmental sample
  misc_feature (1)..(636): n is a, c, g, or t
ttgagcataaaccggggggagcaggtcgggcttataggggcttccgggccaggcaaaagcaccttggccttgctgctgaccggtttggtggcgccccaggccggacgtttactggtggacgggcgcccgctgaccccggagggtcgggcggcttatgtgcgtcaggtcggctttgtgccccagaacccgctgcttctccaaggttcagtggcggacaatgtggctttcagccaatggggcgaaaaatatgacctccggagagtggaagacgtttgccgccaggcggccatggattttgtctttgaccacccccaggggctggaccggcgtctgggttccggcggccaagggctttccggggggcaagcccagcgggtagccattgccagggccctgttcgcccagcctgaaattatcatctttgacgaagccaccagcgcccttgatcaggccaatgagaacctcattgtcgaaaccatcagaaaactcacggccggaaccacggtcgtcatcatcgcccatcgcctgagtaccgtggaaaactgcgaccgtttgttctggctggaagaggggacggtaaaagagacggggccgccggaagaaatactgcccagctatcgagccgccgcggcctga

SEQ ID NO: 74120 - protein, 211 aa, Unknown
  Obtained from environmental sample
  DOMAIN (6)...(191): ABC transporter
  misc_feature (1)..(211): Xaa is any amino acid
MSINRGEQVGLIGASGPGKSTLALLLTGLVAPQAGRLLVDGRPLTPEGRAAYVRQVGFVPQNPLLLQGSVADNVAFSQWGEKYDLRRVEDVCRQAAMDFVFDHPQGLDRRLGSGGQGLSGGQAQRVAIARALFAQPEIIIFDEATSALDQANENLIVETIRKLTAGTTVVIIAHRLSTVENCDRLFWLEEGTVKETGPPEEILPSYRAAAA

SEQ ID NO: 74121 - DNA, 597 bp, Unknown
  Obtained from environmental sample
  misc_feature (1)..(597): n is a, c, g, or t
atgattagcgggccgccaagcgcgggcgacgcttggagaaatagcgacgcgcttgaaaaaatatttggccgtcacaaagcggagattaagatgatcagcggggtttattcttccgagtacgtaaagaatgacgaagtggcagcagtccgctcgctgacagaggcatttgccaagaaagagggacgccgcccgcggatattggttgccaagctgggccaagacggccacgataggggggccaaggtcgtttcgacggcattcgccgacttgggctttgacgtggatgtcggccccctgttccagactccggcggaagccgcaaagatggccgtggaaaacgatgtacacatagtcgccatgtccagcttggccgctggccacaaaacactgctgccgcaattggccgccgaactaaaaaagaacggccgcgaagacatcatgctcgtagtcggcggcgtgataccggctcaggactatgaagccctccgcaactccggggctgcggccatctttgggcctgggaccaacatcccgctggccgccaaggtcatcatgggcgatttggacaaaaggcttggcttggggctgatcggatag

SEQ ID NO: 74122 - protein, 198 aa, Unknown
  Obtained from environmental sample
  DOMAIN (64)...(183): B12 binding domain
  misc_feature (1)..(198): Xaa is any amino acid
MISGPPSAGDAWRNSDALEKIFGRHKAEIKMISGVYSSEYVKNDEVAAVRSLTEAFAKKEGRRPRILVAKLGQDGHDRGAKVVSTAFADLGFDVDVGPLFQTPAEAAKMAVENDVHIVAMSSLAAGHKTLLPQLAAELKKNGREDIMLVVGGVIPAQDYEALRNSGAAAIFGPGTNIPLAAKVIMGDLDKRLGLGLIG

SEQ ID NO: 74123 - DNA, 924 bp, Unknown
  Obtained from environmental sample
  misc_feature (1)..(924): n is a, c, g, or t
ttgtaccgctcgcgggacggcggccttactttttcacagatgaccagtgggctgggcaacgggctgcaatacacccacgctgattttcatgtccacgcctgggccctcaatgggccaaaggctctgtacctcggcaccgatggaggactctcgatagtcaggcaaccagacatcaatcccataccctcggcgggaatcggcacccaaagcgtctcagacccaactgtgattgaccaccgccgcaatagagatatatccacgcagttggtctatgacattgcgagtaccacggcggatacccctcctggctctcgggacagagtgatcgccggattccaggacttgggcactaggctgaggcaaaataacgatggcagcgggaccttcgactctgtcatcgggggggatggctttggttgcgtgatacacccatacaacggcaacttgatgcttggatcactttattacacccaaattcgcagaagcaccaacgggcgaaatttttcgaattcgtatagcacaatttcgggcgccggtgacagcggacaggcaccattccacacgagggtgattcacacgatggcagacccatcgggcaaccgcgtgtacacctacacaaataccgtgccttacatttccgataattttgggacgacctggagtccattgaatgttactgggaatggatggcccgctggcaacaatatccgccaattgggggcatccccactgaagctgggattgataggcgcgacatttaataactcagtggcgatttctgaagacaatggggaaacttggagaactttcggtgggttccccggcggcgcaggcagcatggctgacatagccttcgacacggcggacccagatatcatgtacgccacttcggttaggcttgccatctggaacgtgggcgggtag

SEQ ID NO: 74124 - protein, 307 aa, Unknown
  Obtained from environmental sample
  misc_feature (1)..(307): Xaa is any amino acid
MYRSRDGGLTFSQMTSGLGNGLQYTHADFHVHAWALNGPKALYLGTDGGLSIVRQPDINPIPSAGIGTQSVSDPTVIDHRRNRDISTQLVYDIASTTADTPPGSRDRVIAGFQDLGTRLRQNNDGSGTFDSVIGGDGFGCVIHPYNGNLMLGSLYYTQIRRSTNGRNFSNSYSTISGAGDSGQAPFHTRVIHTMADPSGNRVYTYTNTVPYISDNFGTTWSPLNVTGNGWPAGNNIRQLGASPLKLGLIGATFNNSVAISEDNGETWRTFGGFPGGAGSMADIAFDTADPDIMYATSVRLAIWNVGG

SEQ ID NO: 74125 - DNA, 687 bp, Unknown
  Obtained from environmental sample
  misc_feature (1)..(687): n is a, c, g, or t
ttggttgaccccaaactaacctcgctgcaggtgagcgaatccgaccaatactccttttgcaatttcgactgctgctattgctttacaaaggcgcggaacaggggcctcgaccctgccaaactgcccgaaatggacgaacagttggacgtgctgcgctacgtctcggaaaatataagcggcagagacttggatctgcaattttccacgggcgagataatggtgcatcccaaccgcgacaaaattattgagctacttcgcggctacaggacgctacttttcacaaacgcagcaatttacagtgagcaactggcagcgctgatggagcaggggctgttgacaataatgaccagcattgactgcgggacgcccgaaacatttcgccgcatcaagtctgttgactgctttgaaagcgtgtgcgccaatctggcccgctacgcagccactggcggctgcctggtgctgaagtacatcatgctgcctgggataaatgactccgagacggaagccgacggctttgtcggtctggcggcaaaattgggcgcggtggttcaactgtccaacgacacgcgcattgagcgggctccgctgccagaagatgccctccgtgtggcgtgcaggatagcctctcgcgctagggcaaacaattttgctggtgatactctaaaccgacgtgtttttctgatctga

SEQ ID NO: 74126 - protein, 228 aa, Unknown
  Obtained from environmental sample
  DOMAIN (14)...(173): Radical SAM superfamily
  misc_feature (1)..(228): Xaa is any amino acid
MVDPKLTSLQVSESDQYSFCNFDCCYCFTKARNRGLDPAKLPEMDEQLDVLRYVSENISGRDLDLQFSTGEIMVHPNRDKIIELLRGYRTLLFTNAAIYSEQLAALMEQGLLTIMTSIDCGTPETFRRIKSVDCFESVCANLARYAATGGCLVLKYIMLPGINDSETEADGFVGLAAKLGAVVQLSNDTRIERAPLPEDALRVACRIASRARANNFAGDTLNRRVFLI

SEQ ID NO: 74127 - DNA, 927 bp, Unknown
  Obtained from environmental sample
  misc_feature (1)..(927): n is a, c, g, or t
ttgatcagatcggcacgacgtttggcaatgacgcttatcaatataattaaaacaaaaatatttgaatcgcgtttaaggtttacggcttacctggacagtaatattccggacgcgatgttcggagacccaatcagaatccgtcagataatgttaaatcttctaagcaatgccgttaaatacactgaaaacggatttatctcattatcaataaacggtaaagcggcggaaaacgatacttttaacatcataatagaagttgctgacagcggtaagggaattaagcaggaagaaataggcgagcttttcacagaatttacaagatttgatatggagaacaacaaaaatattgagggaaccggtcttgggcttgccatttgtcaaagccttactgcggctatgaacggacaaattaaagtgctttctgactatggcataggcagtatttttacagtatcattgccgcaaaaagtccgccatagtgaaaaactggcagttataaaagaaccggaaaaaaagaaggttttaacttatgatcggcgcgaaatatacgccgcctcaatcgctaaaacattggacaacctcggcgtgagctacaagaccgtatcaaacacaaccgattttcttgattgccttttaagtaataattattcttatgttctcatggcgtccgttttgtacgaagaaatcaaagaaaaatattcagattttgattcaaatataaaagttgccgtgatttgcgaatatggcgaagtaattacagacaagaatatcagttctctttttatgccggtttattccataccggtcgctaactttttaaatggcatctccgatagttataccgactatttaaaaaaaggatcaatcccgcatattatcgcgcctggaagcaaagttttggttgtagatgacattatacaaacctga

SEQ ID NO: 74128 - protein, 308 aa, Unknown
  Obtained from environmental sample
  DOMAIN (41)...(156): Histidine kinase-, DNA gyrase B-, and HSP90-like ATPase
  misc_feature (1)..(308): Xaa is any amino acid
MIRSARRLAMTLINIIKTKIFESRLRFTAYLDSNIPDAMFGDPIRIRQIMLNLLSNAVKYTENGFISLSINGKAAENDTFNIIIEVADSGKGIKQEEIGELFTEFTRFDMENNKNIEGTGLGLAICQSLTAAMNGQIKVLSDYGIGSIFTVSLPQKVRHSEKLAVIKEPEKKKVLTYDRREIYAASIAKTLDNLGVSYKTVSNTTDFLDCLLSNNYSYVLMASVLYEEIKEKYSDFDSNIKVAVICEYGEVITDKNISSLFMPVYSIPVANFLNGISDSYTDYLKKGSIPHIIAPGSKVLVVDDIIQT

SEQ ID NO: 74129 - DNA, 798 bp, Unknown
  Obtained from environmental sample
  misc_feature (1)..(798): n is a, c, g, or t
atgaaaaccacaacgcgttttgaacttgtcgatataaataatctcataggctatgcgcgtaatgcccgaacccacagtaaagagcagatattgcaactccgatcaagcctgcgggaattcggctttgtatcgcctatcatatgcgataaagattttaatataatcgccgggcatgggcgtattttggcggcgaaagccgaagggatgacggaagtcccatgcgtattcgcggagcatctgaccgaagcgcagaagaaggcttatattcttgcggataaccgtatcgcgattaacgcgggctgggatgaagaactgcttacccttgagctgaccgatttaaaagactttgggtttgacctcgaactgacggggtttgacatagacgaattaaaagactttggatttgaactaaatagcgatgggtggtcatttagcgatgaaaaagatgaagttaaagacgatgactttgacctttctgccgctttagaggaagcggcttttgttttgcccggcgatatttggaagttaggaaaacaccggcttatgtgcggcgacagcacaaaaccagatgatgtaataaggctgatggacggtaaaaaagctaatctactgcttacagatccgccgtatggcgtctcatacgaaggtaaagcaggagaaatagccaacgatgaattgagcggggacgcgctggttgaaaaattgttaatgccggttttcaaaacgctgagtcggttatggacaacgaagccagcgcgtatatttttcactctgataccccaggggaatggtttctga

SEQ ID NO: 74130 - protein, 265 aa, Unknown
  Obtained from environmental sample
  DOMAIN (8)...(94): ParB-like nuclease domain
  misc_feature (1)..(265): Xaa is any amino acid
MKTTTRFELVDINNLIGYARNARTHSKEQILQLRSSLREFGFVSPIICDKDFNIIAGHGRILAAKAEGMTEVPCVFAEHLTEAQKKAYILADNRIAINAGWDEELLTLELTDLKDFGFDLELTGFDIDELKDFGFELNSDGWSFSDEKDEVKDDDFDLSAALEEAAFVLPGDIWKLGKHRLMCGDSTKPDDVIRLMDGKKANLLLTDPPYGVSYEGKAGEIANDELSGDALVEKLLMPVFKTLSRLWTTKPARIFFTLIPQGNGF

SEQ ID NO: 74131 - DNA, 510 bp, Unknown
  Obtained from environmental sample
  misc_feature (1)..(510): n is a, c, g, or t
gtgaaaaatatacgcgctggcttcgttgtccataaccgactcagcgttttgaaaaccggcattaacaatttttcaaccagcgcgtccccgctcaattcatcgttggctatttctcctgctttaccttcgtatgagacgccatacggcggatctgtaagcagtagattagcttttttaccgtccatcagccttattacatcatctggttttgtgctgtcgccgcacataagccggtgttttcctaacttccaaatatcgccgggcaaaacaaaagccgcttcctctaaagcggcagaaaggtcaaagtcatcgtctttaacttcatctttttcatcgctaaatgaccacccatcgctatttagttcaaatccaaagtcttttaattcgtctatgtcaaaccccgtcagttcgaggtcaaacccaaagtcttttaaatcggtcagctcaagggtaagcagttcttcatcccagcccgcgttaatcgcgatacggttatccgcaagaatataa

SEQ ID NO: 74132 - protein, 169 aa, Unknown
  Obtained from environmental sample
  misc_feature (1)..(169): Xaa is any amino acid
MKNIRAGFVVHNRLSVLKTGINNFSTSASPLNSSLAISPALPSYETPYGGSVSSRLAFLPSISLITSSGFVLSPHISRCFPNFQISPGKTKAASSKAAERSKSSSLTSSFSSLNDHPSLFSSNPKSFNSSMSNPVSSRSNPKSFKSVSSRVSSSSSQPALIAIRLSARI

SEQ ID NO: 74133 - DNA, 402 bp, Unknown
  Obtained from environmental sample
  misc_feature (1)..(402): n is a, c, g, or t
gtgtccagatgggagcatagggcgaaatccgcaagatgggagcatacgggcaaatccgcaatacgaaaagagattgaccgttatgtaaaagattacaacgtccgctccaacgtgtggctggtttctacaggtaaggggcattcaacgcttgataatttcgctttcgagcatcctgctatttttcctgagcagcttgccggggatcacatattaacatggtcagcgccgggcgatcttgtgcttgacccgttcttggggagcgggacaacggcgaaaatggcaatcctcaccgggcggcattatctcggttatgaaataaacagtgaatatttcggcatcgctatgaaaaggatagccgcagcaaaagaacaggccggtaccgcccagctttctcttgggtaa

SEQ ID NO: 74134 - protein, 133 aa, Unknown
  Obtained from environmental sample
  DOMAIN (1)...(116): DNA methylase
  misc_feature (1)..(133): Xaa is any amino acid
MSRWEHRAKSARWEHTGKSAIRKEIDRYVKDYNVRSNVWLVSTGKGHSTLDNFAFEHPAIFPEQLAGDHILTWSAPGDLVLDPFLGSGTTAKMAILTGRHYLGYEINSEYFGIAMKRIAAAKEQAGTAQLSLG

SEQ ID NO: 74135 - DNA, 810 bp, Unknown
  Obtained from environmental sample
  misc_feature (1)..(810): n is a, c, g, or t
atgatcagatcggccgagcgatctttgcgttactacagggtaaaaaaagggccggaaacaaaaagtctcctcatagccgcaatagacttgaatgatacaagcatttcagaacttggggacgcgctggatacccgcaaggcttttgcggaccttctttttgtacttgatgattccaattcagccgccatgctggattttatttttgggaacgaaaaaagcaatgacagggaatttaccgcggcggtcagaaggccgggaaatacggtcatagcggcgctggctgttgaaaaggggatgataaacaagccttataaagaattaacggaagcggaacggattatgctgatccgtcatacctggcatattaaggtattgaacaaagggaaaataccggaagcgggaagttttgttttgccgttccccgcgctggcagaagccgcaaggcagatagccgttataaacatggagcctgacgaagacggcatataccggagggcgccgctattgtacgaatgggaagggggctatattccctccctgccgctggcggcggccgtggcatacttacgtatacctgttgaaacgatagaactgaaagcgggggcttacatggcccttcccgtttctggaaaagaaacggtacgaattcccattgatgaacagggccgcatgcttatcccctataccgagacctgggcggaagacactcggagaattccatttcataacgttgtcgaggcgcaatatgacgacaatgtttttgacgcgatattcagcggcctgaaaagactttgggcctacgtcgtttga

SEQ ID NO: 74136 - protein, 269 aa, Unknown
  Obtained from environmental sample
  misc_feature (1)..(269): Xaa is any amino acid
MIRSAERSLRYYRVKKGPETKSLLIAAIDLNDTSISELGDALDTRKAFADLLFVLDDSNSAAMLDFIFGNEKSNDREFTAAVRRPGNTVIAALAVEKGMINKPYKELTEAERIMLIRHTWHIKVLNKGKIPEAGSFVLPFPALAEAARQIAVINMEPDEDGIYRRAPLLYEWEGGYIPSLPLAAAVAYLRIPVETIELKAGAYMALPVSGKETVRIPIDEQGRMLIPYTETWAEDTRRIPFHNVVEAQYDDNVFDAIFSGLKRLWAYVV

SEQ ID NO: 74137 - DNA, 390 bp, Unknown
  Obtained from environmental sample
  misc_feature (1)..(390): n is a, c, g, or t
atgataaaaagtatatggaataaaaaaaatatgaaacacaaacaaatttcaacaccaacagcattgacggcaataggcttattgtttgccattatcgctatggtgatattcatgggctacccaagaagggttgaggcgcagatgattgcagagaatccgacgactgttcccaaagaaccgcaggctcctaaacaaatgagccgtccaaaagtgtatttcacaaccgacataagctcaaccggattgatggctgcttataacgccctcggacagaagccaagcggcagagtagcggtaaaaatctccacaggtgaaccgcccaacagcaattatcttagagccgatttgataaaaggncttggtacggtccgtaaacggcacgattgttga

SEQ ID NO: 74138 - protein, 129 aa, Unknown
  Obtained from environmental sample
  misc_feature (1)..(129): Xaa is any amino acid
MIKSIWNKKNMKHKQISTPTALTAIGLLFAIIAMVIFMGYPRRVEAQMIAENPTTVPKEPQAPKQMSRPKVYFTTDISSTGLMAAYNALGQKPSGRVAVKISTGEPPNSNYLRADLIKGLGTVRKRHDC

SEQ ID NO: 74139 - DNA, 417 bp, Unknown
  Obtained from environmental sample
  misc_feature (1)..(417): n is a, c, g, or t
atgaatatttttttgttatggtcgcacccgatcattcaggttattgccgcgctcctgggtgtttacgctatggcacagggtgctgggcgtttcatctctcagcgtggcaaaagacgtctttttcaatggaaaaaacatgtaaaattcggcaccatagcgttgcttttgtgggtttttggatcaaccggtttctatgtgacacataccgtttttgatgttacgcatgttacaggaactcacgccaacatcgcctggtttattgtcgggctttcggttttcggattgcttaccggatacattttgaataagactaaaaaccggtacaggaaattagctatcgttcacggaatattcaataccgttttatttgttcttgtgttaatcaactttgcaacggaatcagctcggccgatctga

SEQ ID NO: 74140 - protein, 138 aa, Unknown
  Obtained from environmental sample
  SIGNAL (1)...(25)
  misc_feature (1)..(138): Xaa is any amino acid
MNIFLLWSHPIIQVIAALLGVYAMAQGAGRFISQRGKRRLFQWKKHVKFGTIALLLWVFGSTGFYVTHTVFDVTHVTGTHANIAWFIVGLSVFGLLTGYILNKTKNRYRKLAIVHGIFNTVLFVLVLINFATESARPI

SEQ ID NO: 74141 - DNA, 561 bp, Unknown
  Obtained from environmental sample
  misc_feature (1)..(561): n is a, c, g, or t
ttgatattaaatcaggagttttatgatagtaatcacattcaaaaaacactgaaattgaggaaaattatgaaaacacaggaaaatttatcgacagcttttgccggagaatcgcaggcgaaccgcaaatacctntgtttcgccgaacaggccgaaaaagaaggctataaaaatgcagccaggctcttccgcgccgcagctgaggctgaacaaattcacgctttcgccgagttcagagaaaagggcggggtgggcagcacggctgaaaacctcaaggctgcaaaagaaggagaaacatacgagtttaccgaaatgtatcctccgtttatcgaaaccgctcaagccgagggacaccatggcgcggctaaaatattcaactttgcctgtcaagctgaaaaggttcacgccgacctctatgaagacgcgctcagaaatctcgggggagatgaaaacgacctaaattattacctatgtcctatttgcggtttcattcataaaggaactgcgccggttgttccgtgccccatttgcggatcaaagccttctattttcaaagaattttga

SEQ ID NO: 74142 - protein, 186 aa, Unknown
  Obtained from environmental sample
  DOMAIN (27)...(142): Rubrerythrin
  misc_feature (1)..(186): Xaa is any amino acid
MILNQEFYDSNHIQKTLKLRKIMKTQENLSTAFAGESQANRKYLCFAEQAEKEGYKNAARLFRAAAEAEQIHAFAEFREKGGVGSTAENLKAAKEGETYEFTEMYPPFIETAQAEGHHGAAKIFNFACQAEKVHADLYEDALRNLGGDENDLNYYLCPICGFIHKGTAPVVPCPICGSKPSIFKEF

SEQ ID NO: 74143 - DNA, 819 bp, Unknown
  Obtained from environmental sample
  misc_feature (1)..(819): n is a, c, g, or t
atggcacacgtttcttcnggcgagcaagaccatcccgaaggagtattcccgctcgtcaataaaccggccatctcgtttatcgtggacgagttcctcgcggcgggcattcaggaactgctgatcatcacgagccgacgcaaaaaggcgctcgacgattattttgatcacgaaatcgagttggaagaggttttccggcgcgagggcaaaacccgcctcctgcagactgtagcgcccgccccgcttgccgtgagtttcatacgccagcaggagatgcgcggcaccggcgacgcgattctgctggccgagggttttgcggccggacagcctgtgtgtgttgcctaccccgatgatatcgtgctgggccccgcgccgctcgccgctcagctcgcgcgggcagcgcgcactcccgcagacgccgttttgggggtgatgaccgtgccgcgttcggagacgaaccgctacggcgtcatcgcgcccggcgatgatggcttggttcgcggcattgtcgaaaaaccggctgtcgaaaatactccgtcctgcctcgcgaccatcgggcgctatatcctgccgcctgagatatttccgatactgcgcgaagagaaaaagcgccacgccgggggcgagttttttctgaccggcgcgatcaatattctggcagaacagggcaaggcgcgctacaccgagtttgagggcaagcgcctggacgtgggcgacaccctcggctatatccaggcgaccgtcgaatacgcgctcaccatgccggaactcgcgaaggaacttgcggagtggctcaaggcgcgggtggaaaaagcattataa

SEQ ID NO: 74144 - protein, 272 aa, Unknown
  Obtained from environmental sample
  DOMAIN (16)...(252): Nucleotidyl transferase
  misc_feature (1)..(272): Xaa is any amino acid
MAHVSSGEQDHPEGVFPLVNKPAISFIVDEFLAAGIQELLIITSRRKKALDDYFDHEIELEEVFRREGKTRLLQTVAPAPLAVSFIRQQEMRGTGDAILLAEGFAAGQPVCVAYPDDIVLGPAPLAAQLARAARTPADAVLGVMTVPRSETNRYGVIAPGDDGLVRGIVEKPAVENTPSCLATIGRYILPPEIFPILREEKKRHAGGEFFLTGAINILAEQGKARYTEFEGKRLDVGDTLGYIQATVEYALTMPELAKELAEWLKARVEKAL

SEQ ID NO: 74145 - DNA, 432 bp, Unknown
  Obtained from environmental sample
  misc_feature (1)..(432): n is a, c, g, or t
ttgccggacgattgcggggctacatgcctttttgccgttacatgcggagaaaaaatgatactcggccgtcttggcgacggcatgatccttgccgtcggtaaagggcagcccgtactgcttgaagacgataaggagtttgccaatcttaccgactgtcttgatgacgcgttatattatgacaagtgggaaataaaagaaataaacgcgcgcgattacgaagccgtaattgtgtgtaccgacggtattgccgattttttacgcccggacaggaaaattgattttgcctttggcctggttaaggaatataaaaacacggaaagaaaaaaaaggcataacgaaataacaaaatgtattagtgagtggaatgttcccggaaattttgacgacaggacaatagcctgtttataccgtgaggattttcaaaatgaatga

SEQ ID NO: 74146 - protein, 143 aa, Unknown
  Obtained from environmental sample
  misc_feature (1)..(143): Xaa is any amino acid
MPDDCGATCLFAVTCGEKMILGRLGDGMILAVGKGQPVLLEDDKEFANLTDCLDDALYYDKWEIKEINARDYEAVIVCTDGIADFLRPDRKIDFAFGLVKEYKNTERKKRHNEITKCISEWNVPGNFDDRTIACLYREDFQNE

SEQ ID NO: 74147 - DNA, 384 bp, Unknown
  Obtained from environmental sample
  misc_feature (1)..(384): n is a, c, g, or t
ttgttagcttttcttattgcgatttttggtgttctgaatacggttctgatgtccgtgtttgagcgctatcaggagatcgggatactcaaaagcatgggcgccttgcctaaagatatttttcagatggtatttacggagaccacaatactctgcgcttttggaggattgtttggcattgggttgtcctggttattttccggcatatcggaattggcagtgcggcattttcttccgtttgcgcctgcgggaaagctcatattaatagatggagcgacagccttgttctcatttatcgcaatagcatttattggtatgttgggcagtgtttatccggcctggcgcgcggcatcgattcggccgctggagagcataagaaatgaataa

SEQ ID NO: 74148 - protein, 127 aa, Unknown
  Obtained from environmental sample
  DOMAIN (1)...(120): Predicted permease
  misc_feature (1)..(127): Xaa is any amino acid
MLAFLIAIFGVLNTVLMSVFERYQEIGILKSMGALPKDIFQMVFTETTILCAFGGLFGIGLSWLFSGISELAVRHFLPFAPAGKLILIDGATALFSFIAIAFIGMLGSVYPAWRAASIRPLESIRNE

SEQ ID NO: 74149 - DNA, 399 bp, Unknown
  Obtained from environmental sample
  misc_feature (1)..(399): n is a, c, g, or t
gtgagcgccataaagggcggcgaggtaacggtcgcgattgggtcgttcacaacgcaaaccgccaaaagcggcctgcagcgtctcggaaaaggcaaaaaagcttcttccgtcggtctcaggcacatcgcgcaagcgcatcgctccagtccctccatcaccctggatatccgcgggctgcgcgcgtcagacgccgaagaaaaacttcgcgcgtatctcgacgacgccggtctcgcgggtctggagatggcgacgatcatccacggcaaaggcacggggagcctgcgcgaggtcagccatcgcgttctctcgaaacatccctttgttgtgtcttttgggttcgcgcatccagcggcgggcggcgaaggcgcgacggaagtgaagatcagtccggcgagataa

SEQ ID NO: 74150 - protein, 132 aa, Unknown
  Obtained from environmental sample
  DOMAIN (54)...(129): Smr domain
  misc_feature (1)..(132): Xaa is any amino acid
MSAIKGGEVTVAIGSFTTQTAKSGLQRLGKGKKASSVGLRHIAQAHRSSPSITLDIRGLRASDAEEKLRAYLDDAGLAGLEMATIIHGKGTGSLREVSHRVLSKHPFVVSFGFAHPAAGGEGATEVKISPAR

SEQ ID NO: 74151 - DNA, 834 bp, Unknown
  Obtained from environmental sample
  misc_feature (1)..(834): n is a, c, g, or t
gtggttgacggaagggtccaccatacatttaatgaaccggcttactttgactatctctccatgatgaacagatggtatagtaagaactatataagcaaagactttactacaattagaaatatagcatccgaattcgccaacggcaggatcggctctctaatggaaagcgccggttcttatttcaccctatctaaagagtttggtatcggcgttacgaccggtccatatccccgcgtaaatcctggcgatatgtaccataacgacatcttttatttcccccagaacggtaatccgaattcggttagcgccaaatccaaaaatattgagttagcccttaactggctaaactacggctttactttgcagggttcgggggtcatcaacttcggggtaactggggagacctgggtgatgggcagcgatggaattcctaaatttaccgactatgcgctgaatcatccgactattcctctttccgacgcggaatacactttacgtatgcatacatgctggtctaagtaccgctacggcgacgacatttccatcatcgcaaatgtagctgtacctgagacttgggctttccgcgcacgctggggcgacgacccaacctcggataacgcctacgcgttaccccccctttcgtttactcctgaccaagccgcggagattggccctcttattaccaacattaatacgtatgccgaagagatgacccttaagtttatcacagggacgttctcgcgctccgattttgatacctttacgagtaccgtccagtccctgggtatgccgcggctgctgcggatataccaagatgcgtacgacgctttttaa

SEQ ID NO: 74152 - protein, 277 aa, Unknown
  Obtained from environmental sample
  misc_feature (1)..(277): Xaa is any amino acid
MVDGRVHHTFNEPAYFDYLSMMNRWYSKNYISKDFTTIRNIASEFANGRIGSLMESAGSYFTLSKEFGIGVTTGPYPRVNPGDMYHNDIFYFPQNGNPNSVSAKSKNIELALNWLNYGFTLQGSGVINFGVTGETWVMGSDGIPKFTDYALNHPTIPLSDAEYTLRMHTCWSKYRYGDDISIIANVAVPETWAFRARWGDDPTSDNAYALPPLSFTPDQAAEIGPLITNINTYAEEMTLKFITGTFSRSDFDTFTSTVQSLGMPRLLRIYQDAYDAF

SEQ ID NO: 74153 - DNA, 885 bp, Unknown
  Obtained from environmental sample
  misc_feature (1)..(885): n is a, c, g, or t
atgatggtagagagaagtagctgggctaataaggtcttgacctatttcaatttattgcttctgattctngtcggacttatatgcctttacccaatgctgcacgtgcttttcggctcgttcagcgatcctcgccggctattgcttcataaaggcccgctgttgtaccccctcggatttatcacccggggatatgagatcgtcttcgagaaccccaatatatggattgggtacatgaataccctgttttatgtggtggttggcacgatcgcgcgtacgtttatgacaatgcttggcgcgtatgtcctggcccagaaaagctttatgccgcgccgtatcctgatgctaatcttcgtgttcaccatgtatttctcgggcggcctcattcccaactttatcctcgtcatgaaattaaatttgttaaatacgcgaatggcgttgattataccgagcctgatagcgacgtggaatatgattatactcaggacggcctttgtccatgtacctgtttctcttgaggagtcggcaaggctggacggggcaggggaccttacagtccttttccgcatcttagtaccaacagcaaaagcgacaattgccgttataatcatgtattacgccgttggtgaatggaattcatggttcgcggcggcgatatacctgcccgcaaggcgggatttatttcctttgcagctcttcctgcgggaaattttaattgccaactctttgagcggtaatactactgcttccgcgggcggcgccgtttcggatgccgacgccgtaatcggcctgattgaggaggtcgtgcgttatagcaccataatcgtcgcaactatacccgttctttgcatatancccggtggtgcaaaggctcgtgccgaattctga

SEQ ID NO: 74154 - protein, 294 aa, Unknown
  Obtained from environmental sample
  misc_feature (1)..(294): Xaa is any amino acid
MMVERSSWANKVLTYFNLLLLILVGLICLYPMLHVLFGSFSDPRRLLLHKGPLLYPLGFITRGYEIVFENPNIWIGYMNTLFYVVVGTIARTFMTMLGAYVLAQKSFMPRRILMLIFVFTMYFSGGLIPNFILVMKLNLLNTRMALIIPSLIATWNMIILRTAFVHVPVSLEESARLDGAGDLTVLFRILVPTAKATIAVIIMYYAVGEWNSWFAAAIYLPARRDLFPLQLFLREILIANSLSGNTTASAGGAVSDADAVIGLIEEVVRYSTIIVATIPVLCIXPGGAKARAEF

SEQ ID NO: 74155 - DNA, 564 bp, Unknown
  Obtained from environmental sample
  misc_feature (1)..(564): n is a, c, g, or t
atgggaaagaaaccggttttgggattaattggtttatccgacggggatccacaggtacatgcgcagctaaaggatatcgtgcaggcgcaggtggatgttattgccgctgaactgcgtaaagagggcagtgttgatgttatcacggcggataatcttgtggcatccgtatcttcggcgaaaattgaagcggaaaaattaaaacaaaaaggcgttgacggtacgatattttcttacggggtatttgcctttcccaatttttcggccattgccgcaaagaacgggcagggaccttttcttttggcggcgaatctcaaccctgactggccgggaatggtggctatgcttgccgcgggcggcgctttgcatcatcttggtatccggcactatcgggccgccggagatttccgcgatcctgaagtactgcaaaaaatcattcgtttcgcgaaatgcgcaaaagttgtaacccggctaacggccagaaatacggccttatcggaggacggagtctcggaatgtacagcgctactgtcagtatgcaggattggcagaaaaaattcggggtga

SEQ ID NO: 74156 - protein, 187 aa, Unknown
  Obtained from environmental sample
  DOMAIN (2)...(159): L-fucose isomerase, first N-terminal domain
  misc_feature (1)..(187): Xaa is any amino acid
MGKKPVLGLIGLSDGDPQVHAQLKDIVQAQVDVIAAELRKEGSVDVITADNLVASVSSAKIEAEKLKQKGVDGTIFSYGVFAFPNFSAIAAKNGQGPFLLAANLNPDWPGMVAMLAAGGALHHLGIRHYRAAGDFRDPEVLQKIIRFAKCAKVVTRLTARNTALSEDGVSECTALLSVCRIGRKNSG

SEQ ID NO: 74157 - DNA, 759 bp, Unknown
  Obtained from environmental sample
  misc_feature (1)..(759): n is a, c, g, or t
atgccacgacgctacgcctatcttttttctttccgcatctttgcgggcgagatgcatcagcttctggagaaggtcgctgaaatggcggcacaggaaacgcaggcgcatatcactttcgtcaccgccgcccgtctcattaaggcgcatcttttcaagaggcacaggggatatttcaaatccgcgcagcttctcattccgcagggcagagggatgctctgggccgcaaagcgtttccggcagccgcttgcggaggtttttgccccgtcggatgtctttatgaatatcctgcgcagtgcccttgagcataagcaaaccacctttttccttggtgccaaaccagacaccataattgccgctgtggataacctccggaaaagttttcccgatctgcgcgtcgtgggcatccaccacgggtattataaagccgaacgcgccggggatatcgcaaccgcaatccgaaaatcatcgccgacgtttctctttgtgggcatgggctatcccaagcaggaacgctgggttgtgcaaaatttcaagcctatggccgcaaccatagcgatttgcgtcggcaatacctttgacctctgcgcgggagaggcgacacggggtcctatatggatgcggcgcatgaacattgaaagccttgcaaaggtgcgccataatccgctgcgtttctttcgcgtcttctggctcattgtgcttgtgtatgtggtctactggaacaagatcttccacagaaaaaaatcgcagggattgagttag

SEQ ID NO: 74158 - protein, 252 aa, Unknown
  Obtained from environmental sample
  DOMAIN (56)...(227): Glycosyl transferase WecB/TagA/CpsF family
  misc_feature (1)..(252): Xaa is any amino acid
MPRRYAYLFSFRIFAGEMHQLLEKVAEMAAQETQAHITFVTAARLIKAHLFKRHRGYFKSAQLLIPQGRGMLWAAKRFRQPLAEVFAPSDVFMNILRSALEHKQTTFFLGAKPDTIIAAVDNLRKSFPDLRVVGIHHGYYKAERAGDIATAIRKSSPTFLFVGMGYPKQERWVVQNFKPMAATIAICVGNTFDLCAGEATRGPIWMRRMNIESLAKVRHNPLRFFRVFWLIVLVYVVYWNKIFHRKKSQGLS

SEQ ID NO: 74159 - DNA, 612 bp, Unknown
  Obtained from environmental sample
  misc_feature (1)..(612): n is a, c, g, or t
atgaaaatgagcgactacctgtcaggtatggatttcagcaaaaggattctggaaataggcccgcttgcatcccccctgctcacgaaaaatgacgcgaatgtatactatgccgatatattagcgaccgaagaagtgaaggcgctttacagaaagaattcaaaagtgaatcaagacgccatttgcgaaatagatttcgtcattcgcgggagctatacggaaacattcaggaacgtgcaaaaatttgattatatactctcccaccatgtgctggagcacatgccgcgcctgattgaattttttcaggatgctgtgaacatattgagtacgcgcggcaagatgtacctatttttaccggactgccgttattgctttgattactttcgcagcccgacctcctttgcggagctgtattatatccatacacagggtcttgcgttcgcgccctggcaggttttagacgccttcaatatgtttgtgcccttaaacaatccgaaggcattcggcgcaaacacgcggctgttccccctgcttgcccgacgcaggtcgtgggacaaagttaaaacaactttcgaaaaagccagtgcatggcgaatatggctgtcctgtcgataa

SEQ ID NO: 74160 - protein, 203 aa, Unknown
  Obtained from environmental sample
  misc_feature (1)..(203): Xaa is any amino acid
MKMSDYLSGMDFSKRILEIGPLASPLLTKNDANVYYADILATEEVKALYRKNSKVNQDAICEIDFVIRGSYTETFRNVQKFDYILSHHVLEHMPRLIEFFQDAVNILSTRGKMYLFLPDCRYCFDYFRSPTSFAELYYIHTQGLAFAPWQVLDAFNMFVPLNNPKAFGANTRLFPLLARRRSWDKVKTTFEKASAWRIWLSCR

SEQ ID NO: 74161 - DNA, 639 bp, Unknown
  Obtained from environmental sample
  misc_feature (1)..(639): n is a, c, g, or t
ttgcttgcggacaaggacaacgccaacgcctggaattccctgggattctgcatggcctccctgtcccgccatcacgaggcgcagcggtatttctccgaagctctgaagcgcgctcccgacgacactgtggcgctctacaacctcggcatggtctgtctcaacctcggcaaagattccgcagccggacgccatttcaacgcctgcctcaagctccggccggatcacgttttcgcccgtattcgcctgggacagttggccgccaaggcaggccgccccgccgtcgcccgccgctgttttctgaaagccgccgaacgcgaggaaagcgccggtctggcccaccgcctgcttgcccggctggccttgagcagacgcgactccgcgcaggcccgcgatcatctgcacaaggccctgctgtataatccgcaggatgccccgtccatgcacatgctggccggactctgcctcgacggcggcgaggatcccgccatcgccgaaatgctggcccgccagagcgcggccctcatgccggaactcaccgccgcatggcaggaactgagcagggcgcttgcggcacagggccgggaaacggaagcggccgccgcgcaggcgcgcgcggcaaggatgccgcgccgaatgtga

SEQ ID NO: 74162 - protein, 212 aa, Unknown
  Obtained from environmental sample
  DOMAIN (42)...(75): Tetratricopeptide repeat
  misc_feature (1)..(212): Xaa is any amino acid
MLADKDNANAWNSLGFCMASLSRHHEAQRYFSEALKRAPDDTVALYNLGMVCLNLGKDSAAGRHFNACLKLRPDHVFARIRLGQLAAKAGRPAVARRCFLKAAEREESAGLAHRLLARLALSRRDSAQARDHLHKALLYNPQDAPSMHMLAGLCLDGGEDPAIAEMLARQSAALMPELTAAWQELSRALAAQGRETEAAAAQARAARMPRRM

SEQ ID NO: 74163 - DNA, 867 bp, Unknown
  Obtained from environmental sample
  misc_feature (1)..(867): n is a, c, g, or t
ttgaacgaccaggttcggaccttcagggacaccctctcaaaagccccctcccgctgtctggcggtgggcgacaaagaatccaaagtcgtgggggttatttccgagggcgacctggcgaaagaacccaatgtggaagtggttttagtcgatcacaacgagccgtcccaggctgtagagggaatagaaaattacaagatacttgagatcatagaccaccacaggctgggcaacctttccacgcgttacccgatcacctttatcaaccaggtggtaggggctacgtgcaccgtcatcgccaacctgtaccgggaacagaaaatcccgctgaagaaaaacatagcgtcgatcctgctctgcggcatcctctctgacacgctttccctgcagtcggcgacaacaactgaaacagacatcgaggccgccgagtatctttcctcaatcaccggcctggaaattaaaacactttaccaggaactgctggccgcggtgagcgggattaactccctgccggcgcgggagcttataaacctggacatgaaggaatacgccgagcataacgttacctttacgataagccagatcgagaccgacaaccccgggcttctggtcgaccgccgcgctgagatcatttccgctttggaagagccgagggccgataaaaaccatcttttctcggcgctgcttgtgactgacgtaaccgcccttgattcgcttctctttatgagcggggaaaaggatttcctcaaccatatcaatttcccagtcaccgccgggggcatttacgagttaaagggcgttgtctcgcgaaaaaagcagctaacgccccttatgtcggagcttgtcgccagatacgcggtatgtaagtaa

SEQ ID NO: 74164 - protein, 288 aa, Unknown
  Obtained from environmental sample
  DOMAIN (1)...(122): DHH family
  misc_feature (1)..(288): Xaa is any amino acid
MNDQVRTFRDTLSKAPSRCLAVGDKESKVVGVISEGDLAKEPNVEVVLVDHNEPSQAVEGIENYKILEIIDHHRLGNLSTRYPITFINQVVGATCTVIANLYREQKIPLKKNIASILLCGILSDTLSLQSATTTETDIEAAEYLSSITGLEIKTLYQELLAAVSGINSLPARELINLDMKEYAEHNVTFTISQIETDNPGLLVDRRAEIISALEEPRADKNHLFSALLVTDVTALDSLLFMSGEKDFLNHINFPVTAGGIYELKGVVSRKKQLTPLMSELVARYAVCK

SEQ ID NO: 74165 - DNA, 711 bp, Unknown
  Obtained from environmental sample
  misc_feature (1)..(711): n is a, c, g, or t
gtgggggcgaaagccattgataccgaacctttcagggttcacggaaaccgcgaggccctgtccctggaactgctgttgggttatgatcttcagcncgcgacatggatatgggaatggaacgtgtgggatacggaagccgcgccgtttgccacaaggctccgggggcgttatacgatttttgagggccaggcagatcccggattccgcaagggcgcggacgggaagcggaggtatgactacaccgggtatccctctaatatgccgggggatgaaaacttcggtttaggaaattacgatatcggctggatggttttctggaatcccggatcggatttgcgtatcggcaattcgctgaactttaccaaaggctttgcgtataacggaataccggatggcaccgaagacgacagaacaaccatttccggctggtcggaagaaatccggatacgttacaaacggttagtagcaaaggggtcggtcgcttttaatctgtgggggccggtaagctcggacagggaaaacaaccagacctatcccatgttgtggagttttgacgtagcctgggggcttactccgaggccgtcgctgatggattctgttaatcgcgtgggagtccgctggaacggtgtaatccgcgaccggaattcgcctaacgcgtcagacggcagggatcatcaggaattggttctgtactttaattatggattctaa

SEQ ID NO: 74166 - protein, 236 aa, Unknown
  Obtained from environmental sample
  misc_feature (1)..(236): Xaa is any amino acid
MGAKAIDTEPFRVHGNREALSLELLLGYDLQXATWIWEWNVWDTEAAPFATRLRGRYTIFEGQADPGFRKGADGKRRYDYTGYPSNMPGDENFGLGNYDIGWMVFWNPGSDLRIGNSLNFTKGFAYNGIPDGTEDDRTTISGWSEEIRIRYKRLVAKGSVAFNLWGPVSSDRENNQTYPMLWSFDVAWGLTPRPSLMDSVNRVGVRWNGVIRDRNSPNASDGRDHQELVLYFNYGF

SEQ ID NO: 74167 - DNA, 666 bp, Unknown
  Obtained from environmental sample
  misc_feature (1)..(666): n is a, c, g, or t
gtgcatcgctatgtgctatataaacctaacgcaaggctcaaccgtgcaatggcggcaaattgtggcgaatggactgtgcctgatttcagcgtagcgtttccttatgggcttggctcatctccggcaacatcttcctcgcttggcactgcatttgcgcagcaccttgtggtgcagttgggaacagccgatacagaccccaatcaccaatatttgggacataatgccaactcggatttgcagggcaaaactcggtacgatagaggcaaatacttttggaaagttgccaatgccaaaaagaaagaccatcctacattccactgggaaaaaagagaagtagcgggcatagcccataattacgacaaaatggctatagatgctgccatatatttataccccgttaaagcctctgccaaagaaacaccggcaactccatccaaaaaaacaccgccagcctcaaccaaagaaacaccagaaccccctgctgaggcaagcaattcgatgtattgcgtaatatacatgaagggcaaagttacaacttgcacagaatataaagacactaacaaaaataaatccacgtgcaatacacgaaataacaatttaaaatttattaaaggtagtgctgtatggacatccaccaaacccagtgttaaatgcggaaaggattaa

SEQ ID NO: 74168 - protein, 221 aa, Unknown
  Obtained from environmental sample
  misc_feature (1)..(221): Xaa is any amino acid
MHRYVLYKPNARLNRAMAANCGEWTVPDFSVAFPYGLGSSPATSSSLGTAFAQHLVVQLGTADTDPNHQYLGHNANSDLQGKTRYDRGKYFWKVANAKKKDHPTFHWEKREVAGIAHNYDKMAIDAAIYLYPVKASAKETPATPSKKTPPASTKETPEPPAEASNSMYCVIYMKGKVTTCTEYKDTNKNKSTCNTRNNNLKFIKGSAVWTSTKPSVKCGKD

SEQ ID NO: 74169 - DNA, 864 bp, Unknown
  Obtained from environmental sample
  misc_feature (1)..(864): n is a, c, g, or t
ttggtggcgcagctcttttatgagctgcgcaacgagtttgctgggcaggcggcccgcaaggggctggagctgcgcgtcgctgcgcccttgctgtgtgcgcactccgatccctcgctggttggtcagatcctgcgcaatctcgtctcgaacgccatcaagtacacccgcagcggctgggtggagctgcgtgccatcgcacgcccctcgagcgcagtccgcgttgaggtcgctgacaccggtgtcggcatcccgccggaccagctggactacatctacgaggagttctaccaggtaggtgtcgcgagcaatgcgacacatgagggctacggcctgggcctcgcaatcgtcaagcgcttaggtttgctcctgggactgaagatcgaggtgacctcagaggtgggccgcggctctgtgtttgcattcgagctgccggtgggcgcggtccctgcgatgcaggcgcccgtcatggtgaagcccgtggctgccccagccacaggcgcacagactatcctcctcgttgaggacgaccctggcgtgcgcaatgcgacgagcatgctgctcacggtggagggatacagggtgctgaccgcaggttccctaaacgaggccactcagaaggccagggagagccccgtggtggacctcctgatcaccgactatcatctggccgacagccagaacgggctggaggtcatcgctgccctgcgcgccatcatcggggatggcttgaaggcggtcatagtcacgggcgacacatcctccacgatccgcgatctcgccccagacccctgcatgcgcttcgccagcaagccggtgcaggcggacgagctgctgcactcggtgcgcgagcttctgccacgctga

SEQ ID NO: 74170 - protein, 287 aa, Unknown
  Obtained from environmental sample
  DOMAIN (168)...(282): Response regulator receiver domain
  misc_feature (1)..(287): Xaa is any amino acid
MVAQLFYELRNEFAGQAARKGLELRVAAPLLCAHSDPSLVGQILRNLVSNAIKYTRSGWVELRAIARPSSAVRVEVADTGVGIPPDQLDYIYEEFYQVGVASNATHEGYGLGLAIVKRLGLLLGLKIEVTSEVGRGSVFAFELPVGAVPAMQAPVMVKPVAAPATGAQTILLVEDDPGVRNATSMLLTVEGYRVLTAGSLNEATQKARESPVVDLLITDYHLADSQNGLEVIAALRAIIGDGLKAVIVTGDTSSTIRDLAPDPCMRFASKPVQADELLHSVRELLPR

SEQ ID NO: 74171 - DNA, 759 bp, Unknown
  Obtained from environmental sample
  misc_feature (1)..(759): n is a, c, g, or t
atgctcgccgccagggacgagaccaaaaaagtccttaccatcgggtatcagaaccgcttccggcccgacagtcttttcctcaaggccgagtgcgaaaagggcgttctgggtgaaatatactttgccagggcaacagccattcggcgcagggcggttcccacctggggggtgtttctggacgtggaaaaacagggtggcggccccctcatcgatataggaacccacgcgctggatctcaccctcttcatgatgaataattacgagcccgcttacgcggtgggaaccgtgtaccataaactgaacaaggataaaaacaccggtaacgcctggggcgattgggacacgaaggcgttcaccgcggaggattcggcctttggttttattgtgatgaaaaacggcgcaaccattattctcgaatccagctgggccctcaatatcacggatgaaaaggaagcggtgaccaccctctgcggaacaaagggcggcgcggatatgcttaaaaacggcgatttgctcctgaacggcgtcaaaaacggcaggccctataatatgagcccgctgcttcaaagcgggggagttgccttctacaagggcgattcggaaaagagtatggataaggaagcttgtaacttcagggatgccgtactgggtaaggcaaagttatatgttcttcccgaacaggcgttagttgttacgatgatcctggagggaatttacaattcagcggcatcgggcaaagcccattattttgacaactga

SEQ ID NO: 74172 - protein, 252 aa, Unknown
  Obtained from environmental sample
  misc_feature (1)..(252): Xaa is any amino acid
MLAARDETKKVLTIGYQNRFRPDSLFLKAECEKGVLGEIYFARATAIRRRAVPTWGVFLDVEKQGGGPLIDIGTHALDLTLFMMNNYEPAYAVGTVYHKLNKDKNTGNAWGDWDTKAFTAEDSAFGFIVMKNGATIILESSWALNITDEKEAVTTLCGTKGGADMLKNGDLLLNGVKNGRPYNMSPLLQSGGVAFYKGDSEKSMDKEACNFRDAVLGKAKLYVLPEQALVVTMILEGIYNSAASGKAHYFDN

SEQ ID NO: 74173 - DNA, 867 bp, Unknown
  Obtained from environmental sample
  misc_feature (1)..(867): n is a, c, g, or t
gtggaatatcaaacaggggcagtagttcacgagggcatacatggagttttggcaagcatgacagatgcgagtggtgcccgaacagcggataatgttcccggatggtttcatgagggaggcaatacctggcttcagcaacaggcagatgcgcaacgcacaggcagatttggcgattgggcagacctcaacggtcccgcttttatggctccgttcatgcctatagagtcttatagcggatggctgcaagacggaagttttggcggtccagatgcagagggagttaatatgaatggctcagacggcaagcagatatgcacatggcggagatggcttggaggtaatcagtacggaaatggattcccaacatatttgggcgagtggctgggcaaaggagctgttccctggatatggatgaatgccaaaaagaacggcagtgccaatggaaactataaaaatgttctttgggtaatatcgcagggtttaggcgacactcaaaccaggcggctcataatggaatatagagccaagcaggctactcttgatatgggaaattggactgaatcggtaagaaaactcttgaacggcaaccatttcgggcaaaatatcggacctgagtgggaaccttactggataaatgttgcagtttggaaagcaaccccttatgccaaaacaaccaatgacggaactggagtattgacccctgacccgattacccttccagcttggtctggtgcaaaccaaattcctctaaatgtgccagcaagtttgggcacgatatccattgattttatgcccgacacaaccaatatgacttttcaaatgcctatagagcaacagatggaaccgctgtttacagcgaacctttag

SEQ ID NO: 74174 - protein, 288 aa, Unknown
  Obtained from environmental sample
  misc_feature (1)..(288): Xaa is any amino acid
MEYQTGAVVHEGIHGVLASMTDASGARTADNVPGWFHEGGNTWLQQQADAQRTGRFGDWADLNGPAFMAPFMPIESYSGWLQDGSFGGPDAEGVNMNGSDGKQICTWRRWLGGNQYGNGFPTYLGEWLGKGAVPWIWMNAKKNGSANGNYKNVLWVISQGLGDTQTRRLIMEYRAKQATLDMGNWTESVRKLLNGNHFGQNIGPEWEPYWINVAVWKATPYAKTTNDGTGVLTPDPITLPAWSGANQIPLNVPASLGTISIDFMPDTTNMTFQMPIEQQMEPLFTANL

SEQ ID NO: 74175 - DNA, 741 bp, Unknown
  Obtained from environmental sample
  misc_feature (1)..(741): n is a, c, g, or t
atgagggaaaccgcgcgggatatttgcacggcccagttggggatacgaaccaaacgggagctggatctggaaaaagaccaggaattgacagccacacgctttaccaaacttgacgaccgtatacatgatctntgcgtcggcgccacccgccgccttgttcccagtaaatcgtattatgaccatgaccgggtcctatcacgccttgcgactttaaagaaattaaaattatgcacgtatgagaacggcggctatacgttcaggaaaaactggcgggaagatttgcaggccaacggaagatacaacgtgtttcttacggcccgtgatcagcttcaacataccgacgcttcccttatgaaaatatactcaggcgaacagggatggattaccggaaaaataacaaaagtataccgtaccgacgatgacgccagcaacaaccacgccgttataatggagagtattgacggcaaggcatatttcattccgcttttaaaaaaaccggaacttattgaccgtaaagtacggtcccccctaaaggaaggcgatcttgtatcaattaaggcgtttaaaaatcagaggggcaggttaacgccttgttttttcaaacaagggataaaatccgttcaaaaagaaattatacgaaatcagtattcaaacgccttttcagaatacataacaaacaacatttcagaaacaacccaggctaccgtcaaatcaccttcccatactgaatggcaacaatga

SEQ ID NO: 74176 - protein, 246 aa, Unknown
  Obtained from environmental sample
  misc_feature (1)..(246): Xaa is any amino acid
MRETARDICTAQLGIRTKRELDLEKDQELTATRFTKLDDRIHDLCVGATRRLVPSKSYYDHDRVLSRLATLKKLKLCTYENGGYTFRKNWREDLQANGRYNVFLTARDQLQHTDASLMKIYSGEQGWITGKITKVYRTDDDASNNHAVIMESIDGKAYFIPLLKKPELIDRKVRSPLKEGDLVSIKAFKNQRGRLTPCFFKQGIKSVQKEIIRNQYSNAFSEYITNNISETTQATVKSPSHTEWQQ

SEQ ID NO: 74177 - DNA, 432 bp, Unknown
  Obtained from environmental sample
  misc_feature (1)..(432): n is a, c, g, or t
gtggataggcttgggctttaccatagccctggccatcaccggggccgccctgagcttcggcggcgcggcggcctccgccccggccacagccctttccgcgctggagaaagccaccaaagtcgtcagcgtgacgacccagatcatcggcgccgccagcaagataggcgaggggggcgtcggcatagccgcggccgtgaaccaatacgacatcgaaaagagccgcatcaccgaaaaggaactggaggccatactggcccggcttcaggaagccaccgaggtggaggaggaattcttgaagaccgtgatgaagaaattcgaggatatgctggccaaggtcagcgacctggtcaaggccaacaacgagacccaaaccgccatactgggcggcggcgacatgggcgcctcaatgagcatggcctaaggagtttttaa

SEQ ID NO: 74178 - protein, 143 aa, Unknown
  Obtained from environmental sample
  misc_feature (1)..(143): Xaa is any amino acid
MDRLGLYHSPGHHRGRPELRRRGGLRPGHSPFRAGESHQSRQRDDPDHRRRQQDRRGGRRHSRGREPIRHRKEPHHRKGTGGHTGPASGSHRGGGGILEDRDEEIRGYAGQGQRPGQGQQRDPNRHTGRRRHGRLNEHGLRSF

SEQ ID NO: 74179 - DNA, 840 bp, Unknown
  Obtained from environmental sample
  misc_feature (1)..(840): n is a, c, g, or t
ttgtccgccggcctggccctggaagtgctgatggaggccctgggctcggaagagcgcaagaccgcggtcaagaccggcaccgagaccttgaaggccaaggccacggaacgcaaggaaatcaacgacaagcagttgaacgagatcaaagagcgcttggagaagatggccaaggagaagaccctgaacggctttctcaaggttttcaagttcatcggggccatattcggggccatcgccgccgcggccaccatagtggccggggctttgacggccaaccctctcctcatcgccggcggggcggtgacggctgtcttggccgtggattccatagtgaacgtggccagcgacggcaaatacggcatcgcccaaggggtggccgcgggcctgaaagccatgggcgtggatgaaaaaaccgcccagtggataggcttgggctttaccatagccctggccatcaccggggccgccctgagcttcggcggcgcggcggcctccgccccggccacagccctttccgcgctggagaaagccaccaaagtcgtcagcgtgacgacccagatcatcggcgccgccagcaagataggcgaggggggcgtcggcatagccgcggccgtgaaccaatacgacatcgaaaagagccgcatcaccgaaaaggaactggaggccatactggcccggcttcaggaagccaccgaggtggaggaggaattcttgaagaccgtgatgaagaaattcgaggatatgctggccaaggtcagcgacctggtcaaggccaacaacgagacccaaaccgccatactgggcggcggcgacatgggcgcctcaatgagcatggcctaa

SEQ ID NO: 74180 - protein, 279 aa, Unknown
  Obtained from environmental sample
  misc_feature (1)..(279): Xaa is any amino acid
MSAGLALEVLMEALGSEERKTAVKTGTETLKAKATERKEINDKQLNEIKERLEKMAKEKTLNGFLKVFKFIGAIFGAIAAAATIVAGALTANPLLIAGGAVTAVLAVDSIVNVASDGKYGIAQGVAAGLKAMGVDEKTAQWIGLGFTIALAITGAALSFGGAAASAPATALSALEKATKVVSVTTQIIGAASKIGEGGVGIAAAVNQYDIEKSRITEKELEAILARLQEATEVEEEFLKTVMKKFEDMLAKVSDLVKANNETQTAILGGGDMGASMSMA

SEQ ID NO: 74181 - DNA, 615 bp, Unknown
  Obtained from environmental sample
  misc_feature (1)..(615): n is a, c, g, or t
gtgaggacgggtatcgcgagtatgggatcaagagctgaaagaaatacgctccgcgaacgcaaaaagcggcacctcgatatctgtctgcaggaaaaaaactcccgaatcgaggatgggcgcggcgccgggtttggagccgttcattttgtgcatgagtgcctcccggagatcagcgccgccgagatcgacacaagcgccgaatttctgggcaagaggctttcgttcccgtttctcatttcctgcataaccggcggcaccctggacggttccccgctgaatatttcgcttgccaaattagcgcagcgcagccgtgtcgctctcggcctgggctccatgcgcattctctttcatgaaccgaaggcatatacggattttgcggtgcgttcgcttgcgccggacgtccccctgctcgcgaatatcggcgtcgcgcagcttgcggaattcgcgccccagcgtatcctggagcttgcgcgcagcctggaggcggacgcgcttgtcgtccatctncatcccgggcaggagatagcgcaggcaggcggggatatcaattttcgcggcgccatggacgcgctctcggcgctgatcgatctggataagctgccgattataagttag

SEQ ID NO: 74182 - protein, 204 aa, Unknown
  Obtained from environmental sample
  misc_feature (1)..(204): Xaa is any amino acid
MRTGIASMGSRAERNTLRERKKRHLDICLQEKNSRIEDGRGAGFGAVHFVHECLPEISAAEIDTSAEFLGKRLSFPFLISCITGGTLDGSPLNISLAKLAQRSRVALGLGSMRILFHEPKAYTDFAVRSLAPDVPLLANIGVAQLAEFAPQRILELARSLEADALVVHLHPGQEIAQAGGDINFRGAMDALSALIDLDKLPIIS

SEQ ID NO: 74183 - DNA, 354 bp, Unknown
  Obtained from environmental sample
  misc_feature (1)..(354): n is a, c, g, or t
gtgccgcgttccaaaattcccgccatgatggacgccctggacaggatcgccaaaaaatacaagctcaagatgggcaccttcggccatgcgggcgacggcaacctgcaccccaccatcctgtgcgacaagcgcgacaaggaagaattccaccgcgtcgagcaggccgtggatgaaatttttgacgtggccctcgccatgggcggcaccctgtccggcgaacacggcataggcacctccaagtccaaatggatggaaaaggaaacctcgcgcggcaccatcctcttctcgcagcgtctgcgcaaggcccttgatcccaagggactcctgaatccctccaaactcgtggggatctaa

SEQ ID NO: 74184 - protein, 117 aa, Unknown
  Obtained from environmental sample
  DOMAIN (1)...(114): FAD linked oxidases, C-terminal domain
  misc_feature (1)..(117): Xaa is any amino acid
MPRSKIPAMMDALDRIAKKYKLKMGTFGHAGDGNLHPTILCDKRDKEEFHRVEQAVDEIFDVALAMGGTLSGEHGIGTSKSKWMEKETSRGTILFSQRLRKALDPKGLLNPSKLVGI

SEQ ID NO: 74185 - DNA, 306 bp, Unknown
  Obtained from environmental sample
  misc_feature (1)..(306): n is a, c, g, or t
atgacagattcggccgaggtggacgcctgcctgggccgcatggtggaagccgtcacggccggcggcgggcgcgtctgcatcacggcggatcacggcaacgcggaatgtatgcttgacgagcacaacgctccacacacggcccataccatgaaccccacgcccttcatcctcgtggagccggacggcgcgacaccccgcctgtacgagggacgccttgcggacatcgcccccaccatcctggccctctggaatgtgccgcaaccgccggaaatgacgggccgtcccctcacgcaggagcggaaatga

SEQ ID NO: 74186 - protein, 101 aa, Unknown
  Obtained from environmental sample
  DOMAIN (2)...(76): Metalloenzyme superfamily
  misc_feature (1)..(101): Xaa is any amino acid
MTDSAEVDACLGRMVEAVTAGGGRVCITADHGNAECMLDEHNAPHTAHTMNPTPFILVEPDGATPRLYEGRLADIAPTILALWNVPQPPEMTGRPLTQERK

SEQ ID NO: 74187 - DNA, 984 bp, Unknown
  Obtained from environmental sample
  misc_feature (1)..(984): n is a, c, g, or t
atggccgagcggccgagggccatcttgcggcaggaaggttacgtcaagcccccagttgcgctggccgaggcggtcaacgcccctaggcatgaaaatataaatctgacatctttgagtccaaacaaagcttggtactgcatcgagatgggtgacgggccggtttctatgggcattatgtccaagccattccacgaactgggagggctgtttgttgactacagggccagccgtagcaggtcattgacgatccgcaacaacgcgggcatccagttcatttctcccgttgatggcagcaagaggacggtccagctccccgcgggtgccagaacctccaacgccacttggtcgcctgacgggagcaacctggccttttatgttcacaccaatgacgcaacgcatatttgggtggcggacccttcgaccacaaaggctaggcagttgactgtaaaaccagttctggccacgttggtgactggcattgagttttcgggcgacggcaagcaagtctttgctgtcttgattcccgacagcaggcatccaatgcccattgcgccggccattgctacggggcccgtggtaaagacggcggaagacctgcagaaaaggcggctgaggacttttgccagccttatgtccacgccgtacgagcttcaattgtttgaatggcatacgacgggtcagttggcggcaatagacattgccaccaaggcggtccgcaagatagggcaaccaaagatggtgcgttccataagcccgtccgtagacggtaagcacgccatagtgacgaccatcaccaagcccttttcctttatggtcccgtttggcaattttggctcggttgaagaaatttgggatgccgatggcaaggtgctggccaaactgaatgaaacgagctcaacctggcacgggtccgcacaggctcccaaccaggtgatgacgcggccccgggtgcggggcagaaccaacaaggcaaaagagagatag

SEQ ID NO: 74188 - protein, 327 aa, Unknown
  Obtained from environmental sample
  misc_feature (1)..(327): Xaa is any amino acid
MAERPRAILRQEGYVKPPVALAEAVNAPRHENINLTSLSPNKAWYCIEMGDGPVSMGIMSKPFHELGGLFVDYRASRSRSLTIRNNAGIQFISPVDGSKRTVQLPAGARTSNATWSPDGSNLAFYVHTNDATHIWVADPSTTKARQLTVKPVLATLVTGIEFSGDGKQVFAVLIPDSRHPMPIAPAIATGPVVKTAEDLQKRRLRTFASLMSTPYELQLFEWHTTGQLAAIDIATKAVRKIGQPKMVRSISPSVDGKHAIVTTITKPFSFMVPFGNFGSVEEIWDADGKVLAKLNETSSTWHGSAQAPNQVMTRPRVRGRTNKAKER

SEQ ID NO: 74189 - DNA, 819 bp, Unknown
  Obtained from environmental sample
  misc_feature (1)..(819): n is a, c, g, or t
gtggagagggccgacggcttcaagtttcgcgtgaatgtcaccctgcccgaaaactttgtagagggttccaaactgccggcatttttctggttttaccccggcgagtacgccacgcaagcggactacgaccgcactttaagaaactacaataaaaacgaattcatcaactacggcagcagcgcaaagcaatttttcgtccgtctgggctatgcggtggtagagcctgactgcccgatagtggggcctgcggggcgcatgaacgacaactacccccacgacctgcgaaatacactatcggccattattgatttcttagacggcaagggtatgattgaccgcgcaaggctggccataggtggccatagctatggggctttttccaccgtgaacgcgatggtgcagacgccattcttcaaggcgggaatagccggggacggtgcgtacaacaggaccctcaccccccttggcttccaaagcgaaaggagggatttctgggaggcccgcgagacctacctagccatgtcgccgttcatctatgccaacaacataacaggtgccctgctcatgtatcatgggcaatttgaccaaaacgtggggacggatccaataaactctacgaggctattcaacgcgctatcgggcctaggcaagccgacggccatgtatttgtacccccatgaagaccacggccctgcagcaaaggaaacattgctagacctatgggcaaggtggaccgcgtggctggataagtatgtaatgaaccccataaagcccgagcctaagaccgaagccccggttgaagatgcccaggtgccataa

SEQ ID NO: 74190 - protein, 272 aa, Unknown
  Obtained from environmental sample
  DOMAIN (56)...(255): Prolyl oligopeptidase family
  misc_feature (1)..(272): Xaa is any amino acid
MERADGFKFRVNVTLPENFVEGSKLPAFFWFYPGEYATQADYDRTLRNYNKNEFINYGSSAKQFFVRLGYAVVEPDCPIVGPAGRMNDNYPHDLRNTLSAIIDFLDGKGMIDRARLAIGGHSYGAFSTVNAMVQTPFFKAGIAGDGAYNRTLTPLGFQSERRDFWEARETYLAMSPFIYANNITGALLMYHGQFDQNVGTDPINSTRLFNALSGLGKPTAMYLYPHEDHGPAAKETLLDLWARWTAWLDKYVMNPIKPEPKTEAPVEDAQVP

SEQ ID NO: 74191 - DNA, 837 bp, Unknown
  Obtained from environmental sample
  misc_feature (1)..(837): n is a, c, g, or t
ttgtttnnnnnnggcttatcgccggggaagacgttttgggcggacggtacgtatcatagtttcgggaggcgcttcgctgcaacacgactgtctaatctgttttatgcaataggtattgatttgcttgaaggttacggattgaccgaaacttcccctgtgatagccgttaccgatttacgaaaaggcaaacctgaacctggaacagttggaccgatactcgaagagttggaagtaaaattcgacgaagacggtgaaatattatgtaaaggaccaaacatcatgattggatattacaaaaatccggagttgacggcgcaggtgattgatagcgacggtttcttccatacgggagatattggaaaatttgacaaaaataattttttgataattacagatcgtaaaaaagagatttttaaactgtcgaacggaaaatatgtatcgccgcaagtgatagaaaacaaattgaaagaatccatgttcgttgataatgcctttgtatttggtgagaacgaaaagtttgcaagcgcattgatttctccaaattttacgcaattgcacaactggtgttattcgcaagatttaaagttcaatgacaacgtcgaattgatacaaatccccgaagtaatagaatgttttcagaatgaaataaatcttattaacaaacaattggggtcgtttgaacaggttaagcgtttcaggatagttgccgacgaatggagccctcaaaccggagagttatcacaaaccctaaaatttaaacgccagtatgtattcagtaaatactcgaaaataatagacgaaatttacgcatactcaagaacacaaaagaataattaa

SEQ ID NO: 74192 - protein, 278 aa, Unknown
  Obtained from environmental sample
  misc_feature (1)..(278): Xaa is any amino acid
MFXXGLSPGKTFWADGTYHSFGRRFAATRLSNLFYAIGIDLLEGYGLTETSPVIAVTDLRKGKPEPGTVGPILEELEVKFDEDGEILCKGPNIMIGYYKNPELTAQVIDSDGFFHTGDIGKFDKNNFLIITDRKKEIFKLSNGKYVSPQVIENKLKESMFVDNAFVFGENEKFASALISPNFTQLHNWCYSQDLKFNDNVELIQIPEVIECFQNEINLINKQLGSFEQVKRFRIVADEWSPQTGELSQTLKFKRQYVFSKYSKIIDEIYAYSRTQKNN

SEQ ID NO: 74193 - DNA, 696 bp, Unknown
  Obtained from environmental sample
  misc_feature (1)..(696): n is a, c, g, or t
gtgaaaagccatttgaagcagataaaagaacagtcgatgagcaataaaatgaccgaacgatttgtgcaggcgatggaaaacataaaatcatcgctgacaaagaaaagaggcgtaaagcaagagggagcggtcaatcagcggataggcaggctgcgacaaaaatatccgtctatcagtaagctatactcaatagatgtaataacagatgaaaacaaaatagttagcgacatcgtttatgagcagtcgaaacaggatagagaagcaggagtttattttatcaggagttctcaaaagcagcttactgaagaagtgatatgggatatttacaatactttacgcgagatagagagtacgttccgctgtctgaaaacagacatggatatacgtccgatttatcataaaaaagatataaatacccaagcgcatatttttatgggaattgttgcatatcaattagtacatgctatcagatgcgcaaccaaacaggcgggaatcaagcatggatggaatcgaatacgtaatataatgtcatcgcaaacgatagtaaccgcccgaatgaaacttgaaaataaagacagcctgattttacgaaatattaccagcgcaaacatggaacagagcaatatctatcgtgcattaaaatttaaacaaacaaacccgaaaatgaaaaaaaaagttgtagtaccccataaatga

SEQ ID NO: 74194 - protein, 231 aa, Unknown
  Obtained from environmental sample
  misc_feature (1)..(231): Xaa is any amino acid
MKSHLKQIKEQSMSNKMTERFVQAMENIKSSLTKKRGVKQEGAVNQRIGRLRQKYPSISKLYSIDVITDENKIVSDIVYEQSKQDREAGVYFIRSSQKQLTEEVIWDIYNTLREIESTFRCLKTDMDIRPIYHKKDINTQAHIFMGIVAYQLVHAIRCATKQAGIKHGWNRIRNIMSSQTIVTARMKLENKDSLILRNITSANMEQSNIYRALKFKQTNPKMKKKVVVPHK

SEQ ID NO: 74195 - DNA, 963 bp, Unknown
  Obtained from environmental sample
  misc_feature (1)..(963): n is a, c, g, or t
atggacctgcgtgaagtccttgatcttgcacagctagaaaaacttctggattatttctcgataattaccggtctggacgccgccttacaggatgccgcagggaatgttatctttgcccgcagaaaaaccggctccatctgcgaagcggcggggagttgtacagtatgcaaagaacatctggcctcgggcgggaaaaaatcaatggagctgggagaaccctatatctacgcctgcggctgcgctctggttatgtgttcttccccggtggtattcaacgatgagttaatcggctccatagcctgcggaccggtaatgctttgggaagcagatgaaatcgcctttgaagaaattacaaaaaaaacagtgtgcatgaatctttcggttaccaaagaacttttaagatgtatcccttcctgtgaatgtatgaacatcaccgcagcggcccagcttttattcattgtggtgaacagccttaccagagaacactccagatatttgcggcagcggaaacaaataaccgaacagcagggaacaatagcaaacctcgttatggaaagaaaagtagccgcagcggaaattctggaaattgaaaaacgcagcgcccttgcctacccggcggaaaaggaaaaggagctaatcgcctttgttcaatcggggaaaaaacagcacgccacagccctccttaacgacattctgagtgttatctttagtttgaccgatggcagcattgacaccatacgggtaaggctttttgaattgttggcctttctttccagggcggcggttgactcangcgctcccctgaaggaagtanacgccattaccaaagaagccttcggaatctgcgaggaacagacagggtttgaaacagctttgttttttaaccacacnaggctatgggaaaggttcatcgatacggttttaccgaaaccgggnagcaaaaccaaaccggctttcatttga

SEQ ID NO: 74196 - protein, 320 aa, Unknown
  Obtained from environmental sample
  misc_feature (1)..(320): Xaa is any amino acid
MDLREVLDLAQLEKLLDYFSIITGLDAALQDAAGNVIFARRKTGSICEAAGSCTVCKEHLASGGKKSMELGEPYIYACGCALVMCSSPVVFNDELIGSIACGPVMLWEADEIAFEEITKKTVCMNLSVTKELLRCIPSCECMNITAAAQLLFIVVNSLTREHSRYLRQRKQITEQQGTIANLVMERKVAAAEILEIEKRSALAYPAEKEKELIAFVQSGKKQHATALLNDILSVIFSLTDGSIDTIRVRLFELLAFLSRAAVDSXAPLKEVXAITKEAFGICEEQTGFETALFFNHTRLWERFIDTVLPKPGSKTKPAFI

SEQ ID NO: 74197 - DNA, 666 bp, Unknown
  Obtained from environmental sample
  misc_feature (1)..(666): n is a, c, g, or t
atgaaagagggctgggcaatgaaaaagttccgaaaaccttcgccgcgcgtgtcgcggcagattaacgccgtggtgttcctgctgccgtttttgatagggttctttctgtttttcgtcacgccgctgacgcagcttgccgtttattcgataaatacagtcggcgttggcgacgccggcgggatgaaactggatttcgcgggttttgccaattatgtcagcctgttcagggacgaggtctccacacaaaaccagcagttcctgcgggtattcattgacgagaacacgcgtattctgttaaacgccccgattgcgatcatattcagcctgattctggcaatcatcgtcaatgtgaaattccgcgggcgcggcgttgtgcgcgttatttttttcctgcccatcgtagtcggcctgccagccgtgcaaaacctgattaccgtcactaccggcgccgacctgatggataccgcgtttaccgataatttcatcgccggcttcgttttgacgctgctgctggagaacacatttttaccggttggggtggcagcttatattgcggtgattgcggaaaacatcttcctgctggtttccaactgcggggtgcagacgctgatcttccttgcgggcttgcaatcgatcagcggctcgctgtatgaagtgngaagatga

SEQ ID NO: 74198 - protein, 221 aa, Unknown
  Obtained from environmental sample
  misc_feature (1)..(221): Xaa is any amino acid
MKEGWAMKKFRKPSPRVSRQINAVVFLLPFLIGFFLFFVTPLTQLAVYSINTVGVGDAGGMKLDFAGFANYVSLFRDEVSTQNQQFLRVFIDENTRILLNAPIAIIFSLILAIIVNVKFRGRGVVRVIFFLPIVVGLPAVQNLITVTTGADLMDTAFTDNFIAGFVLTLLLENTFLPVGVAAYIAVIAENIFLLVSNCGVQTLIFLAGLQSISGSLYEVXR

SEQ ID NO: 74199 - DNA, 561 bp, Unknown
  Obtained from environmental sample
  misc_feature (1)..(561): n is a, c, g, or t
gtgatcaagacgatcgacgaacaaagcaaggaaaaagcatacgcgctttttgacagcggcgcgataaattcgatcgaagccgggacgacagcgggactgtgtcaaattcacaaatacctgtttgatggacttcttagcttcgcggggcaaattcggaatgcgaacatatcaaagggaaattttcgttttgccagctgcttgtaccttttcgaaagcctgaaaaaaatcgagcaaatgtcggagaatacgttcgaggaaattatcgccaagtacgttgaaatgaacattgcccatccgtttatggagggtaatggcagaagcgggcgcatttggctcgacttgatgctgaagaagaatctgaaaaaatgcgttgactggtcgcaggtaagtaaacgggcgtatttctccgcaatggaacgcagcccagttaacgacctcgaaatcatggagcttgtacgctccgcccttaccggcgaaatagacgaccgcgaggtcttcacgaagggcatagaccgctcttactattacgaagaagatggcaatgacaacggcgaagattga

SEQ ID NO: 74200 - protein, 186 aa, Unknown
  Obtained from environmental sample
  DOMAIN (33)...(144): Fic protein family
  misc_feature (1)..(186): Xaa is any amino acid
MIKTIDEQSKEKAYALFDSGAINSIEAGTTAGLCQIHKYLFDGLLSFAGQIRNANISKGNFRFASCLYLFESLKKIEQMSENTFEEIIAKYVEMNIAHPFMEGNGRSGRIWLDLMLKKNLKKCVDWSQVSKRAYFSAMERSPVNDLEIMELVRSALTGEIDDREVFTKGIDRSYYYEEDGNDNGED

SEQ ID NO: 74201 - DNA, 837 bp, Unknown
  Obtained from environmental sample
  misc_feature (1)..(837): n is a, c, g, or t
ttgtcaactggagagatgagtatgaaaaaagtattgagcatcgctggttccgactgcagcggaggagcggggattcaggcggatttgaagacgttttcagcccatggcgtcttcggcatgagcgccgtcgtttcggtcgtggcggaaaacaccagccgcgtcatcgccattcaggacgtcacgccggacataatcgaaaagcagatcgacgccgtcttcgaggatatcgaggtggacgcggtgaaggttggtatgctttcgagcctagcctgcatgagcgccgtagccggaaaactgcggcagtataccccggaaaacgtagtaattgaccccgtcatgtacgccaagaatggatgtccgctgatggacccgaacgcgacggacggcctgatatcgacgatcatccccttggcggacgtcctaacgccgaacattccagaggccgaaaaaatctctgggatcaccatcgaagacgttgctggaatggaggacgccgcgcgacgaattcattccatgggctgcaaaaacgttcttgtgaagggcggccacgcgctgggagaaaccggaaccgcgttggacgtcctgtttgacggaagggattttcaccgtttcgaagctccccgtatcgacacgaaaaacacgcacggtacgggctgcacctattcctccgctatagcgtcgaatctggcgttggggttggatatgaaatcggcggtcgctgccgccaaagagtacgttaccactgctatccgtcactcactcgccatcggaaaggggcatgggcctacccaccatttttatgacctctaccaaacggttttgaaaaatagaacataa

SEQ ID NO: 74202 - protein, 278 aa, Unknown
  Obtained from environmental sample
  DOMAIN (18)...(264): Phosphomethylpyrimidine kinase
  misc_feature (1)..(278): Xaa is any amino acid
MSTGEMSMKKVLSIAGSDCSGGAGIQADLKTFSAHGVFGMSAVVSVVAENTSRVIAIQDVTPDIIEKQIDAVFEDIEVDAVKVGMLSSLACMSAVAGKLRQYTPENVVIDPVMYAKNGCPLMDPNATDGLISTIIPLADVLTPNIPEAEKISGITIEDVAGMEDAARRIHSMGCKNVLVKGGHALGETGTALDVLFDGRDFHRFEAPRIDTKNTHGTGCTYSSAIASNLALGLDMKSAVAAAKEYVTTAIRHSLAIGKGHGPTHHFYDLYQTVLKNRT

SEQ ID NO: 74203 - DNA, 918 bp, Unknown
  Obtained from environmental sample
  misc_feature (1)..(918): n is a, c, g, or t
ttgcgtcgcgccgcagacaggaaatatctggtttccgccgactgcctggagcgggagcggcgtcttgcgcccgaacatggtgcagcgtcagggcgccggcgtgcggctttggtcggccctgaggtggtggacatgctggacgcgctggaaagctatgcgctcacggcctatcccgtgnagggcgagggcgtgacttccagtctggagatcggtgaactggtctgttccgccttggcgggcgggcagggcgtgggccgggagaacaagacgccgcccccgccgatacggcctcgcgcctccgtgccgccgcccatgccgccactcgcgacggattccgcgccgcctgaagcggcgtccgttccggaacctgatccgcacatggtcttgccgaagctgaaagaccctgtcgagtcccggcgcggcattcccttgcgtccgctactcctgctgcttgcgctcatgtgtgcgggcggcggcctgtatgtttggaagcagtcggcaagcgcgccgccggtgagcgcggcgtccgccgcgaaaagcgcgtctccggcttcgcccctcttgcagcgcgcgcgtgaactgttgcggagcggcgtctcgcctgaaaaggcgttggaactggcaaagggcatgaggacgcccgacggcgcggacggcgcgttcctgcttttggaggacgcggcgcagcggggcagttctgaggccatgttgctccttgcccgcttctatgacccgacggacgatgcgcccaagggcagcatccggcctgaccccgaacaggcgcgtgactggtatgtcaaggccggggacgggggacaaagcgcggcggcggaaaggctgcacggtctgcgcgcctgggccgaggctgaaaaggacaaaaacccgcaggcccggaagttgctggagggccggcaataa

SEQ ID NO: 74204 - protein, 305 aa, Unknown
  Obtained from environmental sample
  misc_feature (1)..(305): Xaa is any amino acid
MRRAADRKYLVSADCLERERRLAPEHGAASGRRRAALVGPEVVDMLDALESYALTAYPVXGEGVTSSLEIGELVCSALAGGQGVGRENKTPPPPIRPRASVPPPMPPLATDSAPPEAASVPEPDPHMVLPKLKDPVESRRGIPLRPLLLLLALMCAGGGLYVWKQSASAPPVSAASAAKSASPASPLLQRARELLRSGVSPEKALELAKGMRTPDGADGAFLLLEDAAQRGSSEAMLLLARFYDPTDDAPKGSIRPDPEQARDWYVKAGDGGQSAAAERLHGLRAWAEAEKDKNPQARKLLEGRQ

SEQ ID NO: 74205 - DNA, 873 bp, Unknown
  Obtained from environmental sample
  misc_feature (1)..(873): n is a, c, g, or t
ttgagccggaacccgaaacggtttcgcccttttttccgtgtccggaagttgttccatttctttgttctcgaaccgaactcggaattttttctggaacctggatttgtgtcccggaattggaaccggaacctgtatttggacccggagatggttttgtcccggaattggagtcggttcaggtcttgtccgagacgccggacccggagttggttcggaagctggagccgtctcagcccttgttgccggtgccggagctggctcaggtctggttgctggagccggttcgggctcagttcttggtgctggagccggagttggagccggagatggtgttggagttggtgccggagctggagttggagccggagatggtactggtgccggctcaggtcttggtgctggagccggagttggagccggagatggtgttggagttggtgccggagttggagctggagttggagccggagatggtactggtgccggagttggagctggtgtcggctcaggtcttggtgctggagctggaactggctcaggtcttggtgctggagcaactggagccggagttggtactggagccggagttggtgctggagctggagttggagctggtactggtgctggagctggaactggctcaggtcttggtgctggagcaactggagccggagttggtgctggagctggagttggagctggtactggtgctggagatggagccggagatggagccggagctggagttggtgcctgagttggcgccggtaccggagccggctcagaccttggtgtctgctcaggttttgttatcggttcttcgtatggcttctcctgttcgggttcggcttcaaatttaacattcgattctga

SEQ ID NO: 74206 - protein, 290 aa, Unknown
  Obtained from environmental sample
  misc_feature (1)..(290): Xaa is any amino acid
MSRNPKRFRPFFRVRKLFHFFVLEPNSEFFLEPGFVSRNWNRNLYLDPEMVLSRNWSRFRSCPRRRTRSWFGSWSRLSPCCRCRSWLRSGCWSRFGLSSWCWSRSWSRRWCWSWCRSWSWSRRWYWCRLRSWCWSRSWSRRWCWSWCRSWSWSWSRRWYWCRSWSWCRLRSWCWSWNWLRSWCWSNWSRSWYWSRSWCWSWSWSWYWCWSWNWLRSWCWSNWSRSWCWSWSWSWYWCWRWSRRWSRSWSWCLSWRRYRSRLRPWCLLRFCYRFFVWLLLFGFGFKFNIRF

SEQ ID NO: 74207 - DNA, 744 bp, Unknown
  Obtained from environmental sample
  misc_feature (1)..(744): n is a, c, g, or t
ttggaaccggaacctgtatttggacccggagatggttttgtcccggaattggagtcggttcaggtcttgtccgagacgccggacccggagttggttcggaagctggagccgtctcagcccttgttgccggtgccggagctggctcaggtctggttgctggagccggttcgggctcagttcttggtgctggagccggagttggagccggagatggtgttggagttggtgccggagctggagttggagccggagatggtactggtgccggctcaggtcttggtgctggagccggagttggagccggagatggtgttggagttggtgccggagttggagctggagttggagccggagatggtactggtgccggagttggagctggtgtcggctcaggtcttggtgctggagctggaactggctcaggtcttggtgctggagcaactggagccggagttggtactggagccggagttggtgctggagctggagttggagctggtactggtgctggagctggaactggctcaggtcttggtgctggagcaactggagccggagttggtgctggagctggagttggagctggtactggtgctggagatggagccggagatggagccggagctggagttggtgcctgagttggcgccggtaccggagccggctcagaccttggtgtctgctcaggttttgttatcggttcttcgtatggcttctcctgttcgggttcggcttcaaatttaa

SEQ ID NO: 74208 - protein, 247 aa, Unknown
  Obtained from environmental sample
  misc_feature (1)..(247): Xaa is any amino acid
MEPEPVFGPGDGFVPELESVQVLSETPDPELVRKLEPSQPLLPVPELAQVWLLEPVRAQFLVLEPELEPEMVLELVPELELEPEMVLVPAQVLVLEPELEPEMVLELVPELELELEPEMVLVPELELVSAQVLVLELELAQVLVLEQLEPELVLEPELVLELELELVLVLELELAQVLVLEQLEPELVLELELELVLVLEMEPEMEPELELVPELAPVPEPAQTLVSAQVLLSVLRMASPVRVRLQI

SEQ ID NO: 74209 - DNA, 720 bp, Unknown
  Obtained from environmental sample
  misc_feature (1)..(720): n is a, c, g, or t
gtgtccggaagttgttccatttctttgttctcgaaccgaactcggaattttttctggaacctggatttgtgtcccggaattggaaccggaacctgtatttggacccggagatggttttgtcccggaattggagtcggttcaggtcttgtccgagacgccggacccggagttggttcggaagctggagccgtctcagcccttgttgccggtgccggagctggctcaggtctggttgctggagccggttcgggctcagttcttggtgctggagccggagttggagccggagatggtgttggagttggtgccggagctggagttggagccggagatggtactggtgccggctcaggtcttggtgctggagccggagttggagccggagatggtgttggagttggtgccggagttggagctggagttggagccggagatggtactggtgccggagttggagctggtgtcggctcaggtcttggtgctggagctggaactggctcaggtcttggtgctggagcaactggagccggagttggtactggagccggagttggtgctggagctggagttggagctggtactggtgctggagctggaactggctcaggtcttggtgctggagcaactggagccggagttggtgctggagctggagttggagctggtactggtgctggagatggagccggagatggagccggagctggagttggtgcctga

SEQ ID NO: 74210 - protein, 239 aa, Unknown
  Obtained from environmental sample
  misc_feature (1)..(239): Xaa is any amino acid
MSGSCSISLFSNRTRNFFWNLDLCPGIGTGTCIWTRRWFCPGIGVGSGLVRDAGPGVGSEAGAVSALVAGAGAGSGLVAGAGSGSVLGAGAGVGAGDGVGVGAGAGVGAGDGTGAGSGLGAGAGVGAGDGVGVGAGVGAGVGAGDGTGAGVGAGVGSGLGAGAGTGSGLGAGATGAGVGTGAGVGAGAGVGAGTGAGAGTGSGLGAGATGAGVGAGAGVGAGTGAGDGAGDGAGAGVGA

SEQ ID NO: 74211 - DNA, 441 bp, Unknown
  Obtained from environmental sample
  misc_feature (1)..(441): n is a, c, g, or t
atggcccgtatgctcaagactcaggaaaaggtggaaatcatttttattgattatatgggactcattccatcggataatccccggcagccccggtatgaatttatttccgacgtatcccgatcccttaaaggtctggcccgggaattggatattcctgtaatagcgctttcccagcttggccgggaactggagaaagagaaacgatcacccaaccttgcggatatccgggagtccggttccatagaacaggatgccgatatggttatgtttatcgacagggaccgggagctggaaaaaacccaggaggagcaggccaagagcgcgggacaaaaggtcaaactgattgtcgcgaaaaatcggaatggcccaacagggattgtggatttaacctaccttaaggcctttacaaagtttgtttcttacgtagaagatagaggttaa

SEQ ID NO: 74212 - protein, 146 aa, Unknown
  Obtained from environmental sample
  DOMAIN (1)...(75): DnaB-like helicase C terminal domain
  misc_feature (1)..(146): Xaa is any amino acid
MARMLKTQEKVEIIFIDYMGLIPSDNPRQPRYEFISDVSRSLKGLARELDIPVIALSQLGRELEKEKRSPNLADIRESGSIEQDADMVMFIDRDRELEKTQEEQAKSAGQKVKLIVAKNRNGPTGIVDLTYLKAFTKFVSYVEDRG

SEQ ID NO: 74213 - DNA, 582 bp, Unknown
  Obtained from environmental sample
  misc_feature (1)..(582): n is a, c, g, or t
ttggcatttggtggctgtaccggcttatcaatgatcgtggagaagttgtttggtataccgcttaactttacctactatattttaagctttattcttctactaataggggggattcggaaaggcaaagactttttcataaagaccttatttgcgataaccgttatttcattcttatttattccatgcaccaaaaacttacaggaaatctctttacatattgtcatagcggcaatcagcggagctgtcttattggggatcggtataggtttgatattacgtgtaggtggttcaacttcaggaccggatctcatcgccgctttattaaaaaaacgcatccctgaaaatgtaactatgttctccatagacgcagttgtttttatctgcggggtcatagtattcggcttcacgaattttttcagtttgattgtactggtgattactccgtttacagtaggtatagtcttaaaccctaaaaaaagtgtaggcattctaacccgtttaaatatttggggcagattaagaaacacctctgatcctatccaaaatccttccttgaagggagaaggtatgttggttaagtaa

SEQ ID NO: 74214 - protein, 193 aa, Unknown
  Obtained from environmental sample
  DOMAIN (73)...(151): Uncharacterized BCR, YitT family COG1284
  misc_feature (1)..(193): Xaa is any amino acid
MAFGGCTGLSMIVEKLFGIPLNFTYYILSFILLLIGGIRKGKDFFIKTLFAITVISFLFIPCTKNLQEISLHIVIAAISGAVLLGIGIGLILRVGGSTSGPDLIAALLKKRIPENVTMFSIDAVVFICGVIVFGFTNFFSLIVLVITPFTVGIVLNPKKSVGILTRLNIWGRLRNTSDPIQNPSLKGEGMLVK

SEQ ID NO: 74215 - DNA, 423 bp, Unknown
  Obtained from environmental sample
  misc_feature (1)..(423): n is a, c, g, or t
gtggatttagcgctgggcggacggatcagtcaggcggaagaagatttgttattggctgagcagatggacccgcaatttacgattgtgcacaacaataaagccgtcttggccctgctgcagaataaatttgaggcagcccaaaaatgtctcgaacaggccagagagttaaatccgcggctttgtattgtgtatgccaatctgggtgtttactatatgctgaccggcgagccggataaagcacaggagaatctggaaatcgctttatccctggataatactttgtatttgacgcagttaaatttaggcgatttgtattacgccaaggaaaatattccgcaggccttgcatttctggcgcggagctttggcgcagggcgtgctgccggaattggccatgcgccgcctcaaatactggcaatcgtga

SEQ ID NO: 74216 - protein, 140 aa, Unknown
  Obtained from environmental sample
  DOMAIN (27)...(60): Tetratricopeptide repeat
  misc_feature (1)..(140): Xaa is any amino acid
MDLALGGRISQAEEDLLLAEQMDPQFTIVHNNKAVLALLQNKFEAAQKCLEQARELNPRLCIVYANLGVYYMLTGEPDKAQENLEIALSLDNTLYLTQLNLGDLYYAKENIPQALHFWRGALAQGVLPELAMRRLKYWQS

SEQ ID NO: 74217 - DNA, 474 bp, Unknown
  Obtained from environmental sample
  misc_feature (1)..(474): n is a, c, g, or t
gtgaatgaccggaaatataaatattcactgctttttcaaaaagacggcctgctgattttcttatcgcatctggatttgctgcggctcttcgggcgcgtcctgcaaaaaaaccggttgcccgtggcctatagtcagggctttaacccgcatccgcgttatgctttgccgtatccgctgccggtaggctgtatcggccgcgctgaagttttggaaatatatttgactcagcccgtagcggcggatagtttggtggaattatttaatcaatatctgccgccggagctcanagtaagccaagctgttttgggcgaaattaccccgcaatattatttccgggttgttttggaacggccctggcatttgccggacaactggccggaattaacgctggaaaaagaaaataaaaaaggccgcattgtccaataccgtcttggcgaacatgtccgcttggagttaaccggtcaggaattataa

SEQ ID NO: 74218 - protein, 157 aa, Unknown
  Obtained from environmental sample
  misc_feature (1)..(157): Xaa is any amino acid
MNDRKYKYSLLFQKDGLLIFLSHLDLLRLFGRVLQKNRLPVAYSQGFNPHPRYALPYPLPVGCIGRAEVLEIYLTQPVAADSLVELFNQYLPPELXVSQAVLGEITPQYYFRVVLERPWHLPDNWPELTLEKENKKGRIVQYRLGEHVRLELTGQEL

SEQ ID NO: 74219 - DNA, 885 bp, Unknown
  Obtained from environmental sample
  misc_feature (1)..(885): n is a, c, g, or t
atggggcacccggccatctccatgaccggcgcgcaggtggggatccgcaccgacggcaattttaccaacgcgcgcattcagcatatcgacgacaaatccatgcgggcggaactcgcgaaggggcgcatcgtcatcgtcgccggcttccagggaattgatgtagacaataacatcaccacgctcggcaggggcgggtcggacacctcggctgtcgcgctcgcggcggcgctcaaggcgaagtattgcgagatctataccgacgttgacggcgtttataccgcggatccgaataaggttcccgacgcgcggctcttgcgcgaaatatcctacgaagaaatgctcgaactcgcgagtctggggtcaaaggttctgcactcgcgttcggtcgagatagctatgaactataatgtggtgctgcatgtgcgctcatcgctcaataacacggaagggactctggttgtgaaagaaaaaaaagaaatggaacagattcgcatcaacggcgtaacctcaaagaccgacgaggcgcgcgtaacggtatacgatcttgatcacaagcccggcgtggcggcggccgtattcggcgaactctcgaagcagcggatcaatgtcgatatgatcgtgcagcccagctccaccgaggccacccaaaccaaccgcatctcctttaccgttaaaaagagcgatctcaagaccgttgagggcgttattgaaaatctgcgcaagatgggcgcggtcaagggcaaacacgccatcgacaggaatattgccatcatctcgattgtcggcgtcggcatgaagagccataccgggtgtggcggcggaactcttttcgattctcgcggaaaacaagatcaatatcgaaatgatatccacatccgagattaa

SEQ ID NO: 74220 - protein, 294 aa, Unknown
  Obtained from environmental sample
  DOMAIN (176)...(252): ACT domain
  misc_feature (1)..(294): Xaa is any amino acid
MGHPAISMTGAQVGIRTDGNFTNARIQHIDDKSMRAELAKGRIVIVAGFQGIDVDNNITTLGRGGSDTSAVALAAALKAKYCEIYTDVDGVYTADPNKVPDARLLREISYEEMLELASLGSKVLHSRSVEIAMNYNVVLHVRSSLNNTEGTLVVKEKKEMEQIRINGVTSKTDEARVTVYDLDHKPGVAAAVFGELSKQRINVDMIVQPSSTEATQTNRISFTVKKSDLKTVEGVIENLRKMGAVKGKHAIDRNIAIISIVGVGMKSHTGCGGGTLFDSRGKQDQYRNDIHIRD

SEQ ID NO: 74221 - DNA, 876 bp, Unknown
  Obtained from environmental sample
  misc_feature (1)..(876): n is a, c, g, or t
gtgcgcggcgccaatctctacatcaaagagctgtttgacaccggggacgacaccgacctgctcatcgcgctgaaagccgagagcgaagccatcgtgaaagagacgcttgtcaagatcgacgatatgttcaaggcgctgcgcaataagaaggacgagggcgggacatccttcaccccgaaaagtcttgagggcgcgattgacgccctgcccggggcgaatatctcgctgatctccgttgccgggcgctatgccgcgcgcgaggcgatgcgcgccctgaaaaaagggctgcacgtgatgctcttctcggataacgtctcgatcgaagacgaactccgcctcaagaaattcgcgcacgacaagggcctcatcgtgatgggaccggactgcggcaccgcagtcatcaacggcgttccgcttgccttctccaacgtgcttacgcgcggcgactgcggtatcgtggccgcctcgggcacgggcctgcaggaagtcatgacgatcatctcaaacgagggcgccgggatctcgcaggcgataggcaccggcgggcgcgacgttaaagaggcgatcggcggcatcatgtttatcgacgctctgcgcgcgcttgccgccgatcccgcgaccaaggtgatcgtgcttgtatccaagccgccgcacgagagcgttcttcgcaagatagccgctgagatcaaaacgatcaagaaatcggtagtcggaattttcattggcggagatgcttctattcttgagtctgccggggctatcgccggcaccacgctggaggagacggctgtcatcgccgcggctgcgacccggatgggagcgtcccgcgcccgcacggatggcgaaaagcgcggggccatttgcctagagagatag

SEQ ID NO: 74222 - protein, 291 aa, Unknown
  Obtained from environmental sample
  misc_feature (1)..(291): Xaa is any amino acid
MRGANLYIKELFDTGDDTDLLIALKAESEAIVKETLVKIDDMFKALRNKKDEGGTSFTPKSLEGAIDALPGANISLISVAGRYAAREAMRALKKGLHVMLFSDNVSIEDELRLKKFAHDKGLIVMGPDCGTAVINGVPLAFSNVLTRGDCGIVAASGTGLQEVMTIISNEGAGISQAIGTGGRDVKEAIGGIMFIDALRALAADPATKVIVLVSKPPHESVLRKIAAEIKTIKKSVVGIFIGGDASILESAGAIAGTTLEETAVIAAAATRMGASRARTDGEKRGAICLER

SEQ ID NO: 74223 - DNA, 363 bp, Unknown
  Obtained from environmental sample
  misc_feature (1)..(363): n is a, c, g, or t
atggccggctgtttttttcaagggattaatgataggataagccgcataaataagggagggcctatgcgcgcctcgcaacttttggaaaaatactccaatgaaataaaatcaatagcccggcgatacgaacaagaaggcatccacaatctcaggattttcggctcgatcgcccaggggctggatacggatgaaagcgatgttgattttctggttgacacagaaccgaaagtcaccttgtttaccatcgggggtatgcattatgagttggaacagcttctgggctccaagttcgatttgatcacctcgggcagcctcccggaagctttaaaatccaaaatactggcggaagccaagccaatatga

SEQ ID NO: 74224 - protein, 120 aa, Unknown
  Obtained from environmental sample
  DOMAIN (28)...(120): Nucleotidyltransferase domain
  misc_feature (1)..(120): Xaa is any amino acid
MAGCFFQGINDRISRINKGGPMRASQLLEKYSNEIKSIARRYEQEGIHNLRIFGSIAQGLDTDESDVDFLVDTEPKVTLFTIGGMHYELEQLLGSKFDLITSGSLPEALKSKILAEAKPI

SEQ ID NO: 74225 - DNA, 450 bp, Unknown
  Obtained from environmental sample
  misc_feature (1)..(450): n is a, c, g, or t
ttgcgaggcgcgcataggccctcccttatttatgcggcttatcctatcattaatcccttgaaaaaaacagccggccatgaatcgtccgcctcggccggccgtgccctcgtaagggttttagggctcactccagttccgccagcttggccagggcctcttcccattgcgcttccagggccagggccgcccgggccagttccgccagttcctggttcagctggcgggcccgggcccggtcctggtaggtggccgggtcggccaggagtttttccagttcccgccggcggtcggcctgggccgccagtttctcctccgcctcggccgccgcctgttcatagggccggcggcgggcggcggcctcgcgccgggcctgggcggtttcgccgccggcctcctttttctccaaaaccgcgggccgggaccggtagtgggaacttcctgggccgctga

SEQ ID NO: 74226 - protein, 149 aa, Unknown
  Obtained from environmental sample
  misc_feature (1)..(149): Xaa is any amino acid
MRGAHRPSLIYAAYPIINPLKKTAGHESSASAGRALVRVLGLTPVPPAWPGPLPIALPGPGPPGPVPPVPGSAGGPGPGPGRWPGRPGVFPVPAGGRPGPPVSPPPRPPPVHRAGGGRRPRAGPGRFRRRPPFSPKPRAGTGSGNFLGR

SEQ ID NO: 74227 - DNA, 411 bp, Unknown
  Obtained from environmental sample
  misc_feature (1)..(411): n is a, c, g, or t
atggagacgattcctgcggcttttctactgccggacggcctgcggtctttattttcacgaaaacgggaactgtcgtttacgtcgacaaaactgccatccgctgcgggttgtgcacctttagtaacaggttctgtcacacttcccggttttgttggcattgcttccggttttgtcggcgccggctcggcaacaattgtcttttcgtcaacaggtttgacggatacaggctctgctgaaacaggtttgaccgggggaggaggcacaggtattcctaattctggctctgacggtttttccgtaacaggcttgacaggttccggtacaggcgtaaccggtttgaccggtatagactcagaaacaaccggttttaccggttccggcttaggcgtaattggtactgatacattttga

SEQ ID NO: 74228 - protein, 136 aa, Unknown
  Obtained from environmental sample
  misc_feature (1)..(136): Xaa is any amino acid
METIPAAFLLPDGLRSLFSRKRELSFTSTKLPSAAGCAPLVTGSVTLPGFVGIASGFVGAGSATIVFSSTGLTDTGSAETGLTGGGGTGIPNSGSDGFSVTGLTGSGTGVTGLTGIDSETTGFTGSGLGVIGTDTF

SEQ ID NO: 74229 - DNA, 720 bp, Unknown
  Obtained from environmental sample
  misc_feature (1)..(720): n is a, c, g, or t
ttgaagatagtttttctcggtacgcccgcgttcggcgtcaaggttttagacgccatcgtaaagtctcggcattgcgtttgcgcggtagtaactcagcccgaccgcatgaactcgcgcggaaataaaaccgtagtagggaaggttaaggaatatgcgttaaacgcgggactcgaggttttgcagtatgaaaatatcagcaaagagggcgaggcggagttaaagtctttggacgcggacattatggtgacgtgcgcttatgggcagattttacgtcaaaacattctcgacgtttgcccgaagggagtcattaacgtacacgcgtcgctgcttccgaaataccgcggggcatctccggttcaatggtcgctgataaacggcgacattttgggcgtgtcgattatgcaaaccgagctcggaatcgactcgggcgccgtgattttgcagcgcgcgcacgagagacgcgattttgagaacagtgatgaggcgcttttggcgctgagcgaactgggcgcgaaattaatcgtcgaggcgctggatttaatcgaaagcggaaaggctacgtttacgccgcaagacgcgacgcttgccacgcactgccgcatgcttactaaggaagacggcaaaatcgatttttctatgcccgcaagtcaaattgttaatagaattcgcggcttaatccgtggccaagcacatactttatgtcgcanaatggcacaataa

SEQ ID NO: 74230 - protein, 239 aa, Unknown
  Obtained from environmental sample
  DOMAIN (1)...(178): Formyl transferase
  misc_feature (1)..(239): Xaa is any amino acid
MKIVFLGTPAFGVKVLDAIVKSRHCVCAVVTQPDRMNSRGNKTVVGKVKEYALNAGLEVLQYENISKEGEAELKSLDADIMVTCAYGQILRQNILDVCPKGVINVHASLLPKYRGASPVQWSLINGDILGVSIMQTELGIDSGAVILQRAHERRDFENSDEALLALSELGAKLIVEALDLIESGKATFTPQDATLATHCRMLTKEDGKIDFSMPASQIVNRIRGLIRGQAHTLCRXMAQ

SEQ ID NO: 74231 - DNA, 585 bp, Unknown
  Obtained from environmental sample
  misc_feature (1)..(585): n is a, c, g, or t
atgcttgctgcggaaagattaagtttgcaagacttgtttaagaatgaactttcgtttatttctaccgagcttggctatcctagttacagaatcgggcaagtttacaccgcggcatgtcaaaataaaacatacgaagaaatgaataacgtgccgccaacattgagagaagagttaaaaaaacgctacgccgatgtcgcttgccgcataatcgagacgcgtatgggaaaggagtgcgcggagaaatatctctttaaactgaacgatggtcacgtaatagaaggcgtttttattccgaacaattatgggaatacgctttgcgtttcgacgcaagtcggctgccgaatgggctgtaagttttgcgcgtcgacaatcggcgggcttgtcagaaatcttacggcgggcgaaatactcgggcaagtttttagcgtcaacgcaaaattgggagggacgatagcgaagcgcgcggtgtcgaacattgtgcttatgggaagcggagagccgctcgataattttgagaacacggtanaaatttttaaagctagttcgagcgcggacggaataaatatctctcgtgccgaattctga

SEQ ID NO: 74232 - protein, 194 aa, Unknown
  Obtained from environmental sample
  misc_feature (1)..(194): Xaa is any amino acid
MLAAERLSLQDLFKNELSFISTELGYPSYRIGQVYTAACQNKTYEEMNNVPPTLREELKKRYADVACRIIETRMGKECAEKYLFKLNDGHVIEGVFIPNNYGNTLCVSTQVGCRMGCKFCASTIGGLVRNLTAGEILGQVFSVNAKLGGTIAKRAVSNIVLMGSGEPLDNFENTVXIFKASSSADGINISRAEF

SEQ ID NO: 74233 - DNA, 894 bp, Unknown
  Obtained from environmental sample
  misc_feature (1)..(894): n is a, c, g, or t
atggcgattgacaaccgttcagacggctccatattcgtgaggaacggcaaggtatcggtgacgtcaacaaccgggagcggcatggccattaagaactccggggacggaccggtaaccatcaatggcggcgaggtttccgcgacatcgggtatcgcggtgtggaacaactacgagggcaagattaccgtgacaggcgggcttgtgacctctgaaaacccggccaacaaccagggtaccatagtgctcgcgaactatacaacgcccgcggagggcgctgaagagtttgagccggaaaccctgcttacgattagcggcggcaaggtagaaaataacattcctgacggcatagcgatatacaacgataccgtaggcgggatagaaataaccggcggcagggtagaggcgtcaaaaacaaggagtaccgccatattaaacaggagagaaggcaagttggacatctccggcagcagcatagtttcggtggcatcgggtatagcgatatggaatgacagcaacggcgaagtaaccatttccagcaacgcgcttgttggggcgacgacgggcagggccatagtcagctataaggggccaggggaccgcacagaccccgatgaaccttatgtgccgacaatcaagattgaaggcgggactgttacttctaacaactccaacgacgtgcagggcacgatccaacttgtagcagctaaaaatttcgatgcaacaggtgaagaagacggcttcgataccaaggatgttgaagcccaaaccgcaatacaagaaaaaccccggcttgcaatcagcggcggcaaggtgagcaatacctttagcggcaacgcggtttacaccaatacctataataagatagacgtcaaaggcggtgaagttcggcgatag

SEQ ID NO: 74234 - protein, 297 aa, Unknown
  Obtained from environmental sample
  misc_feature (1)..(297): Xaa is any amino acid
MAIDNRSDGSIFVRNGKVSVTSTTGSGMAIKNSGDGPVTINGGEVSATSGIAVWNNYEGKITVTGGLVTSENPANNQGTIVLANYTTPAEGAEEFEPETLLTISGGKVENNIPDGIAIYNDTVGGIEITGGRVEASKTRSTAILNRREGKLDISGSSIVSVASGIAIWNDSNGEVTISSNALVGATTGRAIVSYKGPGDRTDPDEPYVPTIKIEGGTVTSNNSNDVQGTIQLVAAKNFDATGEEDGFDTKDVEAQTAIQEKPRLAISGGKVSNTFSGNAVYTNTYNKIDVKGGEVRR

SEQ ID NO: 74235 - DNA, 702 bp, Unknown
  Obtained from environmental sample
  misc_feature (1)..(702): n is a, c, g, or t
atgcagcttaaatataaaattccattgattttattttctgcttattccgtaattgtaggtgcacttatagcggttactcttatcaattcatctgaagtgcatagaaattctcaatacgagatagtgacagaatccgcaaaaagctactctgaggttatagatggctttatgagtgccagaattgtggaattaaagagcttggaacgcctagtaacccttgaacagcatttaagcgataaggaaaaacttgaaatgcttcataggcacatgtatagccttatcagcaactccgactcaaaattgatttcagatatttatgtagcttttgaaaaaggagtttttttcagtgctgaggctacagaggaagggcattattttaacatcgattgctttcgcacggaagcaggcggcttgaaattatcgactgagccttctgaactcgctgcagatgacgatgattggtatcttgtacccaaaaaaacgggcaagttacatttaacggaaccttataaatggaaatattcagaagaagaaagtgaacgccaaatgataaccttaagttctcctatttttctcaatggaaaatttgcgggtgtggtaggaatggatatggaattggctgtactgcaaagagatttttttgaccatttgattgacaaaaaacaggtgcctattcaattctcatttcacacgagggcttga

SEQ ID NO: 74236 - protein, 233 aa, Unknown
  Obtained from environmental sample
  SIGNAL (1)...(24)
  misc_feature (1)..(233): Xaa is any amino acid
MQLKYKIPLILFSAYSVIVGALIAVTLINSSEVHRNSQYEIVTESAKSYSEVIDGFMSARIVELKSLERLVTLEQHLSDKEKLEMLHRHMYSLISNSDSKLISDIYVAFEKGVFFSAEATEEGHYFNIDCFRTEAGGLKLSTEPSELAADDDDWYLVPKKTGKLHLTEPYKWKYSEEESERQMITLSSPIFLNGKFAGVVGMDMELAVLQRDFFDHLIDKKQVPIQFSFHTRA

SEQ ID NO: 74237 - DNA, 993 bp, Unknown
  Obtained from environmental sample
  misc_feature (1)..(993): n is a, c, g, or t
atgcggcaggcgatagccgaaatgcgtcccaaccgcatagaggacctattcgcccttgtcgcgctctaccgccccggccccatggagaacatcccatcgtactgccggcgtaagcatggtgcgaaaaagatcgaatacctccacccgctcatggaatcctcgctcgccgaaacttatggaatcatggtctatcaggaacaggtgataagcatgggccggctgctggcaggatatacgctgggtggcgccgacctgctccgccgcgccatgggtaagaaaatccgcgcagaaatggtcaagcagcgtgccatattcatagagggctgtaaaaagaccaacgacatagacgaagacactgccggacgcatattcgacttgatggagaagttcgctgactacgggttcaacaaatcccacgccgcatgctatgcctggataagctaccagaccgcgtacctgaaggccaacttcatgccggagttcatggccgcgaccatgacatacgacatggccgaccaggacaagctcgcctttttcgcgagcaacgcgaaggccagcggcataaaactcctgcgggccgacataaacaagagcttcgagtatttcaacgtggtgaacgacggcgggaaactcgcaatccagcacagcctcgccgcgataaagggcataggcgtaaacatagtcaaggccatagtagccgagcgggaatcccgcggtgagttcaaggacttccctgacttcatggagcgcatggacaagcagttcgtgaacaaaaaaatgctcgaaggcctgatctacgccggggcgtttgacggcctggagccgaaccgcgcgaagttgatcgccaacatcgaatacatactcgcccagatgagctcgatcgcccgcgacagggaggacaaccaagcctcactgttcggggatgccagcggcagcgtgcggacgaaatcaagctggcgaacgcggctccgggcggccatgactcggcgataa

SEQ ID NO: 74238 - protein, 330 aa, Unknown
  Obtained from environmental sample
  DOMAIN (1)...(113): Bacterial DNA polymerase III alpha subunit
  misc_feature (1)..(330): Xaa is any amino acid
MRQAIAEMRPNRIEDLFALVALYRPGPMENIPSYCRRKHGAKKIEYLHPLMESSLAETYGIMVYQEQVISMGRLLAGYTLGGADLLRRAMGKKIRAEMVKQRAIFIEGCKKTNDIDEDTAGRIFDLMEKFADYGFNKSHAACYAWISYQTAYLKANFMPEFMAATMTYDMADQDKLAFFASNAKASGIKLLRADINKSFEYFNVVNDGGKLAIQHSLAAIKGIGVNIVKAIVAERESRGEFKDFPDFMERMDKQFVNKKMLEGLIYAGAFDGLEPNRAKLIANIEYILAQMSSIARDREDNQASLFGDASGSVRTKSSWRTRLRAAMTRR

SEQ ID NO: 74239 - DNA, 981 bp, Unknown
  Obtained from environmental sample
  misc_feature (1)..(981): n is a, c, g, or t
atggccgagcttgagcctgcgacctatgtggatgtgggagcgcaggtttccggccagttgatagccctccatgcggcgctcggcgatacagtcaaaaagggcgacctgcttgcggagatcgacccgcgttcccacaaagccctggtggatgcggacaaggcgacgcttgccaacctggaggccatcctcgcggaacgcaaggcgatccttgtccaggcccggcgcaaccatacgcgcgatacgtccttgcgcaggcagaacgcggcgagtgaattggcagcgcagacaagcgagacggcctataaaatcgcccaagctcaggtacaggctgtcgaagcgcagatgcaacaggcaaaagcgaacctggaaagccacgagctggatctttcctataccaggatttacgcgcccatcgccggcaccgtggttacgctggaggtaaagcagggacagaccctgaacaacaggcagaccacaccgcagattatgcgtattgccgatcttgagatgatgaccgtgtgggcgtctgtttccgaagccgacgtgaacaagctccgtccgggcacggacgtctgctttacgaccatcggcgatacgacaaccagatactgcaccagggtacaaaacatactgccctcatacaccagggagaacgatgtcattctctacaacgtgacttttgacgtgaaaaacccggacatggcatttcgtccggccatgaacgtccaggtgtttttcatcctggcccaggccaggggcgctctcggcctgccggttcaggtgttgccggaaggcggacgcgacgccgccaaagcgaccctgaccgtgatcactgccgacaagcgcgaggaacagcgcgctgtaacctttgggctgcgtacgcgcacgaccgtggaggtgcttggcggacttgctgaaggcgatatcgttcaggtgacgtccgggccggctgccaaaaccaacccgcaggcgcgaacatga

SEQ ID NO: 74240 - protein, 326 aa, Unknown
  Obtained from environmental sample
  DOMAIN (8)...(261): HlyD family secretion protein
  misc_feature (1)..(326): Xaa is any amino acid
MAELEPATYVDVGAQVSGQLIALHAALGDTVKKGDLLAEIDPRSHKALVDADKATLANLEAILAERKAILVQARRNHTRDTSLRRQNAASELAAQTSETAYKIAQAQVQAVEAQMQQAKANLESHELDLSYTRIYAPIAGTVVTLEVKQGQTLNNRQTTPQIMRIADLEMMTVWASVSEADVNKLRPGTDVCFTTIGDTTTRYCTRVQNILPSYTRENDVILYNVTFDVKNPDMAFRPAMNVQVFFILAQARGALGLPVQVLPEGGRDAAKATLTVITADKREEQRAVTFGLRTRTTVEVLGGLAEGDIVQVTSGPAAKTNPQART

SEQ ID NO: 74241 - DNA, 603 bp, Unknown
  Obtained from environmental sample
  misc_feature (1)..(603): n is a, c, g, or t
atgcttttcagggcgttgacgtcgtcatccatcaggcgcaatgcgcctgccgtagcggaacgcgtgtgtctgggcatgggccggatcgtgatcaggtcgctgcccatggcttcgatgcttgccagaaccttggccttggcgccgttgccgagagcgagcatggccaccaccgaggccacgccgatgacgatgccgagcagggtgagcgcggttcggaaacggttggtcttgagagagcgcacggcaagcgccatggctgccgcaaggggcaagcgcgttgcgccctgcgcgccgcccggggtttttctccatcgtccggcggcaggttttccggtgtccccggatgccgtgtcactgacgatctccccgtcgtgcagagtgataatccgcccggcccgcgccgcaacgccgggatcgtgcgtgatgagaatcaccgtgtgtccggccgtatgcagttcatgcagcagttccagcatatcgctgccgcttttggaatccagcgcgcccgtgggttcgtcagcaaggatgatctccccgccgttcatcagcgcccgcgcgatggatacgcgctgttgctgtccgccggagagcttggaaggataa

SEQ ID NO: 74242 - protein, 200 aa, Unknown
  Obtained from environmental sample
  misc_feature (1)..(200): Xaa is any amino acid
MLFRALTSSSIRRNAPAVAERVCLGMGRIVIRSLPMASMLARTLALAPLPRASMATTEATPMTMPSRVSAVRKRLVLRERTASAMAAARGKRVAPCAPPGVFLHRPAAGFPVSPDAVSLTISPSCRVIIRPARAATPGSCVMRITVCPAVCSSCSSSSISLPLLESSAPVGSSARMISPPFISARAMDTRCCCPPESLEG

SEQ ID NO: 74243 - DNA, 711 bp, Unknown
  Obtained from environmental sample
  misc_feature (1)..(711): n is a, c, g, or t
ttggttcccccattgacccaaacaacttctgaaaaattacagcgacaaaaacagccaggacaacggatttttgacctctacaaacactggttaaaaaagcaaagggcaatcccatcttacaaacaaattttgcgcagcatgaaaaaggctcagtactccccggaatgccacggccattttgccttgcattggaaggactatgcgcatttcacctcaccaatccgccgctactcggatttatggtgccacagggagctgtgcggaaacaaagggcacggggccaggaatgtatggcatgagctttgcgagcatttgaacgaggcggaaatcaaaaatcaaaaagcagaacgcaaggctctgaaactctgcgcaagctatcttttgcaaaaccaaatagggcaaactttcaaaggcgaaattcagggcatagaggaatttggggtttttatatccatttccagcgacacagttgccattgcagacggcttggtgcacctgcgcgacatccccggcgattattatctgtacaacgaaacaaaggggattttagttggcaaacgcacgggaaaaacatttaaaagaggcgatagggtcacggtaaaattgataaacgtcaacattgtgaaaggtgaaaatgattttgaaataactccatcgccatggcaaaaacaaaaacatgaaaaaaagaatcgcagatttgggagaaaataa

SEQ ID NO: 74244 - protein, 236 aa, Unknown
  Obtained from environmental sample
  DOMAIN (129)...(217): S1 RNA binding domain
  misc_feature (1)..(236): Xaa is any amino acid
MVPPLTQTTSEKLQRQKQPGQRIFDLYKHWLKKQRAIPSYKQILRSMKKAQYSPECHGHFALHWKDYAHFTSPIRRYSDLWCHRELCGNKGHGARNVWHELCEHLNEAEIKNQKAERKALKLCASYLLQNQIGQTFKGEIQGIEEFGVFISISSDTVAIADGLVHLRDIPGDYYLYNETKGILVGKRTGKTFKRGDRVTVKLINVNIVKGENDFEITPSPWQKQKHEKKNRRFGRK

SEQ ID NO: 74245 - DNA, 900 bp, Unknown
  Obtained from environmental sample
  misc_feature (1)..(900): n is a, c, g, or t
ttggtcagcgcaaagatcctgaacgcgaatccggacaagctgattctcactttcaacaaagctatgactattgacacaagcgatacaagcgcgggcggtggggaggacgcgtatggcggctggtcattgcagggcgctcaatttgcgggggagcccgagggtctcggcaccgcggtatggacagttccgcttaccgcccctgttgcgcccgagcgcgagggaggatacatccatatttcttataatagcccacaaaatggaaaaaccacagatctcgacgggaagcctctgagaggtatgcacaaccggcgtgtggcgaattccgtcggcggcacaccggatacaacagtgcccacactgaatgccgcgtttatcaaaaaagatactccaaataaactggttctgtatttcagcgagcctgttatcattgatgagagcggcgcctggtcatggaacggtcccgctttttctgcaacagaggagcccgagggcatagggactcaattatggatagtccagcttgtctccagtgtcactgtcgggcagacgctcagcatttcttataacgcaacgaccggagataccagagacccatccggcaatttcctggcaggtttcacaaacaagcttgtaacaaatggctatggcgataccacgccccccatattggacaacgcgcgggtactcaattcggcgcccaacaactggttcttaatttcagcgaacctgttatcatcctcggcggcggcgaaggcgaccaaggttggaatatacacggcgctgaattttaatgacagaggagcccacaggcataggcaccgcgcaagggatagtcacgcttaccgcccatgttacgaacgggcagaggatcgaactggtttatcaagccgactatcatga

SEQ ID NO: 74246 - protein, 299 aa, Unknown
  Obtained from environmental sample
  misc_feature (1)..(299): Xaa is any amino acid
MVSAKILNANPDKLILTFNKAMTIDTSDTSAGGGEDAYGGWSLQGAQFAGEPEGLGTAVWTVPLTAPVAPEREGGYIHISYNSPQNGKTTDLDGKPLRGMHNRRVANSVGGTPDTTVPTLNAAFIKKDTPNKLVLYFSEPVIIDESGAWSWNGPAFSATEEPEGIGTQLWIVQLVSSVTVGQTLSISYNATTGDTRDPSGNFLAGFTNKLVTNGYGDTTPPILDNARVLNSAPNNWFLISANLLSSSAAAKATKVGIYTALNFNDRGAHRHRHRARDSHAYRPCYERAEDRTGLSSRLS

SEQ ID NO: 74247 - DNA, 513 bp, Unknown
  Obtained from environmental sample
  misc_feature (1)..(513): n is a, c, g, or t
ttggcgacgggaagtcgttgggttgggcagccaggtgtcgcagatatgcgctatattctttccgtgcaaactcgaccattacatcaaggaaaattagggataaaatgttacggtcgctacatggatgatctgtacctcatccatgctgacaaggaatatttgaagaagtgccttagagaaatagttttaatttgtgaccgtctgaaaatcagggtgaacatgaaaaagacttgtatcgttaagctgtcgcatgggttgacttttttgaaaggtaaatacagtttacaggcttccgggaaggtgctgcggcgcccatacaaggaatcgacgaaacgtatgcggaggaaattgagcaaattcaaaaaactgctggtaaacgaaaagatgtcctatggagatataagggcatcgtaccagtcctggaggggcagctataaaaagcgtttcaacgcataccaccgggtgttgtacatggacaggttttataatgacctgtttataaatgagcattga

SEQ ID NO: 74248 - protein, 170 aa, Unknown
  Obtained from environmental sample
  misc_feature (1)..(170): Xaa is any amino acid
MATGSRWVGQPGVADMRYILSVQTRPLHQGKLGIKCYGRYMDDLYLIHADKEYLKKCLREIVLICDRLKIRVNMKKTCIVKLSHGLTFLKGKYSLQASGKVLRRPYKESTKRMRRKLSKFKKLLVNEKMSYGDIRASYQSWRGSYKKRFNAYHRVLYMDRFYNDLFINEH

SEQ ID NO: 74249 - DNA, 855 bp, Unknown
  Obtained from environmental sample
  misc_feature (1)..(855): n is a, c, g, or t
atgaagggatttcgccccgggcaggttccaaagcagctttttgtatcccgttttggcgatgaagtgtggcgcgaaaccgtgggcaatgtggtggaacacgaattgaaaaacgaatttgagaaaatagttgaaacttggaaaacagacgaaaagcttgaaatagcggctccggcagaggctgggaaactttcggcagaacgcggtcaagatttggtttataaacttaacatcgcgctaaacaaacccattgtggttcaaggctacaaagaccttggaattagcgtttctgcttctgttgtttcagaagaggagataaacgatataattaaagatgtgcgcgaaagatttgccaaagaatctgaaaccccgcctacagacgaagagttttattccattgtcggggcaaaagacgaggcagatttaaaatcaaaagtcacagacgatgttttgagagacaaaaaatataaagccaaattagctgctctcaaagacgcttttgaccgcttaatagaaaaaaacccatttcccgttttggaagagcaaataaaatacaccgcagagcgtagcttgcagcatcaccaccatagccaccatcaccacgaccataatcacgaagaagacgaagaaataaccgtttccgaagagcaattaaaagagatgcgcccagaaattacccgcgcaattcaagaagaccgtattttgcgtgccatagttgagcaagaagccttaaagccaactcaggctcaagttgatgctagggtagaggaaattgcatattctgcaggtatggattttgcatctgctaaagatgctatgcgcagaaccggacaaataaataaaatccgagaaaattga

SEQ ID NO: 74250 - protein, 284 aa, Unknown
  Obtained from environmental sample
  DOMAIN (118)...(284): Bacterial trigger factor protein (TF) C-terminus
  misc_feature (1)..(284): Xaa is any amino acid
MKGFRPGQVPKQLFVSRFGDEVWRETVGNVVEHELKNEFEKIVETWKTDEKLEIAAPAEAGKLSAERGQDLVYKLNIALNKPIVVQGYKDLGISVSASVVSEEEINDIIKDVRERFAKESETPPTDEEFYSIVGAKDEADLKSKVTDDVLRDKKYKAKLAALKDAFDRLIEKNPFPVLEEQIKYTAERSLQHHHHSHHHHDHNHEEDEEITVSEEQLKEMRPEITRAIQEDRILRAIVEQEALKPTQAQVDARVEEIAYSAGMDFASAKDAMRRTGQINKIREN

SEQ ID NO: 74251 - DNA, 897 bp, Unknown
  Obtained from environmental sample
  misc_feature (1)..(897): n is a, c, g, or t
atggcgaggctcgtacgttcctggccaagacaggattgccagcggaaattggttgaatattttaacgggatggggcttactacatatcccctgaccataaaaccgcgccattacgttcacaaggcggttattcccatagcgggtttcggcacaaggctttatcccgccacgcgttttataaagaaggaattcatgcccgtcatcgatcatgacggcctggtaaaacccgtcatccttatactgttggagcagctctatgacagcgggattgacgagatatgccttattgtcggcaatgaagatgatatggaaacttataaaaaaaacttcaaggttccgcttccccaggagcatctgggaaaactttcaatccagatgcaggaatatgaaaataaaatacttaacataggcaagctggttactttccgcgtccaggcggaaaaaaaaggttttggacacgcggtttttcaaagcagggatttttgcaaagacgagcccgtattgcttatgttaggcgacactatctaccgttcaaactcgcaaaaaatgtgcagcatgcagttggttgaagcctacgaacagcttaatatgcctcttgtttccatacataaaattccgcttgaacgcgtcgtgcattacggaatcctttcgggaacttgggaaaacagggaagaaacggtactgagggtaacaaaattcacggagaagccgagcattgaatacgcgcaggattttttaggcattaccggcaaggataaagaaaaatcatatttttcggtattcgggcaatacatcctcacccccgaagtgtttgcggagcttgaagaanacataacaaacaacaggcatgcggaaaacaacggcgaattcggccttaccgccgcgctttcttcatga

SEQ ID NO: 74252 - protein, 298 aa, Unknown
  Obtained from environmental sample
  DOMAIN (41)...(298): Nucleotidyl transferase
  misc_feature (1)..(298): Xaa is any amino acid
MARLVRSWPRQDCQRKLVEYFNGMGLTTYPLTIKPRHYVHKAVIPIAGFGTRLYPATRFIKKEFMPVIDHDGLVKPVILILLEQLYDSGIDEICLIVGNEDDMETYKKNFKVPLPQEHLGKLSIQMQEYENKILNIGKLVTFRVQAEKKGFGHAVFQSRDFCKDEPVLLMLGDTIYRSNSQKMCSMQLVEAYEQLNMPLVSIHKIPLERVVHYGILSGTWENREETVLRVTKFTEKPSIEYAQDFLGITGKDKEKSYFSVFGQYILTPEVFAELEEXITNNRHAENNGEFGLTAALSS

SEQ ID NO: 74253 - DNA, 696 bp, Unknown
  Obtained from environmental sample
  misc_feature (1)..(696): n is a, c, g, or t
atgaaaaacgaattaataaatgaactggctttattagagaaaaagcagcttgtgttggataccggcgccattgaagggctgaaaaaaatgccggttgatgtgtttgataacatatatcttggcgaagcccacaataacgccctgattttatgtgtcgatatacgcaacttcagcgattttttatgttcaaacatggaagaagatgtttttaagcttatcaaggaattcacatcgaaccttttatcctgtattaatcaattcggttatgactgttcatattacaagttgatgggagacggcgctttggttatatgggacacggccagtgaaaacgccattaacgaagcgcttcttatatttgattcgtatactgattttttaaacgaagaattgtttaaaccctttgctaatttggctcttgccggagcccttgttatagaaaaagtattcaaatatgaaatatccgcagaattatccgaactcaaatatcgtgactatattggttacggaattaaccttgcctgtagattgcaatcattagccggtgccaatgaacttgtattaaatgaaatacttacaaaattcggaacaataaaatacagagttgatgaatcacaaaaaataataagggagttgcggaccctcaaaggactcaaagaagaagatcgtgaacatgtgttgtttaatgaaaggtag

SEQ ID NO: 74254 - protein, 231 aa, Unknown
  Obtained from environmental sample
  misc_feature (1)..(231): Xaa is any amino acid
MKNELINELALLEKKQLVLDTGAIEGLKKMPVDVFDNIYLGEAHNNALILCVDIRNFSDFLCSNMEEDVFKLIKEFTSNLLSCINQFGYDCSYYKLMGDGALVIWDTASENAINEALLIFDSYTDFLNEELFKPFANLALAGALVIEKVFKYEISAELSELKYRDYIGYGINLACRLQSLAGANELVLNEILTKFGTIKYRVDESQKIIRELRTLKGLKEEDREHVLFNER

SEQ ID NO: 74255 - DNA, 306 bp, Unknown
  Obtained from environmental sample
  misc_feature (1)..(306): n is a, c, g, or t
gtgaaaaacatgaatttcaattcttttgacttacaattattcgcgcataaaaaaggcgtgggttcttcgcgcaacggccgtgacagcgaatctaagaggcttggcgtcaaagaacaggctgggcatgtagtaactgccggcagtattttagtaaggcagcgcggaacgcgtttttatccgggtaaaaatgtaggtatcggcaaagaccatactttgtatgccaaaattgacggccaagtagcttttgagcgcaaagggcgcgacgaccgtcaaattagcgtttatcctaccgaaaaagcgatgtag

SEQ ID NO: 74256 - protein, 101 aa, Unknown
  Obtained from environmental sample
  DOMAIN (15)...(95): Ribosomal L27 protein
  misc_feature (1)..(101): Xaa is any amino acid
MKNMNFNSFDLQLFAHKKGVGSSRNGRDSESKRLGVKEQAGHVVTAGSILVRQRGTRFYPGKNVGIGKDHTLYAKIDGQVAFERKGRDDRQISVYPTEKAM

SEQ ID NO: 74257 - DNA, 474 bp, Unknown
  Obtained from environmental sample
  misc_feature (1)..(474): n is a, c, g, or t
ttgccggtttgcccatntgcgccgccttcagctttaaactgccgtttgaaacggaaatcaatcaatgtatttaaatttttgtcgccgattaaaataacgctgccgccgcgtccgccgtcgccgccgtttggaccgccgcgcggcacatatttttcgcggcggaaactcgacatgccatcgccgccgcgccctgctttcaccataattttcgctctgtcaataaacactttccccaacctcctctgtaccaaaagctcgccgcatcctaaaaataatacctgcggacacttaagccgcaggcatataacaagcaaactacatcgctttttcggtaggataaacgctaatttgacggtcgtcgcgccctttgcgctcaaaagctacttggccgtcaattttggcatacaaagtatggtctttgccgatacctacatttttacccggataaaaacgcgttccgcgctgccttactaa

SEQ ID NO: 74258 - protein, 157 aa, Unknown
  Obtained from environmental sample
  misc_feature (1)..(157): Xaa is any amino acid
MPVCPXAPPSALNCRLKRKSINVFKFLSPIKITLPPRPPSPPFGPPRGTYFSRRKLDMPSPPRPAFTIIFALSINTFPNLLCTKSSPHPKNNTCGHLSRRHITSKLHRFFGRINANLTVVAPFALKSYLAVNFGIQSMVFADTYIFTRIKTRSALPY

SEQ ID NO: 74259 - DNA, 474 bp, Unknown
  Obtained from environmental sample
  misc_feature (1)..(474): n is a, c, g, or t
ttgagcgcaaagggcgcgacgaccgtcaaattagcgtttatcctaccgaaaaagcgatgtagtttgcttgttatatgcctgcggcttaagtgtccgcaggtattatttttaggatgcggcgagcttttggtacagaggaggttggggaaagtgtttattgacagagcgaaaattatggtgaaagcagggcgcggcggcgatggcatgtcgagtttccgccgcgaaaaatatgtgccgcgcggcggtccaaacggcggcgacggcggacgcggcggcagcgttattttaatcggcgacaaaaatttaaatacattgattgatttccgtttcaaacggcagtttaaagctgaaggcggcgcanatgggcaaaccggcaatatgcatggccggaatggcganaattatttattcgtgttccgccggaactgttgtcaaanatgccgatacggaaacaacacgaggcgatattactaa

SEQ ID NO: 74260 - protein, 157 aa, Unknown
  Obtained from environmental sample
  DOMAIN (52)...(153): GTP1/OBG
  misc_feature (1)..(157): Xaa is any amino acid
MSAKGATTVKLAFILPKKRCSLLVICLRLKCPQVLFLGCGELLVQRRLGKVFIDRAKIMVKAGRGGDGMSSFRREKYVPRGGPNGGDGGRGGSVILIGDKNLNTLIDFRFKRQFKAEGGAXGQTGNMHGRNGXNYLFVFRRNCCQXCRYGNNTRRYY

SEQ ID NO: 74261 - DNA, 843 bp, Unknown
  Obtained from environmental sample
  misc_feature (1)..(843): n is a, c, g, or t
ttgccatttggattttatctttataaacggcttatagacgaacttgcaaattgggaaggcgacaaaattaaaactttgcggttagtcgttggcggtgaaccgtttattaatcctgattttactgaaatggtaaaaatcgctaaatataaagatgtcgcggaaagcgtagatactatttctaacggttcgcttttgacattagcgattgcggaaaaaattgtagaatacgaacttgattgtattcgattttctatttattcagtacttaacgaacgccatcaaaaggttactcaaaccgcttttaatataaacaaaatttatgaaaatatttataacctgcggcagctcagagaaaaaagaaaaattaaaaagccctatattatggtgaaaatgtttaattcacattctgaggaaaatcaagttttttttgaaatgtataaagatattgcagacgaagtatgcttagaaggcgttcttggcaacgatatgatcttaacggagtatttcgatagtaaagaaattgttgaggaatccaaaaaagatactgccgaagctttaaatccgcatattgcctgtccgcgaccatttatggcgatggttgtcaattgcgcgggcgatgtgtgtatatgttgcgagcctagcaaaggaactaaaattggcaatgttaattttaacactttgcaagaaatatgggaaagtgaaaatatgtttgaatttcgtaaaatgttactggaaaacagaaggcatgaaaattgcgtatgcaaaaattgcagttttttcaaatttttcccaccggaagataatattgacgggtttcctattgaaaagttaagatggaaatag

SEQ ID NO: 74262 - protein, 280 aa, Unknown
  Obtained from environmental sample
  misc_feature (1)..(280): Xaa is any amino acid
MPFGFYLYKRLIDELANWEGDKIKTLRLVVGGEPFINPDFTEMVKIAKYKDVAESVDTISNGSLLTLAIAEKIVEYELDCIRFSIYSVLNERHQKVTQTAFNINKIYENIYNLRQLREKRKIKKPYIMVKMFNSHSEENQVFFEMYKDIADEVCLEGVLGNDMILTEYFDSKEIVEESKKDTAEALNPHIACPRPFMAMVVNCAGDVCICCEPSKGTKIGNVNFNTLQEIWESENMFEFRKMLLENRRHENCVCKNCSFFKFFPPEDNIDGFPIEKLRWK

SEQ ID NO: 74263 - DNA, 636 bp, Unknown
  Obtained from environmental sample
  misc_feature (1)..(636): n is a, c, g, or t
atggacgccatcaccataagcatagaccgttttgacggcacgaggcgccacaggcaggattaccgggtggagaaaagcgatatcctcagcaaaaccgtgctggggacgctttttcacatcaaggaaaaactcgatcccacgctgaacttcacggcttcctgccgttcggccatatgcggagcttgcggcgtgcgcctcaacggccacgccattctggcctgcgacaccaagatcgaggaagtgttcgccatatacggagccggagacctgaccatctcgccgctggcaaactatacggtgatttccgacctggtcgtggactgggaaccctccctggaaaatctgcgcaaaatccgtccggaactcgcggccaagagcgaattttccaaggagaaaggctgtacgcaaagcgaagccgacttcgataacatcaaacgcatgtgggattgcatcctctgcggctgttgcgcctcggactgcaacaagctcgccgccaaccgcaaggattatctggaaccctttgtctttacgcatgcctggcgcgccgccgcggactcccggaacggggatcccatggcgcacggcaggcccgccgcggagaacggcctgggaaatgcgtccctcggccgattctga

SEQ ID NO: 74264 - protein, 211 aa, Unknown
  Obtained from environmental sample
  misc_feature (1)..(211): Xaa is any amino acid
MDAITISIDRFDGTRRHRQDYRVEKSDILSKTVLGTLFHIKEKLDPTLNFTASCRSAICGACGVRLNGHAILACDTKIEEVFAIYGAGDLTISPLANYTVISDLVVDWEPSLENLRKIRPELAAKSEFSKEKGCTQSEADFDNIKRMWDCILCGCCASDCNKLAANRKDYLEPFVFTHAWRAAADSRNGDPMAHGRPAAENGLGNASLGRF

SEQ ID NO: 74265 - DNA, 324 bp, Unknown
  Obtained from environmental sample
  misc_feature (1)..(324): n is a, c, g, or t
atggcgatgctttcccaggccctcaaggactgncagcaggaatacctgcgcaccagcgtgccctgcgccaatccggtctataacacgctcttcacccagtatgtggaattcggcaacatgatcacctgcgcccgcgcggccgtcttcgccggcgaagcgcgcaaagagtcgcggggcgcgcatacgcgccacgacttcccgaagcgcgatgacgagaatttcctcaaacacagcatggtgacgcttgacggcgacgtcaacatgaaactgggctggaaagaagtaaacatcaccaaattcaagccgcaggagcgcaaatactaa

SEQ ID NO: 74266 - protein, 107 aa, Unknown
  Obtained from environmental sample
  DOMAIN (4)...(107): Fumarate reductase/succinate dehydrogenase flavoprotein C-terminal domain
  misc_feature (1)..(107): Xaa is any amino acid
MAMLSQALKDXQQEYLRTSVPCANPVYNTLFTQYVEFGNMITCARAAVFAGEARKESRGAHTRHDFPKRDDENFLKHSMVTLDGDVNMKLGWKEVNITKFKPQERKY

SEQ ID NO: 74267 - DNA, 789 bp, Unknown
  Obtained from environmental sample
  misc_feature (1)..(789): n is a, c, g, or t
ttgnagttcgcggcatgttcngatgtattcctgttccttcttttcgatgaagtcttgggcgcggttttgcagctccgccgccanatcgccgtcgaatccctcgatgccggacaattcggacaaatccacgaacgcgatttcctcgatggtgcggaacccttcgccaatcaggattttcgcgaccatatcgtcgatgtcgagcccggccatgaacaattccgtcttttccttggtttccttcgcgcggtgttcctgctcctgctgctcgttcatcacgtctatattccagccggtcaattgggacgccagacgcacgttctgccccctccgcccgattgcgagcgactgctggtcctcgttcacgacgacaatcgcggtgtgcgtgtcctcgtccactacaatccgcgcgacctttgccggcgatatggcgttcactatgtacggggcggggtcgtcggagtacagaatcacgtcgattttttcgccgtggcattcgttgattaccggctgaatccgggttccctttatgccgactgtcatgccgaccgggtcgatggacgggtcgtccgtggacacggcgattttcgcgtgactgccgggcgcgcgggcgaccgacctgattttaatcagcccctcgtagatttcgggcacttcttggaagaacagccgctccataaacatcgggtgggtgcgcgtcaggataatctgcggctgggaattggagcgtatgacgtccagaatcagcgcgcgcacgcggtcgccgacctgcaaccgttcgcccgggattag

SEQ ID NO: 74268 - protein, 262 aa, Unknown
  Obtained from environmental sample
  misc_feature (1)..(262): Xaa is any amino acid
MXFAACSDVFLFLLFDEVLGAVLQLRRXIAVESLDAGQFGQIHERDFLDGAEPFANQDFRDHIVDVEPGHEQFRLFLGFLRAVFLLLLLVHHVYIPAGQLGRQTHVLPPPPDCERLLVLVHDDNRGVRVLVHYNPRDLCRRYGVHYVRGGVVGVQNHVDFFAVAFVDYRLNPGSLYADCHADRVDGRVVRGHGDFRVTAGRAGDRPDFNQPLVDFGHFLEEQPLHKHRVGARQDNLRLGIGAYDVQNQRAHAVADLQPFARD

SEQ ID NO: 74269 - DNA, 300 bp, Unknown
  Obtained from environmental sample
  misc_feature (1)..(300): n is a, c, g, or t
atgtttctagttgatgaacttgagcaaagcctccatcccgatcttactggcaggattatcaacaggtttatggataaagataaaaaccccaataacgcgcaattggtatttacaacgcataacccgtggtttttacaagacctgaccaaaacacagatatttataaccgaaaaaaacgtcaaagctgaaacagagataacccgccttgacgaaattggcggagtgcgaaatgacgaaaattatttcatgaaatacatttccggcgaatatgatgggcggccaagaataagggaagcctaa

SEQ ID NO: 74270 - protein, 99 aa, Unknown
  Obtained from environmental sample
  misc_feature (1)..(99): Xaa is any amino acid
MFLVDELEQSLHPDLTGRIINRFMDKDKNPNNAQLVFTTHNPWFLQDLTKTQIFITEKNVKAETEITRLDEIGGVRNDENYFMKYISGEYDGRPRIREA

SEQ ID NO: 74271 - DNA, 645 bp, Unknown
  Obtained from environmental sample
  misc_feature (1)..(645): n is a, c, g, or t
atggcgggcagaaaatcggtgggcttgtacaatattggaataaaattttctgaaatgatatggttgataccccaaagccttaccgccgtgcagtacggacgcattgtcaattgcgaagaaaacagggaatacgcaaaaaaaatatcgctggtttttctcaaacttgcctttattgtttcgttttgcggggcggtattcttggcatttttccccgaccagtggctgggatacatcttccgagcggaatttatagaggcaaaacgcgtgttttacgcactgggtttggggattgttattttttcgggcaacatcattttgtccacttattttgcaggttttggaaaatacaaaaccaacatgacggcttcgctcattggactggcggtgttggggatatgttgccttgcctctgtttcttggttgaaacaaactgattatctgaatattatctttgcagtggggctaatgaccagcctttcctatttgagcagtttcagttatacctttatccgttttgccaaagagaccaacctgaaattgagcgagttgaagattggaaaacaggatatgcagattttaaggaaagagatacggaagatacggacggcaatcaaacgttattcttcgtttaaagataaaaattaa

SEQ ID NO: 74272 - protein, 214 aa, Unknown
  Obtained from environmental sample
  misc_feature (1)..(214): Xaa is any amino acid
MAGRKSVGLYNIGIKFSEMIWLIPQSLTAVQYGRIVNCEENREYAKKISLVFLKLAFIVSFCGAVFLAFFPDQWLGYIFRAEFIEAKRVFYALGLGIVIFSGNIILSTYFAGFGKYKTNMTASLIGLAVLGICCLASVSWLKQTDYLNIIFAVGLMTSLSYLSSFSYTFIRFAKETNLKLSELKIGKQDMQILRKEIRKIRTAIKRYSSFKDKN

SEQ ID NO: 74273 - DNA, 744 bp, Unknown
  Obtained from environmental sample
  misc_feature (1)..(744): n is a, c, g, or t
gtgttgcccatgaatacaggtgcagaagcagacgaaaccgccctcaaactcgctcggcggtggggtgttgtcaaaaaaggcattcccaacgacgaggtgaaaatgatttgctgcagcggcaatttccacggacggacaattaccattgtttccatgtcggacgaccccgattcttttgcaaattatggaccgcttacgcccgggttcattcgtattccctacgatgatattgaggctttggaaaaagcactggaggcggaaggcagcaaaattgcaggttttctggttgagcctattcagggagaagcaggcgtgtacgttccgcaggacggttatttgaaaaaggcatacgacctttgcaaaaaacacaacgtcctgtttatcgccgacgaagtgcagacaggcatcgcccgcacgggtaaactattagcctgcgaccacgaaaacgtaagacccgatgtgcttatcttgggaaaagccatttcgggaggtgtcttgccgatttcggcagtcttggcggacaatgacattatgctttgcatcaaacccggtgaacacggttctactttcggcggatttccattagcctgcaaggtggcaaccgcagccttggaagtggtaaaagaagaaaaattggcggaaagagccgaacatctgggaaatgttttccgcaattacatgcgggaagtaaaatcggatatgatttcattaatccgcgggaaaggtttgttaacgccatcgtaa

SEQ ID NO: 74274 - protein, 247 aa, Unknown
  Obtained from environmental sample
  DOMAIN (1)...(247): Aminotransferase class-III
  misc_feature (1)..(247): Xaa is any amino acid
MLPMNTGAEADETALKLARRWGVVKKGIPNDEVKMICCSGNFHGRTITIVSMSDDPDSFANYGPLTPGFIRIPYDDIEALEKALEAEGSKIAGFLVEPIQGEAGVYVPQDGYLKKAYDLCKKHNVLFIADEVQTGIARTGKLLACDHENVRPDVLILGKAISGGVLPISAVLADNDIMLCIKPGEHGSTFGGFPLACKVATAALEVVKEEKLAERAEHLGNVFRNYMREVKSDMISLIRGKGLLTPS

SEQ ID NO: 74275 - DNA, 342 bp, Unknown
  Obtained from environmental sample
  misc_feature (1)..(342): n is a, c, g, or t
ttgcggaaaacatttcccagatgttcggctctttccgccaatttttcttcttttaccacttccaaggctgcggttgccaccttgcaggctaatggaaatccgccgaaagtagaaccgtgttcaccgggtttgatgcaaagcataatgtcattgtccgccaagactgccgaaatcggcaagacacctcccgaaatggcttttcccaagataagcacatcgggtcttacgttttcgtggtcgcaggctaatagtttacccgtgcgggcgatgcctgtctgcacttcgtcggcgataaacaggacgttgtgttttttgcaaaggtcgtatgcctttttcaaataa

SEQ ID NO: 74276 - protein, 113 aa, Unknown
  Obtained from environmental sample
  SIGNAL (1)...(23)
  misc_feature (1)..(113): Xaa is any amino acid
MRKTFPRCSALSANFSSFTTSKAAVATLQANGNPPKVEPCSPGLMQSIMSLSAKTAEIGKTPPEMAFPKISTSGLTFSWSQANSLPVRAMPVCTSSAINRTLCFLQRSYAFFK

SEQ ID NO: 74277 - DNA, 450 bp, Unknown
  Obtained from environmental sample
  misc_feature (1)..(450): n is a, c, g, or t
ttgacggaatccgcgggccaggttttcaggaccattcggagggcgttcccctattttaagaaaaatgagaaagacggaggggtcattgtcaccacggcctccatgtacgggatcgtgtccccggattaccggatctacgggacgtcggggcagaacaaccctcctgtctacggaatgggaaaggccgcggtgattcaactgaccaagtacgcggcggcgcatttggcgcccatgaacatacgggtcaatagcgtgtctcccgggcctgtgcctgacccttcaaaaagcccgcccccggaattccttgagcagcttgcgggaaagaccatgcttggccggatcggtaagcccgaagacattgccggggcctatatctatcttctttccgacgcggcctcttttgtagccggggaatgtatctccgtagacggcggctggacaaagtggtga

SEQ ID NO: 74278 - protein, 149 aa, Unknown
  Obtained from environmental sample
  misc_feature (1)..(149): Xaa is any amino acid
MTESAGQVFRTIRRAFPYFKKNEKDGGVIVTTASMYGIVSPDYRIYGTSGQNNPPVYGMGKAAVIQLTKYAAAHLAPMNIRVNSVSPGPVPDPSKSPPPEFLEQLAGKTMLGRIGKPEDIAGAYIYLLSDAASFVAGECISVDGGWTKW

SEQ ID NO: 74279 - DNA, 852 bp, Unknown
  Obtained from environmental sample
  misc_feature (1)..(852): n is a, c, g, or t
atggcgatgttcagtagtcctttctggagaaccaacggattctttggattcatggcaatgatggtaccgatctccatgagcgtaggcttgacgggggcgcataccntgagtcgtgtcatgatatgcaaagatgaaaaaaccatttccaaaagctttattgccgctcaggttctggtgatactgttcattgtcctcctgtacgccaccgcaccgtatattaaacttctcgccccgaagaatgtgtctggacaatattcatacatatggatgatcgtgaactggtttccgccagtactaggaggcgcgattattgcgggtattgcggcggcggggttgtccaccgcctcaactcttttacagcaggcaggctccagtgtcggcaacgatatttaccttaagttttttattaaaaacgtcaggcaggaagataaggaaaagaaagtcctctttacatcacggctttttatgacaattgtgggcattataacgatgcttatatccatggtggactttgccggggatttttttgtactatacgcatggacattcgcatccgggatatttacctgctggctgcccgcaatctttgtaggagctgtatcaaaaaaggtgtcagaggcggcggcatactggtcgacggttctttccctttgcgcaaacgttatatactggctttttacactgcggttctcgttccttccacatcagatatttgtatctcttccattggcctttatcgttctttttgtggttatgcagtttaggaagcctacagaggtggaagtggcgggcttctggaaaatgcagagcaaaaagtataagagaatccacaattatgcggagggagtctaa

SEQ ID NO: 74280 - protein, 283 aa, Unknown
  Obtained from environmental sample
  SIGNAL (1)...(27)
  misc_feature (1)..(283): Xaa is any amino acid
MAMFSSPFWRTNGFFGFMAMMVPISMSVGLTGAHTXSRVMICKDEKTISKSFIAAQVLVILFIVLLYATAPYIKLLAPKNVSGQYSYIWMIVNWFPPVLGGAIIAGIAAAGLSTASTLLQQAGSSVGNDIYLKFFIKNVRQEDKEKKVLFTSRLFMTIVGIITMLISMVDFAGDFFVLYAWTFASGIFTCWLPAIFVGAVSKKVSEAAAYWSTVLSLCANVIYWLFTLRFSFLPHQIFVSLPLAFIVLFVVMQFRKPTEVEVAGFWKMQSKKYKRIHNYAEGV

SEQ ID NO: 74281 - DNA, 909 bp, Unknown
  Obtained from environmental sample
  misc_feature (1)..(909): n is a, c, g, or t
gtggcgggaaccggggagaaatacaacatcttcaatgtcgccggaattgcgcacaaagaagtcatcatgtgccgtgttctcgctgacttgcttgacccgcatggcaaacactgtcagggaggccgttacctcagtttgttttgggaggctatatctcaaaaattaccaaagggccttgaacttaaaatagaaaacacgaaggtaacggcagagtatgtaattgatgaaaaccgccgaatcgacatcacccttgaagacggcagaattttcattcccattgaagtcaaaatttgggcgggagaccagccaaaacaagtggcggattacttcgcctttgccaagacaaaaaaccggaacagccatgtccctgtgctctacctcaccgttgacggtcatgagccatcggacttttcaaaagccggtgtaggcaaagacgactatgtaccgctctcgttcaagaacgaaattctcgtctggcttgagaagtgtacggtaaatacacaggaaacaatggttcccatacgggaaaatcttaaacaactcattacggcggtaaaatcgctgtgcggaaaatcggaggatgcggaaatggaagacgcaattttcaaactaatcaccagagacgatgacacggttcgggcggcgctggcaatatgcggcgctgcgaattttaacaacaaagcgttagaggcgttcaaaagcaatgtgcttgaacaggtaaaaaaaacgttccctgatgccgattatgccgttgatgaaggctggtattttattcaagtttccgtcatgggaggaaattaccttctggacgtgaactatgattggaaatctttacacatagaaaattgcattgatgaaaaggaacgccatcatcagattgaagatcgcattactcagaaaaatgactga

SEQ ID NO: 74282 - protein, 302 aa, Unknown
  Obtained from environmental sample
  misc_feature (1)..(302): Xaa is any amino acid
MAGTGEKYNIFNVAGIAHKEVIMCRVLADLLDPHGKHCQGGRYLSLFWEAISQKLPKGLELKIENTKVTAEYVIDENRRIDITLEDGRIFIPIEVKIWAGDQPKQVADYFAFAKTKNRNSHVPVLYLTVDGHEPSDFSKAGVGKDDYVPLSFKNEILVWLEKCTVNTQETMVPIRENLKQLITAVKSLCGKSEDAEMEDAIFKLITRDDDTVRAALAICGAANFNNKALEAFKSNVLEQVKKTFPDADYAVDEGWYFIQVSVMGGNYLLDVNYDWKSLHIENCIDEKERHHQIEDRITQKND

SEQ ID NO: 74283 - DNA, 465 bp, Unknown
  Obtained from environmental sample
  misc_feature (1)..(465): n is a, c, g, or t
atgttttgtccagattgtggaaaagaagttccggcaggaggcaaattttgccccagttgcggaaaatcattcggtactgcaccaaataccgcttccgcctcaggcccggcggagccgcaagccgctcagagtgacgcggagcagaacaaaggaatggcgatactcgcctatattatatttttcatccccttgcttgccggaacgcacaaaacttccgagtttgtaaagttccacaccaatcagggaattgtcctggtaatattctacgttggttatgccattgtttccgctattctttccgccattctattggtaatttcatggggactatggggtgtcatgagcttaatatttggtctgttatggttcgtcccgctcgtgtttgttattttaggcatagtcaacgcggcaacaggcaagatgaaaccattaccgctaatcggcaagatcacaattttgaagtag

SEQ ID NO: 74284 - protein, 154 aa, Unknown
  Obtained from environmental sample
  misc_feature (1)..(154): Xaa is any amino acid
MFCPDCGKEVPAGGKFCPSCGKSFGTAPNTASASGPAEPQAAQSDAEQNKGMAILAYIIFFIPLLAGTHKTSEFVKFHTNQGIVLVIFYVGYAIVSAILSAILLVISWGLWGVMSLIFGLLWFVPLVFVILGIVNAATGKMKPLPLIGKITILK

SEQ ID NO: 74285 - DNA, 366 bp, Unknown
  Obtained from environmental sample
  misc_feature (1)..(366): n is a, c, g, or t
gtgtcgacgaaatccgttgagcagttgattgaggagaaggcgtacgaggtctaccagaggcgcgtgcgtagcggtgtgccgggcgaccaacattccgattgggctcaggccgagaaggaagtgagggaggagttgaagaagaaggagtctgcggcaaagcctaaggcgccggagccgaagcctgccgctgcccctaaggtagaggagaagcctgccgcgaaggtggaggtcaaggcggaggtgaagcctgcccccgctcccgctcccgccaagtctgaggccaaggagcccgccgcgacggtggtgaagccggcggttgcgacgcccgttaagaaggttgtcgctaagaaggccgataagaggtag

SEQ ID NO: 74286 - protein, 121 aa, Unknown
  Obtained from environmental sample
  misc_feature (1)..(121): Xaa is any amino acid
MSTKSVEQLIEEKAYEVYQRRVRSGVPGDQHSDWAQAEKEVREELKKKESAAKPKAPEPKPAAAPKVEEKPAAKVEVKAEVKPAPAPAPAKSEAKEPAATVVKPAVATPVKKVVAKKADKR

SEQ ID NO: 74287 - DNA, 939 bp, Unknown
  Obtained from environmental sample
  misc_feature (1)..(939): n is a, c, g, or t
ttgctggtttccgctctttgggcgcagaacaacaggtttgcgctggtaatcgggaacgccaattatgaaaacacggacatcaagaaattgcctaatactataaatgacgcggaagatattagcgccgctctaaggagtttaggctataaggtagaactaaaacgcaatcttaaactagtggatatggtaaacgcggttgatgaatttatagccctgcttaaagaggatcgcacgaataacgaaggctttatctggttcgcgggacatggcgtgttaatagataaccaaaacttccttttgccagtggatgtaaacattaagacggataatcttgcaaaacgcacttcttatcccctaaacgatttattggacgagcttaataaagcgcaaaataaggcaaacgtgctggttgtggatgcctgtcgctctcctcctgaaactgccgaagccgcccgtgaagccacccgcgatgcatacggttctgccacacgggttgtacagaaggttgccaatgtccccaaagatttgtttattatgtattccacaaagtcaggccagcctgcttttgaaggggagggccagcgcaacagcccctttgccaaagcctttctggcgcatatcaactcgactgatcctttagttcttatggcatctgatattttaaacgagacctttaaattgaccgggggaaaacagagtccagattggcaagtaagcatgagtgatgctcgctatagcttaaaccctgccggctctcgctcctctcaaccaccctcaaccgcattaaccggcggcatctccgtaacgtccgaaatcgccggagaaattctcatcgacggcaaaaccaccacgatcaaagccggtggcactgaaatcatatcaaacctacaaaacggtgacacagatgttgttttaaaggtaataacggtacggtcataa

SEQ ID NO: 74288 - protein, 312 aa, Unknown
  Obtained from environmental sample
  DOMAIN (12)...(247): Caspase domain
  misc_feature (1)..(312): Xaa is any amino acid
MLVSALWAQNNRFALVIGNANYENTDIKKLPNTINDAEDISAALRSLGYKVELKRNLKLVDMVNAVDEFIALLKEDRTNNEGFIWFAGHGVLIDNQNFLLPVDVNIKTDNLAKRTSYPLNDLLDELNKAQNKANVLVVDACRSPPETAEAAREATRDAYGSATRVVQKVANVPKDLFIMYSTKSGQPAFEGEGQRNSPFAKAFLAHINSTDPLVLMASDILNETFKLTGGKQSPDWQVSMSDARYSLNPAGSRSSQPPSTALTGGISVTSEIAGEILIDGKTTTIKAGGTEIISNLQNGDTDVVLKVITVRS

SEQ ID NO: 74289 - DNA, 372 bp, Unknown
  Obtained from environmental sample
  misc_feature (1)..(372): n is a, c, g, or t
gtgtccggtacatctactgaaattggaagcggtaaacgtaacacgcaaatgattgttgattttctgaaaaattacggtgaaactggaagcgcggcgcagttgtgcgcgaatttgaatttcggaggctacaaggactggtttttaccgagcagagacgaactggatttaatatacaaaaacttagtatccagaaacttgggtaattttaagacaatagtggacaggacaaatgagacgaataattactggtcatcttcccagtataatggttatgtttcgtggctccaggattttagtgatggtttccagaactacgctaccggcctaggcaagggtgatactttttcagttcgcgctattcggtctttttaa

SEQ ID NO: 74290 - protein, 123 aa, Unknown
  Obtained from environmental sample
  misc_feature (1)..(123): Xaa is any amino acid
MSGTSTEIGSGKRNTQMIVDFLKNYGETGSAAQLCANLNFGGYKDWFLPSRDELDLIYKNLVSRNLGNFKTIVDRTNETNNYWSSSQYNGYVSWLQDFSDGFQNYATGLGKGDTFSVRAIRSF

SEQ ID NO: 74291 - DNA, 492 bp, Unknown
  Obtained from environmental sample
  misc_feature (1)..(492): n is a, c, g, or t
atggcggccaccggccttttcagcgcctttgccgcgggctgtctggtcatggcggcgggcctggtctttatggatccgctggcgcggcttcttggcgcgaccgataccatactgccctttgcccgatcctacctgcgctttattttaatcggcgcgccctttatgatttcttcgctgatgctgaacaacattctgcgctttcagggaagcgccatgtgggcgatggttggcatgataagcggagcggtgctgaacatcggcctggacccgctgttcatttatgtccttggcatgggggttgccggagcttcgctggcaaccatgataagccaggcggtaagctgtacgcttctgcttgttgtaagctgcgtcgcgngcaataacgtgcgaatctccccccgtaatttttcgccggggcggcggcagtatatggaaatagcccgcggcggagttccctccctgctgcggcaaggccttcaaagcctggcgtga

SEQ ID NO: 74292 - protein, 163 aa, Unknown
  Obtained from environmental sample
  SIGNAL (1)...(24)
  misc_feature (1)..(163): Xaa is any amino acid
MAATGLFSAFAAGCLVMAAGLVFMDPLARLLGATDTILPFARSYLRFILIGAPFMISSLMLNNILRFQGSAMWAMVGMISGAVLNIGLDPLFIYVLGMGVAGASLATMISQAVSCTLLLVVSCVAXNNVRISPRNFSPGRRQYMEIARGGVPSLLRQGLQSLA

SEQ ID NO: 74293 - DNA, 342 bp, Unknown
  Obtained from environmental sample
  misc_feature (1)..(342): n is a, c, g, or t
gtggacgcaaagcttgtggaattggcgatccgcaccaacgcgatgctggtgacaaatgacttcaatctgaacaaggttgccgctctccggggtgtccgcatcctcaatattaacgaactcgcgaatgtgctcaaaaccaatgtcctccccggcgaagaaatgtccgtaaccgtcatcaaggaagggaaggatcccaatcagggcattgcctatctggacgacggcacgatgatcgtggtggataaggggcgcagcttcattaaccagcgcatcccggttatggtgacgagcgtttttcagaccccggcggggcgcatgatctttgcgcatccggtaaaataa

SEQ ID NO: 74294 - protein, 113 aa, Unknown
  Obtained from environmental sample
  misc_feature (1)..(113): Xaa is any amino acid
MDAKLVELAIRTNAMLVTNDFNLNKVAALRGVRILNINELANVLKTNVLPGEEMSVTVIKEGKDPNQGIAYLDDGTMIVVDKGRSFINQRIPVMVTSVFQTPAGRMIFAHPVK

SEQ ID NO: 74295 - DNA, 705 bp, Unknown
  Obtained from environmental sample
  misc_feature (1)..(705): n is a, c, g, or t
atgaaggaaaagcggtgcgctgaatgcgggatccgctctgcaatctttcgcctgcntgagcataccggcgaggcggaactcggcgaacttatcgatacgctcaatgccgaccccgctatcgacgcttttcttatccagtctccattaccggcacatatcaatgaggcgcgcatggttgaacgcatccgccccgataaggacgccgattgctttcatccgtataattttgggcggctcgctatgggcaatccgctcgtgctgccatgcacacccgcaggggtgctcgttctgctcgaccactatggcgtctcggttgagggaaaacgcgcgcttgtgatcggacgaagcaatatcgcgggaaagccgcttgggctcatgcttctggcgcgccacgcgagcgtaacctgggcgcactcgcgcacacgcaatcttcccgaactctgccgcgaagccgaattgatcttcacagccgtcgggaaacccaattttttgaccgccgagatggtcagctcgggcgcggtggttgtggatgtgggcatcaaccgcgtcccgtcgggcgaaggctatattctgcgcggcgacgtggattttgaagcggtcagcgcggtcgcctcctggatcaccccggttcccggcggggtaggcgccatgaccatcgcgatgctcctctccaactgtattgcgctcgcgcgggcgcgttcatga

SEQ ID NO: 74296 - protein, 234 aa, Unknown
  Obtained from environmental sample
  DOMAIN (1)...(69): Tetrahydrofolate dehydrogenase/cyclohydrolase, catalytic domain
  misc_feature (1)..(234): Xaa is any amino acid
MKEKRCAECGIRSAIFRLXEHTGEAELGELIDTLNADPAIDAFLIQSPLPAHINEARMVERIRPDKDADCFHPYNFGRLAMGNPLVLPCTPAGVLVLLDHYGVSVEGKRALVIGRSNIAGKPLGLMLLARHASVTWAHSRTRNLPELCREAELIFTAVGKPNFLTAEMVSSGAVVVDVGINRVPSGEGYILRGDVDFEAVSAVASWITPVPGGVGAMTIAMLLSNCIALARARS

SEQ ID NO: 74297 - DNA, 660 bp, Unknown
  Obtained from environmental sample
  misc_feature (1)..(660): n is a, c, g, or t
atggatccctatatgcgcccgatgattgaccaaaccagtttttgcggtatagcccgaacactggaatttgttaaaacggatataaaaatgccttatttggaatatgaggaatttgatcgtttacaatatgcccgtaaacaggatggtggctttaaatattttgataataacctggaccctagtgttcaggcccaggcagaaaaggttatggatgccggcaaaggcgaagtaatcgtgtgtgctgctcatggattaatcggcgggatattcggaagcgacaatgcgcttgggttggtaaacaaaggtgttgtgggcattgtacttgatggttatatgcgggatacacctgaaagcattttacaggggctgccggtcttttcaaagggtatatcctatgtgcatccgcaagggcgtattcaggttcatgcagcagataagccggtagtttgcgcaggcgttccggtaatgtccggtgatgtgatttcagccgatcatgacggaattgtggttatacccgcccgcttcgccgatgaagtggcgtatcgttcctacagaatccagcaaaaagatcgtgttaaccgcaggaagaaatacgaagatgccggcaagcccatggataagacagttgagttgctgcctgacatggcacgctggttttga

SEQ ID NO: 74298 - protein, 219 aa, Unknown
  Obtained from environmental sample
  DOMAIN (1)...(170): Demethylmenaquinone methyltransferase
  misc_feature (1)..(219): Xaa is any amino acid
MDPYMRPMIDQTSFCGIARTLEFVKTDIKMPYLEYEEFDRLQYARKQDGGFKYFDNNLDPSVQAQAEKVMDAGKGEVIVCAAHGLIGGIFGSDNALGLVNKGVVGIVLDGYMRDTPESILQGLPVFSKGISYVHPQGRIQVHAADKPVVCAGVPVMSGDVISADHDGIVVIPARFADEVAYRSYRIQQKDRVNRRKKYEDAGKPMDKTVELLPDMARWF

SEQ ID NO: 74299 - DNA, 612 bp, Unknown
  Obtained from environmental sample
  misc_feature (1)..(612): n is a, c, g, or t
atgttgatggtattgttggtgggtgacagaatacctttagattcaaaactagcgccgcctacgccgtattgggcattgctggcgcgtgtatacaacgccgcaccgtggctgggagcagtgttattgagcggtgaagcagcttcattgccgtatataatgccgtttgtcataaagaatgtgccgttaccttgtacatataccccgccgccctcaaaggtggcgctattgccgctaatggttcctccgttcatggtaaattcaccagacgtatacacatacactccaccaccgccgccgccgccgttgttgccgctaatggttcctccgttcatggtaaattcaccagacatattcacatacacaccgccgccgtccgcattgttagtattgccggtaattttagaaccattttccatgataagttcgccgccggaatttacttttactaatgccgcagtattatcactaagaccctctaaagtaatgttttccagtatcagggtaacgccgtcgttaatagtaaacatactgcctgtaccagagaggcttatcgtttttatgtcgtttgctttttccgatttgatgactatggttaccggcgagacaccataa

SEQ ID NO: 74300 - protein, 203 aa, Unknown
  Obtained from environmental sample
  misc_feature (1)..(203): Xaa is any amino acid
MLMVLLVGDRIPLDSKLAPPTPYWALLARVYNAAPWLGAVLLSGEAASLPYIMPFVIKNVPLPCTYTPPPSKVALLPLMVPPFMVNSPDVYTYTPPPPPPPLLPLMVPPFMVNSPDIFTYTPPPSALLVLPVILEPFSMISSPPEFTFTNAAVLSLRPSKVMFSSIRVTPSLIVNILPVPERLIVFMSFAFSDLMTMVTGETP

SEQ ID NO: 74301 - DNA, 312 bp, Unknown
  Obtained from environmental sample
  misc_feature (1)..(312): n is a, c, g, or t
gtggtgctggtaaccgagggcggaaacgcccagcgggcgaccaagttggccgatggggaagcaaaacgagtgcgacgggttatccccgaggcgccggtaacggtggtgcgtgtgggcgaaggcgaaggccaaatcccgctcactaaattgagccgccatgtaaccaagatgaagcccattttgagcaaaaccgaggttgcagatgtcaccaaacgactcaagccgctgaacgttaagaagccgcttcccattcctaaagggattgacccgttcaatacgcgcccagaccgcaaaggcatgcggggccggtaa

SEQ ID NO: 74302 - protein, 103 aa, Unknown
  Obtained from environmental sample
  misc_feature (1)..(103): Xaa is any amino acid
MVLVTEGGNAQRATKLADGEAKRVRRVIPEAPVTVVRVGEGEGQIPLTKLSRHVTKMKPILSKTEVADVTKRLKPLNVKKPLPIPKGIDPFNTRPDRKGMRGR

SEQ ID NO: 74303 - DNA, 549 bp, Unknown
  Obtained from environmental sample
  misc_feature (1)..(549): n is a, c, g, or t
ttgaaagacctgtccctccatatattagacattgttcaaaattctatcagtgcgaaagcctcactgattcggattgcgattgacgaagacaaattcaacaaccgttatgtgttgacgatagaagacaacggaaccggcatgccgcccgagatgttggccaaagtcacagacccttacaccacctctcgaacaacacggaaagtcggattaggcctgcctttgctaaaactcaacgccgaactcgccaacggccgtttggatattacatccgaactcggcgtaggcacaaaggttgttgcaatgtttgaatttgaccacattgaccgcgtacccatcggcgatatcgcaggtgttgtcgtgatgttggcgcagatgaacccaaatttgacgtttgtttatagacacaccacgccaaaaggcgaatatactttcgataccgaagaaatcaaagccgttttggacgatttatccattcaagacctcagtattcaaaaatatctgaaggaaatgatagaggagaatctaaaggatatcgggtacgataaataa

SEQ ID NO: 74304 - protein, 182 aa, Unknown
  Obtained from environmental sample
  DOMAIN (3)...(105): Histidine kinase-, DNA gyrase B-, and HSP90-like ATPase
  misc_feature (1)..(182): Xaa is any amino acid
MKDLSLHILDIVQNSISAKASLIRIAIDEDKFNNRYVLTIEDNGTGMPPEMLAKVTDPYTTSRTTRKVGLGLPLLKLNAELANGRLDITSELGVGTKVVAMFEFDHIDRVPIGDIAGVVVMLAQMNPNLTFVYRHTTPKGEYTFDTEEIKAVLDDLSIQDLSIQKYLKEMIEENLKDIGYDK

SEQ ID NO: 74305 - DNA, 381 bp, Unknown
  Obtained from environmental sample
  misc_feature (1)..(381): n is a, c, g, or t
atggcgagtggcgacccccccggcggcctgggctacggcatggaatactgctactcggtcatggagcggaccatcatggccggcttgctccaggcggacgacgccctgcagcagcccctcatcagcttcttcggcgaggacatctggaagtgcaaggaagccaacctccccacctccgaacatcccaacatgggcgatgccgtttgccgcggggtgcttatggaagtgaccgaggccgtcgccctcttgggcaccggctccagcattctgctcatgtgtcacccggcctcggtgaagctggtcaaggaatacatcaagctgatgtatgaaggcggcgcggngnncngcngcctgccggaagtgcccataaccnagttctaa

SEQ ID NO: 74306 - protein, 126 aa, Unknown
  Obtained from environmental sample
  misc_feature (1)..(126): Xaa is any amino acid
MASGDPPGGLGYGMEYCYSVMERTIMAGLLQADDALQQPLISFFGEDIWKCKEANLPTSEHPNMGDAVCRGVLMEVTEAVALLGTGSSILLMCHPASVKLVKEYIKLMYEGGAXXXXLPEVPITXF

SEQ ID NO: 74307 - DNA, 672 bp, Unknown
  Obtained from environmental sample
  misc_feature (1)..(672): n is a, c, g, or t
gtgcccttgaacgacaacatcataaacggccgcatccgcggcgtggtcggcgtggtgggctgcaacaacgtccgcgtggaacatgacacggtccacatcgacctcatcaaggaactcataaagcacgacatagtggtcctgaccacgggctgctcggccatggcctgcggcaaggccggcttactaaccccggaagcggcggcgatttacgccgggccgggtctggccgaagtctgcgagacggtgggcatccccccggttctccacatgggcgcctgtgttgacaacacccgtatcctcaccgcggccaccgaagtggtcaaggccggcggcctgggcaaggaactggccgacctgccggcggccggcgcggccccgggctggatgagcgaaaaggccgtcggcatcggccagtatttcgtaacctccggcgtcaacgtcatgctgggcgtgcccctgccgatctacggctcgcccaagttcgccaactacctggaggacgagatttacgaactctacggcggcaagtgggcctatgagcccgatccgatcaaggcggcccacaagataatcgcctggatcgaccagaaccgcgccaagctgggcatcaacgtggcccgggaacgcgtgctcatggatatggccgaccgtcagaagatcgaagccgcctaa

SEQ ID NO: 74308 - protein, 223 aa, Unknown
  Obtained from environmental sample
  DOMAIN (1)...(187): Prismane/CO dehydrogenase family
  misc_feature (1)..(223): Xaa is any amino acid
MPLNDNIINGRIRGVVGVVGCNNVRVEHDTVHIDLIKELIKHDIVVLTTGCSAMACGKAGLLTPEAAAIYAGPGLAEVCETVGIPPVLHMGACVDNTRILTAATEVVKAGGLGKELADLPAAGAAPGWMSEKAVGIGQYFVTSGVNVMLGVPLPIYGSPKFANYLEDEIYELYGGKWAYEPDPIKAAHKIIAWIDQNRAKLGINVARERVLMDMADRQKIEAA

SEQ ID NO: 74309 - DNA, 942 bp, Unknown
  Obtained from environmental sample
  misc_feature (1)..(942): n is a, c, g, or t
atgtatggtcgaagtgtgatggttatgtggatttatatcgttaccacggcagctatcttcggttgtgcgctgacaataattttatgccgcctatatgttttgagagctttcaattccatagacacggtattggaacgcatattgtcaaaggatgtaagcttgcccggtgaaatgacaggtgaggacagattatccaagcttacgcataaagcgaaccgtatcctggatatgtgggtttccgagcttaatcaaacgaaagatgaaaaagaaacaatacagggctttatatcggatatgtcccatcagatgaaaacgccgctgtccggtatttccatgtacgcggacttgctgttagagggcagcttgtcggcaaaggaacagcaggaatttttattccgcataaaatccagcacggacaagctccaatggatgatggacagcctgataaagatgtcacggcttgaggtcggagctatccagcttgctcccacttccaaaagaataaagcaaactgtatcggacgctatcagcagtgtccttgcggcggcttccaggaagaacatcaacataacagtgtcagattttgaggatatgccgctataccatgatcggaaatggacctgcgaggcgattgccaatgttctggagaacgccgtcaaatactccaggccggacggtgtaatcgaagtgtccgtcgagcacttgcctctccataccaaaatcatcatcaccgattacggaatggggattgaaaagggtgactggaacatggtttttaaacggttttaccgggggcaaaacgccagggacaacgagggcgcaggacttggcctgtaccttgccgcgctcattatggaaaagcagaacggctatatcatggtggattctatccccggtcaattcacttctttttcgctatttttgcggaattgtcagaaatga

SEQ ID NO: 74310 - protein, 313 aa, Unknown
  Obtained from environmental sample
  DOMAIN (91)...(157): His Kinase A (phosphoacceptor) domain
  misc_feature (1)..(313): Xaa is any amino acid
MYGRSVMVMWIYIVTTAAIFGCALTIILCRLYVLRAFNSIDTVLERILSKDVSLPGEMTGEDRLSKLTHKANRILDMWVSELNQTKDEKETIQGFISDMSHQMKTPLSGISMYADLLLEGSLSAKEQQEFLFRIKSSTDKLQWMMDSLIKMSRLEVGAIQLAPTSKRIKQTVSDAISSVLAAASRKNINITVSDFEDMPLYHDRKWTCEAIANVLENAVKYSRPDGVIEVSVEHLPLHTKIIITDYGMGIEKGDWNMVFKRFYRGQNARDNEGAGLGLYLAALIMEKQNGYIMVDSIPGQFTSFSLFLRNCQK

SEQ ID NO: 74311 - DNA, 591 bp, Unknown
  Obtained from environmental sample
  misc_feature (1)..(591): n is a, c, g, or t
atggtgataaatgagaatcttttgacgctggnaaagaaaaatcgtccaggcgaaaagataattaatctgagagcaattgcgatgcattggctggccgctccaaaccagaagccgataaatactcgcggctggtgggaaagcgagcaagccatcggatctgcccactacgtaattggcacagacggatatattatgcgaactttgccagaaaatgagattggatatcatatcgggtcaagtacccccgatccgaaaagcgggagaatttatacggataaggcaagggctttatttgggccggatgctttcactggaaaaacaaaaacaggcttctggataacacctaattttttcgccatcggaattgaaatgagtcatctcaataacgatcctggtgatttttcagaggcaactcttcaatcagcggcagagttagtagcggatattcttattcggcataataagccaatcgacatcgtcactactcatcatgaagtcgttggttggaaagactgccccagattatggacaaacaatcctgacctgtttcttgagtttaaagaacgggttactaaattcatgaatatttaa

SEQ ID NO: 74312 - protein, 196 aa, Unknown
  Obtained from environmental sample
  DOMAIN (12)...(185): N-acetylmuramoyl-L-alanine amidase
  misc_feature (1)..(196): Xaa is any amino acid
MVINENLLTLXKKNRPGEKIINLRAIAMHWLAAPNQKPINTRGWWESEQAIGSAHYVIGTDGYIMRTLPENEIGYHIGSSTPDPKSGRIYTDKARALFGPDAFTGKTKTGFWITPNFFAIGIEMSHLNNDPGDFSEATLQSAAELVADILIRHNKPIDIVTTHHEVVGWKDCPRLWTNNPDLFLEFKERVTKFMNI

SEQ ID NO: 74313 - DNA, 666 bp, Unknown
  Obtained from environmental sample
  misc_feature (1)..(666): n is a, c, g, or t
ttggtcggcggccacaagatgggctatatctacatcggcgccatcggcatcattttaagttacttcttcttcggccacgacaaggcccgggtactcgcccagaactgcgtgggctgcgaggcctgctccgacatttgcgctggcggcattgaactgccgcgcctgatccgtgaaatacgcgcccgcctgaatgatgaaaagggagcgcccaaggaagccggcctcatcgcatcggtcatgaaaaaccgcacccttttccacaccctgctcaagttcgccaaattcgcgcagcgtccgttgacgggcggcacgcctttcatccgccatcttccgcaaatgtttgcgggcgcccacaacttcaaggcgttgcccgccctggccgacagatctttccgtgagaaatggggggagatacgtcacaacgtctctgagccccggcggcgggtggcgcttttcgccggctgcgcgcaggatttcgtttatccggaacagttggaggccgccgtcacgctcctggccgcccacaatgtggacgtggattttcccctggatcagacttgctgcgggctgccgctggaaacatgggtcagcgcgcggtggcggcggatgtcgccctccagaacgccaaagcctttgacaagccggccgcctacgatgcggtcctga

SEQ ID NO: 74314 - protein, 221 aa, Unknown
  Obtained from environmental sample
  misc_feature (1)..(221): Xaa is any amino acid
MVGGHKMGYIYIGAIGIILSYFFFGHDKARVLAQNCVGCEACSDICAGGIELPRLIREIRARLNDEKGAPKEAGLIASVMKNRTLFHTLLKFAKFAQRPLTGGTPFIRHLPQMFAGAHNFKALPALADRSFREKWGEIRHNVSEPRRRVALFAGCAQDFVYPEQLEAAVTLLAAHNVDVDFPLDQTCCGLPLETWVSARWRRMSPSRTPKPLTSRPPTMRS

SEQ ID NO: 74315 - DNA, 714 bp, Unknown
  Obtained from environmental sample
  misc_feature (1)..(714): n is a, c, g, or t
atggccgagcactggtcgcaaggtgtacggcaanaccccgttggcaacgaggcgtcggcagacaatcaaagcgtgacgtggcacgccgatggaagcgttgcgtctgttcccaatggtttggtgacagccttacaagccagcgccgatggcgacgatgtttccaacatcaccgccaaggcctacaacaacgtgtcgtccaacaccgtcaaggtgacggtcacggccggcgccatcctacccgacaaaatagagataagcggcaaccccagtaaagttgatttgggcaccgggatgttcagcagttccattgtgacggtgagggatgccagcaacaacgtgatgtctggctcgcctgtgaagtggagcattgctcctgcacaaaatggcataatggagatcacgggcgacggcagcgtcggctcctataatgcaaaaaccgtgggcaccgttacgataacggtcacgtccgccgtgttaatggcagacccaccctctgaatccttcgatgtggaagtcgtggccctgccgcacaccgtgacgcttgacgtagcctcgctgactctgagtccggctgagagcggaaccctgaccgtggcatcaatgacggacgcgaatggcaactccattgcttcaacatcgtcctactataaggtgaattgggaaatcactagcggcggcaatgccaccattagttccacgacgacactagtgtaa

SEQ ID NO: 74316 - protein, 237 aa, Unknown
  Obtained from environmental sample
  misc_feature (1)..(237): Xaa is any amino acid
MAEHWSQGVRQXPVGNEASADNQSVTWHADGSVASVPNGLVTALQASADGDDVSNITAKAYNNVSSNTVKVTVTAGAILPDKIEISGNPSKVDLGTGMFSSSIVTVRDASNNVMSGSPVKWSIAPAQNGIMEITGDGSVGSYNAKTVGTVTITVTSAVLMADPPSESFDVEVVALPHTVTLDVASLTLSPAESGTLTVASMTDANGNSIASTSSYYKVNWEITSGGNATISSTTTLV

SEQ ID NO: 74317 - DNA, 393 bp, Unknown
  Obtained from environmental sample
  misc_feature (1)..(393): n is a, c, g, or t
gtggccccgntccattgcaactggcgggggcaacccgaccgcgccggtgtcacggtgccggccgttatcaccgcgctgcctggcgaaacggcggtcactatcccgctgcccgaaacagtggccacgccggtgtcgctgcttgcccacctgacggcgcggaacgtggcgttttcaggcgccacggtggccacaagcgtttccgccgagcccatccctatcgtggtgctttccttgttgagcgccacgtccgtcacgttcacaatagggccccgtctccaccgtcacattgcaccagggcgagaagccgccctgcaccgccatggccgtgatcctcgcgctgcccaccgaaaccgctttgacgtggcaaacaggtcgtcgtcggcagtgggctga

SEQ ID NO: 74318 - protein, 130 aa, Unknown
  Obtained from environmental sample
  misc_feature (1)..(130): Xaa is any amino acid
MAPXHCNWRGQPDRAGVTVPAVITALPGETAVTIPLPETVATPVSLLAHLTARNVAFSGATVATSVSAEPIPIVVLSLLSATSVTFTIGPRLHRHIAPGREAALHRHGRDPRAAHRNRFDVANRSSSAVG

SEQ ID NO: 74319 - DNA, 879 bp, Unknown
  Obtained from environmental sample
  misc_feature (1)..(879): n is a, c, g, or t
atgaaaagagtatttttctnggcattatcttgttatactttgggattgaacgcccagaatgattcaatccgtcagcttgaactgtcggaaattgtagtgtcgtcaacacgcgccagctggcgaacgcctgtaaccttcacaaacctgaaagcggcggatgtaaaccgtgtaatggtattacccgaaataccgaatgctatcgggttaacgccgtcagtagtcatggcttcagagaatggagctgccataggcaaccagacctttcgcgtgcgcggaagcgacgcaacgcgaacaaatgtaactttcgacggagtaccgctcaacgatggcgaaagtcaggctgtattctgggctaacatgcccgatttattatcatcgctgcaaactatgcaaatacagcgcggcgtaggaacttcggctaacggagctgccgcattcggagccacgctgaacatgcaaacgctgcaacccacagacgaatcatacggacaaatcagcgcagcttatggctcgttcaatacttttaagctaaacgctgcaacaggaacgggacggttcaaaaacggactgtattcagacatgcgctattcaataggacaaaccgacggatatatcgaacatggcggctcaaatcagcaatcgctgttcgtaaccggaggatatgcaggaagccgcagaaatgtcaaaataaattttttcaacggcgaccagcatacagatatttcgtgggaaggcgcgccggaagacaaactgaccgaaaaccgccgctataatccgtcaggactgtataaggacgaaaacggaaacactgtgcgttactacaacgaaacagacaactacaaacaaacccacatacacctgcattacggagagcagtga

SEQ ID NO: 74320 - protein, 292 aa, Unknown
  Obtained from environmental sample
  SIGNAL (1)...(18)
  DOMAIN (38)...(149): TonB-dependent Receptor Plug Domain
  misc_feature (1)..(292): Xaa is any amino acid
MKRVFFXALSCYTLGLNAQNDSIRQLELSEIVVSSTRASWRTPVTFTNLKAADVNRVMVLPEIPNAIGLTPSVVMASENGAAIGNQTFRVRGSDATRTNVTFDGVPLNDGESQAVFWANMPDLLSSLQTMQIQRGVGTSANGAAAFGATLNMQTLQPTDESYGQISAAYGSFNTFKLNAATGTGRFKNGLYSDMRYSIGQTDGYIEHGGSNQQSLFVTGGYAGSRRNVKINFFNGDQHTDISWEGAPEDKLTENRRYNPSGLYKDENGNTVRYYNETDNYKQTHIHLHYGEQ

SEQ ID NO: 74321 - DNA, 495 bp, Unknown
  Obtained from environmental sample
  misc_feature (1)..(495): n is a, c, g, or t
ttggtgggttttttttcccgacccgggcccgggggcggggcccacccccgggggtttccggccttggggggaaaaagcgtcccccggttgggccgccgctgccgttacgatgaaaggcacgccgagaccgtgggcggacctggccctggccatttgngaggcctcgcccaaaacgctcccttggaaatttcgccccgggagagggaactcgtgcgcctgcccgccttaatgcacgacatcggccagttcctggcctaccagagccaccacgtccacagccattacctggtcaagaactccgatcttttgggttttgacgaggacgaggtggatttcatggcctatctggccttgagccaccgcaagcggaaaaagcgcgtctggccctataacctctatgaagaagccccccggccggatttcccgcgctggcggaagatgggcttcatcctgcgcctttcggaactcctggattcccggcggcaggacgtctga

SEQ ID NO: 74322 - protein, 164 aa, Unknown
  Obtained from environmental sample
  misc_feature (1)..(164): Xaa is any amino acid
MVGFFSRPGPGGGAHPRGFPALGGKSVPRLGRRCRYDERHAETVGGPGPGHLXGLAQNAPLEISPRERELVRLPALMHDIGQFLAYQSHHVHSHYLVKNSDLLGFDEDEVDFMAYLALSHRKRKKRVWPYNLYEEAPRPDFPRWRKMGFILRLSELLDSRRQDV

SEQ ID NO: 74323 - DNA, 708 bp, Unknown
  Obtained from environmental sample
  misc_feature (1)..(708): n is a, c, g, or t
gtggtggaactgaaagcccgtttcgacgaaatgcgcaacatcacctgggccgcggccctggaacaagccggcatcaacgtggtttatggcctggtgggcatgaagatccacgccaagctctgcctggtgatccgccaggaggacgagggcctcaagacctatgtgcatctgggcaccggcaattacaacccggccaccgcccaggtctataccgacctgggccttttgaccgccaacccggccctgggccgggacgtggtcaagctgttcaacgtcatgaccggcctttcccgttttgacgaatacgaacacctcctggtcagcccaagcgggctccggcggggcatgctccagcgcatcgaccgggagattgaggcccacgccgcccagggcggcggtatgatcgcctggaagctcaaccagttgtccgacccgganatcataaaaagactttaccgggcttccctggccggggtgaaagtgncgctccaggtccgcgggatctgctgcttgaagccccgcgtccacggcctctcccggcacataacggtcactcccctggtggggccgtttcctggacattccgggatctattactttcgggaacggcgccgggaaccaatcttcatcgggagcgcccaaattaatgccgcgaaccctggacaagcgcaaaaaacccctggccccggtcttggaccagggctttga

SEQ ID NO: 74324 - protein, 235 aa, Unknown
  Obtained from environmental sample
  DOMAIN (1)...(226): Polyphosphate kinase
  misc_feature (1)..(235): Xaa is any amino acid
MVELKARFDEMRNITWAAALEQAGINVVYGLVGMKIHAKLCLVIRQEDEGLKTYVHLGTGNYNPATAQVYTDLGLLTANPALGRDVVKLFNVMTGLSRFDEYEHLLVSPSGLRRGMLQRIDREIEAHAAQGGGMIAWKLNQLSDPXIIKRLYRASLAGVKVXLQVRGICCLKPRVHGLSRHITVTPLVGPFPGHSGIYYFRERRREPIFIGSAQINAANPGQAQKTPGPGLGPGL

SEQ ID NO: 74325 - DNA, 540 bp, Unknown
  Obtained from environmental sample
  misc_feature (1)..(540): n is a, c, g, or t
atggcagaccgcaccgctaccctgctgcagaaccctaaattgagaatgaacacagacctcgtagtggacggcaccggcgtaggagacgcagccgtggaattgatgaggaagcgcggactttacccgacaccgatcatattcagcggaggcgaaacgccgaaggaacactatgcggagtttggcagcgtatttaagggagaccaaggaaagattaacggcgcaaagatactggaatatatcagcgtacccaagaaggatttagtggacgcaggcaaggtgatgatccagcaaggaaggctgcgagtggcgccgggaagatggaatgaggattttaagacgcagctttccaagtttaaggggaaggtgaacgagaacaccaaatacaccaagtacgaagcggagaccgaaaaagaccacgacgacctcgtggtagtttatttaatgggagcatggtggattttcaacaggaaagaaaaaggaatcccggagcagaccgcagaccagaacgcaaccgtaggctgggatccagccgattattaa

SEQ ID NO: 74326 - protein, 179 aa, Unknown
  Obtained from environmental sample
  misc_feature (1)..(179): Xaa is any amino acid
MADRTATLLQNPKLRMNTDLVVDGTGVGDAAVELMRKRGLYPTPIIFSGGETPKEHYAEFGSVFKGDQGKINGAKILEYISVPKKDLVDAGKVMIQQGRLRVAPGRWNEDFKTQLSKFKGKVNENTKYTKYEAETEKDHDDLVVVYLMGAWWIFNRKEKGIPEQTADQNATVGWDPADY

SEQ ID NO: 74327 - DNA, 876 bp, Unknown
  Obtained from environmental sample
  misc_feature (1)..(876): n is a, c, g, or t
atgaagcggtggaagtttacacaggcgatagtccccgtggagcgatacgacctcgacatttcccgaccgcagggtaaagacttttactcggtatactgggcagacatagaacgagacacggcactaatggacggatattttcagctcaagccattcttctgctggcggtggagccggaacctcgacggaggagtgtggggaacaaacagccccggaacaatggagctggcagacataagacaggctaacagcgtaaggggagatttatcgagacttgagcagcagatgggaaggccgccaataaaagcaaccgaaggactgacaggaagaataaacctgaaacccaacggcgttacgagcattcgcgccggtgaagacttcgcatttattaacgcggtgggagaccccaaaggaatgatggacgacctcgcccggctgcagcaatcaattaacgaagcctattacacggatttttttcttatcctttcccaaaacatagagaggcaaaaaacagcaaccgaagtgtcgggaatacagggagagaaggccgcgctcatgagcgcattttacggacgcttaagcgccgagtttttagagccggtactggaagacctattcagtattgaattaatgagcggaagaataccgagaccgccagagagcctgtggcagagagaccggcaaatgcgtattgacatgatcagccccctcgcgcaaatgcagagacggtttttaatgctgggcagtaatcagcaggcgttagcggaaatcgcggcattggcacagctcaacccgcagacactggacaatataaactttgaccagctggcgcggaatatagcggaagcctacggaatggactcgtgccgattctga

SEQ ID NO: 74328 - protein, 291 aa, Unknown
  Obtained from environmental sample
  misc_feature (1)..(291): Xaa is any amino acid
MKRWKFTQAIVPVERYDLDISRPQGKDFYSVYWADIERDTALMDGYFQLKPFFCWRWSRNLDGGVWGTNSPGTMELADIRQANSVRGDLSRLEQQMGRPPIKATEGLTGRINLKPNGVTSIRAGEDFAFINAVGDPKGMMDDLARLQQSINEAYYTDFFLILSQNIERQKTATEVSGIQGEKAALMSAFYGRLSAEFLEPVLEDLFSIELMSGRIPRPPESLWQRDRQMRIDMISPLAQMQRRFLMLGSNQQALAEIAALAQLNPQTLDNINFDQLARNIAEAYGMDSCRF

SEQ ID NO: 74329 - DNA, 600 bp, Unknown
  Obtained from environmental sample
  misc_feature (1)..(600): n is a, c, g, or t
gtgccaggcgcagccgcgctactccccggtgcacggcgagaagctcggggccgtgaacgccgacggcactgtctacctgaccaagtccgaggcgctggcccagtgcgccgccgacatgatcggcctcgccggcgccgtctacggcatcgacctgaccgtgccccggccgatgtcggtgcgcgccctggccgaggtgttcgccgcgttccgctggggcgggctgctgaagaagaacggcgtctccgccatggagttcccctactccgtcgcggggctgaccgactaccacgcgaagatgcactggcccgccatcgccgaacgcgacgcgccggacaagccgggcgcgaagttcaagcagcccttcggcgcggtgcccgtcgtgctgagcctcaagtaccccgccaccgtgtaaggcttaaaacgccgaaaagagagcaggtatcccctcgtggacagcgacagcgtcagcccggggggacgaccccccggatccccccagggcgcgcccgatcgcaagcgatcatatcgggcgcgcgacagcgacaacctgacacttccgctcccagacccggacctggacgcgggggacggggacgataa

SEQ ID NO: 74330 - protein, 199 aa, Unknown
  Obtained from environmental sample
  misc_feature (1)..(199): Xaa is any amino acid
MPGAAALLPGARREARGRERRRHCLPDQVRGAGPVRRRHDRPRRRRLRHRPDRAPADVGARPGRGVRRVPLGRAAEEERRLRHGVPLLRRGADRLPREDALARHRRTRRAGQAGREVQAALRRGARRAEPQVPRHRVRLKTPKREQVSPRGQRQRQPGGTTPRIPPGRARSQAIISGARQRQPDTSAPRPGPGRGGRGR

SEQ ID NO: 74331 - DNA, 483 bp, Unknown
  Obtained from environmental sample
  misc_feature (1)..(483): n is a, c, g, or t
atggacttcgccgatgttgtggtaggagcggaagtaggcgtggatggtgatccactggcggccttcgtactcgctggtggggtagtcggtgccgccggcggggccggtgcccttgatgccgaagaggttgtggtccttcgtcgcgagctggctggtgccccagttcgattcctcgatggcctgggcgatggtgacggcggcggggacgccgtagcgctgctgggcggcgatggcgccggggatgaccgaggacaggaactgctgctgggcccgggtggtgggagcggtgccggaggcgggggtgtacttcgtgtactgccccgggtcaccgctggtggagtcgctgctcccggcactgttgctacccgaggcgctgccgcccgaggcactgtttcccgaggcactgtcgcccgagtcgctgctgcccgaggcgcccggcgtgctggtcaccatgccggggatgacggccgagccggcgggtga

SEQ ID NO: 74332 - protein, 160 aa, Unknown
  Obtained from environmental sample
  misc_feature (1)..(160): Xaa is any amino acid
MDFADVVVGAEVGVDGDPLAAFVLAGGVVGAAGGAGALDAEEVVVLRRELAGAPVRFLDGLGDGDGGGDAVALLGGDGAGDDRGQELLLGPGGGSGAGGGGVLRVLPRVTAGGVAAPGTVATRGAAARGTVSRGTVARVAAARGARRAGHHAGDDGRAGG

SEQ ID NO: 74333 - DNA, 744 bp, Unknown
  Obtained from environmental sample
  misc_feature (1)..(744): n is a, c, g, or t
atggacctcatttttcttcgcctggatgcggcggctgttctcaccgtcagcccggaggggcagcccgcgcgtttccagtacgcgcagcttctgccgcccaacccgcgggatgaaccctatcgggtctatcctcccgttccctgggacagggccaaagtggagttcgccgtggaagccgaagcgctggaagcggaactcgcccgcgccaggccggaaaacagggaactcgcgcacaacccgcgcgcgttgctggtgtccgtttccgctttgccgcgtctcatccaggagcggcacatggaggaactcaaagaacttgcccggacagccggcctgcacatcgtgggagagcttgtgcagcgcgttgccaagcccaaccctaaattcatcctcggcaagggcaagatggcggaactcgaagttctggccctgcgcggggatgcctccatgatccttttcgacggggaactgtcccccgcccaattgcataatcttgcggaactcacggaacgcaaggtgttggaccgcacccagcttattctggatattttcgcccagcacgccgtgagcggcgccggaaaactccaggtggaaatggcccagttgaaatacatccagccgcgcctggtcggaaaaaaccgggccatggatcgcctgatggggggcatcggcggcaggggaccgggggaaaccaagctggaaaccgaccgccgccgcattcgcgaacgcatagcccgtatcagataa

SEQ ID NO: 74334 - protein, 247 aa, Unknown
  Obtained from environmental sample
  misc_feature (1)..(247): Xaa is any amino acid
MDLIFLRLDAAAVLTVSPEGQPARFQYAQLLPPNPRDEPYRVYPPVPWDRAKVEFAVEAEALEAELARARPENRELAHNPRALLVSVSALPRLIQERHMEELKELARTAGLHIVGELVQRVAKPNPKFILGKGKMAELEVLALRGDASMILFDGELSPAQLHNLAELTERKVLDRTQLILDIFAQHAVSGAGKLQVEMAQLKYIQPRLVGKNRAMDRLMGGIGGRGPGETKLETDRRRIRERIARIR

SEQ ID NO: 74335 - DNA, 375 bp, Unknown
  Obtained from environmental sample
  misc_feature (1)..(375): n is a, c, g, or t
ttgcggacaagatctaaggtgagtatggaaaagctatcagttaggcaacaacaagtttatgactacattaagcagtatataaccgagaaaggattttccccttcgttagctgacattgcgcaagggttaaatctgcatgattcgactattgtggcttacgttgaagcattaaaaagaaaagggtatgtccaaagcgaataccgaacagcgaggagttttagaattattaatcctgagaaggttacgcaaaaacccgtgacggatcttcacatcgaaagcagggaaaatatacagcatggcgaagaaataatcccctctgctggcaccaaaggagttctgctgacacaaaagcgcagggctttaataaaaatgtga

SEQ ID NO: 74336 - protein, 124 aa, Unknown
  Obtained from environmental sample
  DOMAIN (9)...(72): LexA DNA binding domain
  misc_feature (1)..(124): Xaa is any amino acid
MRTRSKVSMEKLSVRQQQVYDYIKQYITEKGFSPSLADIAQGLNLHDSTIVAYVEALKRKGYVQSEYRTARSFRIINPEKVTQKPVTDLHIESRENIQHGEEIIPSAGTKGVLLTQKRRALIKM

SEQ ID NO: 74337 - DNA, 486 bp, Unknown
  Obtained from environmental sample
  misc_feature (1)..(486): n is a, c, g, or t
gtgcgcgccatcggtttcgccgacctggcaaactttactgaaacaatgnagcaaagcacccccggtgaactaacctcaattattcgccacttccggtccacgtgctgggacgccgtacacgaaaaccaagggcgaatcatcagctttgccggtgaccgagtgtttttcacggcggaaaacatcacgcaaggcgcccacatcgcgttagcattagccaaacccatgggcatttgcggcaccgcccgagtgggcctgagctgggaccgagtaatcagcactgaaggtgacatttttggccccggagtaaacttagcctcccgtctgtgtgcggccgctgcccccggaactgttttagtggacggcgaagcggctcggttgttggctcaaaattctgaattcgccatcgtgcccagtaatgggctagcggggcaccgaaccgaaaacgcagcccaactggcctaccagcccgctgcggcatcgtcgtaa

SEQ ID NO: 74338 - protein, 161 aa, Unknown
  Obtained from environmental sample
  DOMAIN (3)...(148): Adenylate and Guanylate cyclase catalytic domain
  misc_feature (1)..(161): Xaa is any amino acid
MRAIGFADLANFTETMXQSTPGELTSIIRHFRSTCWDAVHENQGRIISFAGDRVFFTAENITQGAHIALALAKPMGICGTARVGLSWDRVISTEGDIFGPGVNLASRLCAAAAPGTVLVDGEAARLLAQNSEFAIVPSNGLAGHRTENAAQLAYQPAAASS

SEQ ID NO: 74339 - DNA, 372 bp, Unknown
  Obtained from environmental sample
  misc_feature (1)..(372): n is a, c, g, or t
atgcatagcaattactacaattacgaatggacttgggctatcgaaaagatacagaaacaaatagggaataaaatacctgatattacttcgcacgacgtgattaattttgtggagatgtggcgtgatagcgttattgagttagacctcgcgctatacaatgacgctaaacatgagtttgcactcagttcaaaggttgggtttggcgtagatggcaatcaagacgaccgtaatcgcgattttgaacaagtgcgtggcgagtttgagaaaaattcgtttgtgcaggaagtattagaccatatcagacgtaaaactgaactgggaaacgaactaatcgcaagaatgaaatcaattacaaaaacgcatcanaagtaa

SEQ ID NO: 74340 - protein, 123 aa, Unknown
  Obtained from environmental sample
  misc_feature (1)..(123): Xaa is any amino acid
MHSNYYNYEWTWAIEKIQKQIGNKIPDITSHDVINFVEMWRDSVIELDLALYNDAKHEFALSSKVGFGVDGNQDDRNRDFEQVRGEFEKNSFVQEVLDHIRRKTELGNELIARMKSITKTHXK

SEQ ID NO: 74341 - DNA, 936 bp, Unknown
  Obtained from environmental sample
  misc_feature (1)..(936): n is a, c, g, or t
atgatcagatggcacgagactcaaggcgctacgcgtaacgtggatacactgacgcttaccgctactccaataccacgcacgcttcaattctcgcttatgggcgttcgcgaaatgtcaattatagcaaccccgccacccaaccgtcacccgatacagaccgaattgtgcgttttcgataaggatataatccgcgaagccattgaatacgaagtgtcgcgcggcggacaggtttttttcattcacaaccgcgtacagtcgcttcaagaaatggaactgttagtacgcaaaatatgtcccgaggtatcaactgttgctgcgcacggacaaatggatggcgagaaattggagaaaataatgctcgatttcatcaatggcgactataatgtacttatttcgacatcaatcatagaatcgggattggatataccaaacgcaaatacaataatcatcaacaacgcacagacgtttgggttgagcgatcttcatcagttgcgcggtcgcgttgggcgttccaacaaaaaggcgttctgttatctcatgactccgcccgttaccgacattacgcccgaagcaagacggcgattgcgcgcaatagaggaattttctgacctcggcagcggcttcaacatcgcaatgcaggacctggacatacgcggcgcaggaaacctgatgggcgccgaacaaagcggcttcatcaccgaaataggcttcgaaacatatcaccgcatactcaacgaagcaatgcttgaattgagagaggaatctgagttcaaagaaatctttcaacaagacgaatcgaaaatcgaaaatcaagaatcgaaaattgaaaccaagtgtatgtcgccgaatgtcagattgacaccgaactcgaactgctcttccctgaatcgtacatcgaaaacgtatccgaacgaatacgtctttacggcgctttag

SEQ ID NO: 74342 - protein, 311 aa, Unknown
  Obtained from environmental sample
  DOMAIN (95)...(172): Helicase conserved C-terminal domain
  misc_feature (1)..(311): Xaa is any amino acid
MIRWHETQGATRNVDTLTLTATPIPRTLQFSLMGVREMSIIATPPPNRHPIQTELCVFDKDIIREAIEYEVSRGGQVFFIHNRVQSLQEMELLVRKICPEVSTVAAHGQMDGEKLEKIMLDFINGDYNVLISTSIIESGLDIPNANTIIINNAQTFGLSDLHQLRGRVGRSNKKAFCYLMTPPVTDITPEARRRLRAIEEFSDLGSGFNIAMQDLDIRGAGNLMGAEQSGFITEIGFETYHRILNEAMLELREESEFKEIFQQDESKIENQESKIETKCMSPNVRLTPNSNCSSLNRTSKTYPNEYVFTAL

SEQ ID NO: 74343 - DNA, 318 bp, Unknown
  Obtained from environmental sample
  misc_feature (1)..(318): n is a, c, g, or t
gtgcaggtctcgccccagggcctggcgctggggatgcgcccagcctacgcacagcgctggcaggtccacgaaggcgtgatgcagccaggcgactggctggtcatgtacagcgacggcataacggaggcaatggacaacagcggggaactgttcggcactgaccgcctagctgggcagttgacgcgcttctggggaaccggctccccaagggccgcctgcgaggccatcttcggccaagtggcggccttcgagacccagaacagggacgacaggacacttttcattcttgcgaggtctagggatggacaacaacagtga

SEQ ID NO: 74344 - protein, 105 aa, Unknown
  Obtained from environmental sample
  misc_feature (1)..(105): Xaa is any amino acid
MQVSPQGLALGMRPAYAQRWQVHEGVMQPGDWLVMYSDGITEAMDNSGELFGTDRLAGQLTRFWGTGSPRAACEAIFGQVAAFETQNRDDRTLFILARSRDGQQQ

SEQ ID NO: 74345 - DNA, 768 bp, Unknown
  Obtained from environmental sample
  misc_feature (1)..(768): n is a, c, g, or t
gtggccatcgagagggcccgcatggccgaggagggccgccgcaacaagatacttgccaccgtgggcacggccgcttcgaccatcgccatggagttctgcggcgcgctggaggccatacacagccacatcgagtccctgtcactaatctgcatggacgacgtggcccagcttcacctagagcaaaccagggccacgctgcaaaggctgacttccatgagctcgaagctgcttatgtttgcggacatcgggccattggagaaaacactggttgacatgtcccgcttcctgcacagcaagattcacgactggagggacaaggtcgacggcagcggcgtggagatagtcgcattcggtcccgaatgcaccgcgcacatcgagttgcaaaacttctccgtgataatggacaacctgatcaccaattccatgacagcccttctgggcaaggggcctggcgccaaaatcgaagtatcgtgggaagttgtccagaactgcctccgcatcactgtgacggacaacggcaagggcatcccggctgatgtcatggaaaacatattcgagccccgcttccacctagacaggagcggcagcggcagttttggccttgcgtccgtcaaaatgcacatcgaagagcatggcggcacggtcggcatcaccagcgaagtggagcatggcaccaccgtgaccattaacctgccgctgccgccaacggacaccacagccaacacgttgtcctcgcagggctacgaggaagggatgggcggtgcatag

SEQ ID NO: 74346 - protein, 255 aa, Unknown
  Obtained from environmental sample
  DOMAIN (125)...(234): Histidine kinase-, DNA gyrase B-, and HSP90-like ATPase
  misc_feature (1)..(255): Xaa is any amino acid
MAIERARMAEEGRRNKILATVGTAASTIAMEFCGALEAIHSHIESLSLICMDDVAQLHLEQTRATLQRLTSMSSKLLMFADIGPLEKTLVDMSRFLHSKIHDWRDKVDGSGVEIVAFGPECTAHIELQNFSVIMDNLITNSMTALLGKGPGAKIEVSWEVVQNCLRITVTDNGKGIPADVMENIFEPRFHLDRSGSGSFGLASVKMHIEEHGGTVGITSEVEHGTTVTINLPLPPTDTTANTLSSQGYEEGMGGA

SEQ ID NO: 74347 - DNA, 528 bp, Unknown
  Obtained from environmental sample
  misc_feature (1)..(528): n is a, c, g, or t
gtgaataaattgtataacaagcagtatcgcatatctacaggtattggtaagagactaggaacattcatcacaggatatgcgcatcaatacattgcggaacataatatccctaatccggcaaagtacctctcaatgcgcccatttccttttcatctgcaattagataatgagaaaagaattaaatacaggactataatgcaacaagattgtagtgtagctatttttctttttggacaaagtaaggttagaacaaccgaagatcatttcgagcagacagggcattatagccggggcgtttatcaagaatttgaaattgccaataaacgcggcctatcagtaatacccataggatcaaccggatttgaggctgaaattatttggcatgaagttaaatcaaatatcaaccgttatttctatttatccaaaagaattgatgcattaagaagtgaaaaaaatcctaaaaaaatatcagaattagttatcgctattttagatgatatatccgaataccgccgcattaatcaataa

SEQ ID NO: 74348 - protein, 175 aa, Unknown
  Obtained from environmental sample
  misc_feature (1)..(175): Xaa is any amino acid
MNKLYNKQYRISTGIGKRLGTFITGYAHQYIAEHNIPNPAKYLSMRPFPFHLQLDNEKRIKYRTIMQQDCSVAIFLFGQSKVRTTEDHFEQTGHYSRGVYQEFEIANKRGLSVIPIGSTGFEAEIIWHEVKSNINRYFYLSKRIDALRSEKNPKKISELVIAILDDISEYRRINQ

SEQ ID NO: 74349 - DNA, 918 bp, Unknown
  Obtained from environmental sample
  misc_feature (1)..(918): n is a, c, g, or t
ttgacggacgttggcaaagtggcggcttatttatcgaatcatcacaaaataaagaacccgaatattttcccgatggccgcgggacccgctcttgatatgcggttgtaccaacgcggcggcgacgaatcgatagatgtggacgacgtggagtatttgataaggaagtttaacaaggagagaaaagaaggcgatgttgatttgcaattcgacaagtattcgtcgttgcctaaaagtataaagaaagacattcgcggcaaactcgaggaagcgatcaaccgcaacgacacaacggaacaagcgattattcataccggtattgtttctcttgaggccgcgatcaggcagtacgttcagaagtacgcgaagaccgcgaaaattaagaatttagtcgatacttttatgaagatgcttgaagaactagattgccttgagaacaccaaaaaagagcttgcgcaacatcaagaaaagggtaaagaaataagcgcgcagattgccgctattcaagaaaaaatagacagcggggaaaaggcgaaaaagttcgaggataatgtcgttgacgccatcggtaatgttaaggaagagtcggggaaaaaagtgagagaaattgttcaagaatttcagaaagagataagggttaatattgaaaataaactcgagaaaaagatttattcggctgatgttgacgccgcggttaagaagtttgaattggttgtaaaggagcttgagcctaagtttgaggtagctcttaacggtgttgtaaagaataatatggaagacacgggcaacaagttgcttgacgattataaaaacgaacttgcgtcgttgggcgaaggggtgaatctcccgggcaatattacaatcgatcctttaaaacttatgagcggaagcgtttccgtttcatacgaagggttgctttaa

SEQ ID NO: 74350 - protein, 305 aa, Unknown
  Obtained from environmental sample
  misc_feature (1)..(305): Xaa is any amino acid
MTDVGKVAAYLSNHHKIKNPNIFPMAAGPALDMRLYQRGGDESIDVDDVEYLIRKFNKERKEGDVDLQFDKYSSLPKSIKKDIRGKLEEAINRNDTTEQAIIHTGIVSLEAAIRQYVQKYAKTAKIKNLVDTFMKMLEELDCLENTKKELAQHQEKGKEISAQIAAIQEKIDSGEKAKKFEDNVVDAIGNVKEESGKKVREIVQEFQKEIRVNIENKLEKKIYSADVDAAVKKFELVVKELEPKFEVALNGVVKNNMEDTGNKLLDDYKNELASLGEGVNLPGNITIDPLKLMSGSVSVSYEGLL

SEQ ID NO: 74351 - DNA, 546 bp, Unknown
  Obtained from environmental sample
  misc_feature (1)..(546): n is a, c, g, or t
atgtccgtggccgaagtgcgcgcctacttgaaaaagtggggccgggacaaggatgtggtggaaatgccgcaatccacagccaccgtggccctggccgccgcggccctgggggtggaaccggcccgcatcgccaaaagcctgaccatcagccgcaagggcggccctggcctcttgttggtggcttccggcgacgcccggctggacaaccaaaaattccgcgaccgcttcggcgtgagccctaaaatgatgaccccggaccaggcccgggccttcaccggcttctccgtgggcggcatctgccccttcggcctgcccccggaagtggaagtctttctggacgaaagcctctcgcgcttcgagaccgtctttccggcctgcggctcggccaattccatgattgaactaagcctgcccgacctggcggaatacgcccgcagccaaggctgggtctccngtctgccgtctggggccgtangccccagaccccatanccngccagcgacgcggaagcgcccgtttagggggacgtggccggaacgtcattga

SEQ ID NO: 74352 - protein, 181 aa, Unknown
  Obtained from environmental sample
  DOMAIN (12)...(150): YbaK / prolyl-tRNA synthetases associated domain
  misc_feature (1)..(181): Xaa is any amino acid
MSVAEVRAYLKKWGRDKDVVEMPQSTATVALAAAALGVEPARIAKSLTISRKGGPGLLLVASGDARLDNQKFRDRFGVSPKMMTPDQARAFTGFSVGGICPFGLPPEVEVFLDESLSRFETVFPACGSANSMIELSLPDLAEYARSQGWVSXLPSGAVXPRPHXXPATRKRPFRGTWPERH

SEQ ID NO: 74353 - DNA, 447 bp, Unknown
  Obtained from environmental sample
  misc_feature (1)..(447): n is a, c, g, or t
atggccgaggacctgattccgccagaactgggatccngggccagggtttttgacagcctgaactttgatgaaatggaagataacgacccgcgggttgaccaggccttggaaaaattcaagaaattgtgggacgaggcccccgccaaccccgacttggagggccgggcggtcacaattcccggctttgtggcctcgctggacttcagcggccaggacgaactcaaggagtttttgctggtgccgtatttcggggcctgcatacacgttccgccgccgccggcgaaccagataatccatgtgaccgtggaagaaccgcggaaaggcatccggtccatggacatggtgacggtcagcggccgtctgacccttgaaaagacagaggccgatatgggcagttccggctacagcctgaaagccgagcgcatagagccctatgttttgaagtga

SEQ ID NO: 74354 - protein, 148 aa, Unknown
  Obtained from environmental sample
  misc_feature (1)..(148): Xaa is any amino acid
MAEDLIPPELGSXARVFDSLNFDEMEDNDPRVDQALEKFKKLWDEAPANPDLEGRAVTIPGFVASLDFSGQDELKEFLLVPYFGACIHVPPPPANQIIHVTVEEPRKGIRSMDMVTVSGRLTLEKTEADMGSSGYSLKAERIEPYVLK

SEQ ID NO: 74355 - DNA, 858 bp, Unknown
  Obtained from environmental sample
  misc_feature (1)..(858): n is a, c, g, or t
atgctcgtggtcgagctggcggctcataaccgcttggtccggggttcgagtccctgtggggccaccaagcaatgcttgatgtcgcaacagaaattttgcggagtttccatgaagattcttgtcgccctgaaacaggtgccggacacggagagcaaaatcaagatagccgaaactggctgcacgattgatgcaacggacatcaagtggatcaccagccctaacgacgaatacgcgctggaggaggccatccgcctgaaagaagcgaagggcgcagaagtcacggccgtttcgttgggcggcgaaaagaccaaggaagtgctgcggaacgcactggcactcggtgccgacggtgccgttctgctcaaggccgagccggctgatgaccctgctgtcattgcccgcgcagtcgccgactttgccaacggcaagggcttcgacctgcttttttttgggcacaagtgctatggaaacgacaacgggtgcgttggcccaatggtggcggagatactggctctgccgcaggcccacgccgtgaccaagctagaaatctccgagacgggctttcgcgccgagcgcgagggcgacgcgggggtagaggtcatcgaaggcagcctcccagccgtattgacggcccagcgcggcctgaatgagccgcgctatgcaaacctaaagggcataatggctgccaagaaaaaaccgattgatgaaattgattgtgccctgcccgacgcggccgtcaaaatatccgcccttctgctgcccccgccgcgcagcgaaggcaagcgtctggatggcgacccagccgcacaggcaaccgccctcgtgaccctgctccgcgacgaagccaaggtgatttga

SEQ ID NO: 74356 - protein, 285 aa, Unknown
  Obtained from environmental sample
  DOMAIN (59)...(246): Electron transfer flavoprotein domain
  misc_feature (1)..(285): Xaa is any amino acid
MLVVELAAHNRLVRGSSPCGATKQCLMSQQKFCGVSMKILVALKQVPDTESKIKIAETGCTIDATDIKWITSPNDEYALEEAIRLKEAKGAEVTAVSLGGEKTKEVLRNALALGADGAVLLKAEPADDPAVIARAVADFANGKGFDLLFFGHKCYGNDNGCVGPMVAEILALPQAHAVTKLEISETGFRAEREGDAGVEVIEGSLPAVLTAQRGLNEPRYANLKGIMAAKKKPIDEIDCALPDAAVKISALLLPPPRSEGKRLDGDPAAQATALVTLLRDEAKVI

SEQ ID NO: 74357 - DNA, 384 bp, Unknown
  Obtained from environmental sample
  misc_feature (1)..(384): n is a, c, g, or t
atgacgctactccgctggcttctagccccactcgcgcccctgtatggccttgctgtgcgcgccagaaacagggcgtttgaccaaaacccccgattgacagagcgcgttgccattcccgtcctttccgtcggcaacctcagcgttgggggcactggcaagacgccgcttacgctgcacttggcacaggcgctaagcacaatggggtattcaaacgtcatactgtccagaggctacggcggacgcagggacactgacccgatggacgttgacccaacatcgaacccgcgtgaagtcggcgacgagccggccatgatggctagaagtctaggaccaaacagggtgacagtcggccgtcgccgcatagccgccgctcggccaatctga

SEQ ID NO: 74358 - protein, 127 aa, Unknown
  Obtained from environmental sample
  SIGNAL (1)...(21)
  misc_feature (1)..(127): Xaa is any amino acid
MTLLRWLLAPLAPLYGLAVRARNRAFDQNPRLTERVAIPVLSVGNLSVGGTGKTPLTLHLAQALSTMGYSNVILSRGYGGRRDTDPMDVDPTSNPREVGDEPAMMARSLGPNRVTVGRRRIAAARPI

SEQ ID NO: 74359 - DNA, 987 bp, Unknown
  Obtained from environmental sample
  misc_feature (1)..(987): n is a, c, g, or t
gtgatgtacagattcggccgagtgtcggactggacgcttaaagggggcgaaatactggaaccagtatattgtgcggcgcatgaggaactggtaacgcgggatgtactgcactcagacgatacgagattgcaggtactgaaagaacccggacgctctgcggcaagccagtcttacatttggatgtatcgtacagcggcaagagatggacctccgatagtgctatatgaatatcaggaaacgcggtcaggaaaacatccggtggagtttttacgcggattcaacggttatctgcacgcggacgggtatgcggggtataacgggctttgtgaaacgactgaacccggcaaaccgcctatggtgaaactttgcggatgttgggcgcatttccggcggaagtttgacgaagcgctcaaagcacaacctcccggcaaacgtcatgctggcagggcaaaagaagcaatagatagtatcaataaattatttttaatagagcgcggaataagcaagtgtacgcttgaacaaagattgatagtacgtaatgaaaaaagccgtcctgttgttgacggaatacttaattggctgcagcggctcaagggagaaatcttgcctaaaagcctcctcggtacggctgttacatacgggttgaatcaatgggaaaaactaacgcgcttccttcaagacggacggattgagataagcaacaacctcgcagaacgaagcattaaaccttttgttatcggacgaaaaaacttcctcttctgcaatacaccacaaggcgctaaggccagcgccgtaatatacagcattattgaaaccgcanaggaaaacaacattaatccttattcatacctcacttacctctttgagcgcttgcctaatatggatacctctgancaggaggcaattaaaacactcctcgccctatacttaaacggntcgcaaagccgtggatatctccgaactngtgatantatgagacttaantga

SEQ ID NO: 74360 - protein, 328 aa, Unknown
  Obtained from environmental sample
  DOMAIN (4)...(115): Transposase IS66 family
  misc_feature (1)..(328): Xaa is any amino acid
MMYRFGRVSDWTLKGGEILEPVYCAAHEELVTRDVLHSDDTRLQVLKEPGRSAASQSYIWMYRTAARDGPPIVLYEYQETRSGKHPVEFLRGFNGYLHADGYAGYNGLCETTEPGKPPMVKLCGCWAHFRRKFDEALKAQPPGKRHAGRAKEAIDSINKLFLIERGISKCTLEQRLIVRNEKSRPVVDGILNWLQRLKGEILPKSLLGTAVTYGLNQWEKLTRFLQDGRIEISNNLAERSIKPFVIGRKNFLFCNTPQGAKASAVIYSIIETAXENNINPYSYLTYLFERLPNMDTSXQEAIKTLLALYLNGSQSRGYLRTXDXMRLX

SEQ ID NO: 74361 - DNA, 801 bp, Unknown
  Obtained from environmental sample
  misc_feature (1)..(801): n is a, c, g, or t
atgaacgccggcgcgggcatagacgactactacctgatgaaccagctgttgcgcgtgataaaggagccgccgatctccccgctcactctggaaaaggccgcggagacgctcctcggcggctttcggaccgcggagagcgcctacaagcgcggcgaactcttctgccgcgccgccgcggagatcatcggcaggatgaaggcggcgggagtagagaaccgcgggcaattggacgcggcgctccgggagggggccgaattcgacttcgccggcaaggagatcaccgcgaagatgatagcggaactgccgctcagggccggggtctacggcttcaccgacaagagcggcgcgtacatctatataggaaaggccgtgaacctccgcaggcgcgtggagaactacttccgcttcaacagcgagtccccggaaaaactcggcaaactgcgggcggcggcgcacgggctcacgattcatgtttgcggctcggagctggaggcgcttatctacgaacaccgcctgataaaaaaacataaaccgcccctcaacagccagatccgcgtctccgagcggaaaggcagttacaagccgctgccggacagcgtgatactgctgccgcacgcccaggatgggttttgcgtgtcggtgtgggtaaggaaagaccagaagataaaactgcgctctttcgagacggattttcgcgaggaagaggcgctgaggagagagctgcatgagtatttctattccggaacgctgcccgccgcgccggatgattttccggagctggagatagttacgcgctggtaa

SEQ ID NO: 74362 - protein, 266 aa, Unknown
  Obtained from environmental sample
  DOMAIN (104)...(187): GIY-YIG catalytic domain
  misc_feature (1)..(266): Xaa is any amino acid
MNAGAGIDDYYLMNQLLRVIKEPPISPLTLEKAAETLLGGFRTAESAYKRGELFCRAAAEIIGRMKAAGVENRGQLDAALREGAEFDFAGKEITAKMIAELPLRAGVYGFTDKSGAYIYIGKAVNLRRRVENYFRFNSESPEKLGKLRAAAHGLTIHVCGSELEALIYEHRLIKKHKPPLNSQIRVSERKGSYKPLPDSVILLPHAQDGFCVSVWVRKDQKIKLRSFETDFREEEALRRELHEYFYSGTLPAAPDDFPELEIVTRW

SEQ ID NO: 74363 - DNA, 456 bp, Unknown
  Obtained from environmental sample
  misc_feature (1)..(456): n is a, c, g, or t
gtgtttttggcgatgaacctggaagaaactatcaaggtctataaagattttttaaaatcaaagggtttattatacacacagccgcgtgaactcattttaaaagaggcaatttccgccgttgggcatttctctgcggacgagctaacctcgcagatgcacaaaaacggcataaacataagccgtgccactatttatagaacgcttgcttccatgagagaggcggggattttaaattccgttgatttggggcatgggcatacacactacgaagccaaaaaaacaaaaaaataccatgagcatataacctgcaaaaaatgcggcgcgatttgcgagatacaaattgaaaatttggcaaaagtcataaacgctgccgccgcaaaagccaaattcaagcacatagaatatgccataagggtttccggtgtgtgcaaaaactgtctcggccgccggcgataa

SEQ ID NO: 74364 - protein, 151 aa, Unknown
  Obtained from environmental sample
  DOMAIN (20)...(140): Ferric uptake regulator family
  misc_feature (1)..(151): Xaa is any amino acid
MFLAMNLEETIKVYKDFLKSKGLLYTQPRELILKEAISAVGHFSADELTSQMHKNGINISRATIYRTLASMREAGILNSVDLGHGHTHYEAKKTKKYHEHITCKKCGAICEIQIENLAKVINAAAAKAKFKHIEYAIRVSGVCKNCLGRRR

SEQ ID NO: 74365 - DNA, 822 bp, Unknown
  Obtained from environmental sample
  misc_feature (1)..(822): n is a, c, g, or t
atgaaaaaagttctttctggttttgcttttttttcgctgtttgctttattaatgctttcctgcgccggtgggccgaaatccggctatcccccgtcagtttcattgcgcataacggacacggatcaggagcagtttcccggagaggaccagaggccaccggacactacggcaaccacgcagccttccgggactgcacagggatcgccgtatacaccgggaccgcctgacaccacgcggccttccgaagctgcacagggaccgccggatacacaggttatcgggcagcttccgcaagaagcgttaaatatcgaagttcttgatgagcctgaaattgagtttgctcaagtcaacgacattgcggccgcccctcccgaagaaacgccggtaattggcgagcttcccgagccgggcctgccggttttccccacggttcccgaacccaccccgccggctgttgcccagtctgcgcagccgcccgccgtggcttcagagccgaggcaaacacagccaactccggcgccaactccaactcccgcgcccgctccgtctccaaccccggcgcccgccgcgtccgggcaaacggaatccccgcccgaggcatcttccggcaatgaggaacagccccccgtgatagccagggtgcctccgtcccgccccgtaccctcatctccggcccctgtccttccggtgccgcagaatgaggaaattgtgttttcccggatagtccgggccacggcgggacagcttgtggaaattccgtttaacggaaccggctggatatatctgggtgaaattgtcctccccgcgcggcattgcctataa

SEQ ID NO: 74366 - protein, 273 aa, Unknown
  Obtained from environmental sample
  SIGNAL (1)...(23)
  misc_feature (1)..(273): Xaa is any amino acid
MKKVLSGFAFFSLFALLMLSCAGGPKSGYPPSVSLRITDTDQEQFPGEDQRPPDTTATTQPSGTAQGSPYTPGPPDTTRPSEAAQGPPDTQVIGQLPQEALNIEVLDEPEIEFAQVNDIAAAPPEETPVIGELPEPGLPVFPTVPEPTPPAVAQSAQPPAVASEPRQTQPTPAPTPTPAPAPSPTPAPAASGQTESPPEASSGNEEQPPVIARVPPSRPVPSSPAPVLPVPQNEEIVFSRIVRATAGQLVEIPFNGTGWIYLGEIVLPARHCL

SEQ ID NO: 74367 - DNA, 393 bp, Unknown
  Obtained from environmental sample
  misc_feature (1)..(393): n is a, c, g, or t
gtggcccggactatccgggaaaacacaatttcctcattctgcggcaccggaaggacaggggccggagatgagggtacggggcgggacggaggcaccctggctatcacggggggctgttcctcattgccggaagatgcctcgggcggggattccgtttgcccggacgcggcgggcgccggggttggagacggagcgggcgcgggagttggagttggcgccggagttggctgtgtttgcctcggctctgaagccacggcgggcggctgcgcagactgggcaacagccggcggggtgggttcgggaaccgtggggaaaaccggcaggcccggctcgggaagctcgccaattaccggcgtttcttcgggaggggcggccgcaatgtcgttgacttga

SEQ ID NO: 74368 - protein, 130 aa, Unknown
  Obtained from environmental sample
  misc_feature (1)..(130): Xaa is any amino acid
MARTIRENTISSFCGTGRTGAGDEGTGRDGGTLAITGGCSSLPEDASGGDSVCPDAAGAGVGDGAGAGVGVGAGVGCVCLGSEATAGGCADWATAGGVGSGTVGKTGRPGSGSSPITGVSSGGAAAMSLT

SEQ ID NO: 74369 - DNA, 813 bp, Unknown
  Obtained from environmental sample
  misc_feature (1)..(813): n is a, c, g, or t
atgctgtggatgctgcttgtttgggaagactgccacatacacgccacatcggcaacctatgaccagctgaaaggcattttgtggaaccagttcaaacaggtggtgttttgctctgcggttagcgagtgggttgaaatagacgaatccaaggcggtgaacaaggttttccccaaccattgggcaaagccgcaggcgtggagcaaggacaagccgcaggcgtgggcaggtgagcattgcaagcacccaatcggcgtgtttgacgaatgctcggatattgacgattccatatatgaggcttggtctgggagtgcctatcacgagggcagcagaacaatactgctgggacagcctaggttcaaatacggcatgttgttcaaggcttccaataacccgaaaaacaatgtggagcacataagcaccgaggatattccggggcaggaggattttgtcgcagaagcccttgaaggctacggcgaggatagcgactactaccgcatccgcgttttgggattgttcccgcgttccgacaactcctgcatgttcccaaatgccagcttgaaaaagattgaggactgcgaggttaagggagtgccagtcgccgggcttgatttggcagggagcggtggcgacaataccattttggtaatccgcagagacaacacggtcatcggagtgcatcggtttgattttgacgaagatgtgctgcttacaaagacacgcgatgttatacttgacacgctcaaacggtatggctgcaaagcccttgcgatggacaccaacgggctggcgatgggctgggctcgtccgatctga

SEQ ID NO: 74370 - protein, 270 aa, Unknown
  Obtained from environmental sample
  misc_feature (1)..(270): Xaa is any amino acid
MLWMLLVWEDCHIHATSATYDQLKGILWNQFKQVVFCSAVSEWVEIDESKAVNKVFPNHWAKPQAWSKDKPQAWAGEHCKHPIGVFDECSDIDDSIYEAWSGSAYHEGSRTILLGQPRFKYGMLFKASNNPKNNVEHISTEDIPGQEDFVAEALEGYGEDSDYYRIRVLGLFPRSDNSCMFPNASLKKIEDCEVKGVPVAGLDLAGSGGDNTILVIRRDNTVIGVHRFDFDEDVLLTKTRDVILDTLKRYGCKALAMDTNGLAMGWARPI

SEQ ID NO: 74371 - DNA, 717 bp, Unknown
  Obtained from environmental sample
  misc_feature (1)..(717): n is a, c, g, or t
ttgaaaagcgttgtattccccaaagtaacaagtattccaaacgatgccttcaatggttgtaccgcattggaaaccgcacaattcgccttagtggccagtatcggcaataacgccttcaaagattgtgctaaattgaaaacaattgctttcccggaagcgaccagtattggcacaaatgctttcgcaaattgtgcagctttgatcactgttactttccccaaagtaacttcactgggaggaaacgctttcttaaattgcgctaatcttgatcaggcaagtttcccgttagcaaccacagttggcagtagcgcttttgaagattgtgcaaaattggcccgtgttgacatcccgtccgtaacctctataggtggaagtgctttcgatggcgccggtaggcaattctatacacaaccgatttcatatttgggtttcgagatacatttggggaaacaaccgcctaatttaggaacttatctgtttggaaataccagttccttaggcgccagatatattaatgtgtatgttccagacgatgctgatttttctgtatatcttcccggtgacttatatgatgatggcggttattttacaggcaccgattcgagtaatatttggcttaatggttttaggggagcaggctggaatggttcaagcgtaataacagccggtttcaggaacagtaatgttactatcaaagggttttatatggatgattaa

SEQ ID NO: 74372 - protein, 238 aa, Unknown
  Obtained from environmental sample
  misc_feature (1)..(238): Xaa is any amino acid
MKSVVFPKVTSIPNDAFNGCTALETAQFALVASIGNNAFKDCAKLKTIAFPEATSIGTNAFANCAALITVTFPKVTSLGGNAFLNCANLDQASFPLATTVGSSAFEDCAKLARVDIPSVTSIGGSAFDGAGRQFYTQPISYLGFEIHLGKQPPNLGTYLFGNTSSLGARYINVYVPDDADFSVYLPGDLYDDGGYFTGTDSSNIWLNGFRGAGWNGSSVITAGFRNSNVTIKGFYMDD

SEQ ID NO: 74373 - DNA, 549 bp, Unknown
  Obtained from environmental sample
  misc_feature (1)..(549): n is a, c, g, or t
atggtttacgatgcacgcacggtggcgaaccacatgctggagatcgccagacttcaggacaagacgctgacgcacacgaagctacagaagttgctctacttcgcgcatggctggcacttggctttctacgatgagccgctgatgggggacggctttcaggcgtggcagtatggcccggtctcatacaccctctaccacgccgcgaggcaatacaacgaccagccaatagactcccaaattgtgcgcattatctgtaagcccaacgaaaagggcagggacgagttctggtgcgtgtcgcccccgatgatccctgacagcgacactaggacactggatcacctccaggcgatattcaacagctacgggaaacaccaccagaagcaactgtgcgcggccgcccgcgctgatggcacaccgtgggcactgacgaaggcgaagtggccctgcgatgactggatacatcttcaaatcggcaacgacgtgatccgcgactactttaaggcgcgcgcggggaacgcgaatgcggcggtcgcccaaacaaacgtgtaa

SEQ ID NO: 74374 - protein, 182 aa, Unknown
  Obtained from environmental sample
  misc_feature (1)..(182): Xaa is any amino acid
MVYDARTVANHMLEIARLQDKTLTHTKLQKLLYFAHGWHLAFYDEPLMGDGFQAWQYGPVSYTLYHAARQYNDQPIDSQIVRIICKPNEKGRDEFWCVSPPMIPDSDTRTLDHLQAIFNSYGKHHQKQLCAAARADGTPWALTKAKWPCDDWIHLQIGNDVIRDYFKARAGNANAAVAQTNV

SEQ ID NO: 74375 - DNA, 315 bp, Unknown
  Obtained from environmental sample
  misc_feature (1)..(315): n is a, c, g, or t
atgaactaccagaaaaagggcctgaagcggctgctgaacgccatactggaaggaagcgtcggtcggctcgtcatcgcgcacaaagaccgcctcntgcggttcggcgcggagctggtgttcgcaatctgcgaggcgaagcaggtggagatagtgatactgaaccagggcgaggacacgacgttcgaggaggaccttgcgaaagacgtgctggagataatcgccgtgttctccgccaggctgtacggctcccgctcgcgcaagagcaaaaagctgctcgactccgtcaaggccgccgtggagtccgcgtcatgctag

SEQ ID NO: 74376 - protein, 104 aa, Unknown
  Obtained from environmental sample
  DOMAIN (1)...(98): Resolvase, N terminal domain
  misc_feature (1)..(104): Xaa is any amino acid
MNYQKKGLKRLLNAILEGSVGRLVIAHKDRLXRFGAELVFAICEAKQVEIVILNQGEDTTFEEDLAKDVLEIIAVFSARLYGSRSRKSKKLLDSVKAAVESASC

SEQ ID NO: 74377 - DNA, 393 bp, Unknown
  Obtained from environmental sample
  misc_feature (1)..(393): n is a, c, g, or t
atggatttgttagtagataccaatatacttttagcggttgttctcaatgagcctgagaaaagcaggattattgagctaacaaagggggcaaggcttgtagcgccagaggtaatactctacgaggcaggaaacgccctatcggcaatgatgaagcgcaatcgcctcacgcaagagcaagtccaaaaaagctttagcatacttgaggttattccgcttacgttggagcaggtgaacattgcgcaagcactgagcctgtcgtatcggttcaatatttatgcgtacgatgcctactacttagaggtagcccaacggttacgcatacctttgctaacgttagaccagcaaatgaaaagcatanggcttagcttaaacttaaaactattggagggttag

SEQ ID NO: 74378 - protein, 130 aa, Unknown
  Obtained from environmental sample
  DOMAIN (3)...(121): PIN domain
  misc_feature (1)..(130): Xaa is any amino acid
MDLLVDTNILLAVVLNEPEKSRIIELTKGARLVAPEVILYEAGNALSAMMKRNRLTQEQVQKSFSILEVIPLTLEQVNIAQALSLSYRFNIYAYDAYYLEVAQRLRIPLLTLDQQMKSIXLSLNLKLLEG

SEQ ID NO: 74379 - DNA, 522 bp, Unknown
  Obtained from environmental sample
  misc_feature (1)..(522): n is a, c, g, or t
atgaactctaacaacatcggtatttttgattcgggggtaggaggcttatcggtactcaaagaggtggctgcgctgctaccgcgtgagcgcgtgtgctacgttgccgatacggcgcactgtccctacggctcacgctcggtgcaggaggtgctggaactgtcgttgcgcatggtaaactttttgctgcacgaaaaggcttgcaaaatagtggtggtagcgtgtaacacagccactaccgccgccattgacgagttgcgccgaatgtttccgcaagtgccgtttgtgggcatggagcctgccgtaaaacctgcggcggagcaaagcagaacgcgcagcattggaatacttgctacggcgggaacattgcagggtcgcctatttaaccaaaccagagcacgttacgccaccaatgtagatgtgcatgtggctgtaggcgatggcttggtagagctggtggagcagggtagggaagattcacctgaagcgttggagctgcttanaagtacattcaaccatgcttga

SEQ ID NO: 74380 - protein, 173 aa, Unknown
  Obtained from environmental sample
  DOMAIN (5)...(173): Asp/Glu/Hydantoin racemase
  misc_feature (1)..(173): Xaa is any amino acid
MNSNNIGIFDSGVGGLSVLKEVAALLPRERVCYVADTAHCPYGSRSVQEVLELSLRMVNFLLHEKACKIVVVACNTATTAAIDELRRMFPQVPFVGMEPAVKPAAEQSRTRSIGILATAGTLQGRLFNQTRARYATNVDVHVAVGDGLVELVEQGREDSPEALELLXSTFNHA

SEQ ID NO: 74381 - DNA, 849 bp, Unknown
  Obtained from environmental sample
  misc_feature (1)..(849): n is a, c, g, or t
gtgaatgctgaccgtgtcggcagtctgagcctcattatccggctcgactgtttccgtcagcctggtaacactgccggcctgggcggactaaacctggtggccgttgactatccggtttatctcttcaccaggaaccttttggccaacgtgcaggacagccgggtcagcctgctctcggccgccccgggctgtcctcatgaccaggttctcaccccggcggccctggagaccatttcccgggcctcggtcctggtcagcggcgggcttgatctggattccttcctggaacgggctctgagcgtggccaagccgggcttgaaggtcatcgacgccagcggcggcgggtccgcggcccgccccgaggagaatcacgccctggtgctggacttggccgcggcccggaactggtatcgcgccccggggcaggaacagcccgatccccacctcttcgcctccctctccggggccgcgaccatgacctccaacctggccgagggcctgggccgcctggacccagacggagcccagttatatcgttccaacgccaatgaaatccacgccaagtataagaagctcctgtatgacatacaggccgtggccgccctctggtctcccaagccccgggtcattctcagtcacggatccctgcgctacctggcttcagacctgggcctggacgtggccgatgtcattgaaggttccgtggaacagcgggtttcggccgtccgcctggcggaactggtgaacctggcccgggactgcacagccgtgctggccgaccccgactgccaattgaatctggcccggatagtgggcgcggtaactccgccagcccgtggccttcattga

SEQ ID NO: 74382 - protein, 282 aa, Unknown
  Obtained from environmental sample
  DOMAIN (5)...(275): Periplasmic solute binding protein family
  misc_feature (1)..(282): Xaa is any amino acid
MNADRVGSLSLIIRLDCFRQPGNTAGLGGLNLVAVDYPVYLFTRNLLANVQDSRVSLLSAAPGCPHDQVLTPAALETISRASVLVSGGLDLDSFLERALSVAKPGLKVIDASGGGSAARPEENHALVLDLAAARNWYRAPGQEQPDPHLFASLSGAATMTSNLAEGLGRLDPDGAQLYRSNANEIHAKYKKLLYDIQAVAALWSPKPRVILSHGSLRYLASDLGLDVADVIEGSVEQRVSAVRLAELVNLARDCTAVLADPDCQLNLARIVGAVTPPARGLH

SEQ ID NO: 74383 - DNA, 456 bp, Unknown
  Obtained from environmental sample
  misc_feature (1)..(456): n is a, c, g, or t
atggggagaaaatatattatgtgtgaacaaatggattatataaatactacaactgttcctagattaataaatgtaataaatggagaaaatagaggcgtttctgatacagcaaattggaaaggcggtggctctttcgtgtattgcgaacttgcaaaatttaaccagaatttagttgataaagtaaatatagcaaaaaatgacaatgaagtcataactttacttaatcaagtacttgaaaccggctttataagccacaaagtctttatatcagatatttccgaagccgccgatgaattcgccgatttaccctttgaggataaaaaacgttttatattagaattactggataagaatatgttgtatgtgaacctttgtgatattgacgataaaaattatgccataagtaaaacggataaaacatttacaaaaagtttttataaaatagaggataaataa

SEQ ID NO: 74384 - protein, 151 aa, Unknown
  Obtained from environmental sample
  misc_feature (1)..(151): Xaa is any amino acid
MGRKYIMCEQMDYINTTTVPRLINVINGENRGVSDTANWKGGGSFVYCELAKFNQNLVDKVNIAKNDNEVITLLNQVLETGFISHKVFISDISEAADEFADLPFEDKKRFILELLDKNMLYVNLCDIDDKNYAISKTDKTFTKSFYKIEDK

SEQ ID NO: 74385 - DNA, 588 bp, Unknown
  Obtained from environmental sample
  misc_feature (1)..(588): n is a, c, g, or t
gtgatagtgtttttgcagggtatcatcaccggggttatggcagcggtgttcttcgcggcagggactgtggcgtgcctcagtgccgggatgaaggcaaaaacgtttataaaactgctgggcaggggcgcgctcggcatattgcctggcgtggggattattcttatggcaagttccgtaaaatacacactcacggaatccaggacgctggatacggtgctgaatttcgccgcagatctgacaaggggattatcgccgtatgcggttgtgctggtcatatacgcgttgattttgttcatgaacttctttatcgcatctgcctcggcaaaggcgttcctgctcattcccctgatagtgccgctggctcaacttaatggcgttaccagccagttatctatactcgcgttcatttatggcgacggcttcagcaacctcttctacccgacaaatcccgttttgcttatatgcctcagcctggttggcgtcaactacacaacgtgggcaaagtggagcgcaaaattccagctgggggcgcttgccatcaccattgcgctgctaatggccgcgaaggccgttggttacggagagtga

SEQ ID NO: 74386 - protein, 195 aa, Unknown
  Obtained from environmental sample
  SIGNAL (1)...(24)
  misc_feature (1)..(195): Xaa is any amino acid
MIVFLQGIITGVMAAVFFAAGTVACLSAGMKAKTFIKLLGRGALGILPGVGIILMASSVKYTLTESRTLDTVLNFAADLTRGLSPYAVVLVIYALILFMNFFIASASAKAFLLIPLIVPLAQLNGVTSQLSILAFIYGDGFSNLFYPTNPVLLICLSLVGVNYTTWAKWSAKFQLGALAITIALLMAAKAVGYGE

SEQ ID NO: 74387 - DNA, 522 bp, Unknown
  Obtained from environmental sample
  misc_feature (1)..(522): n is a, c, g, or t
gtggggatcatctttgtctggatttttgcactgaaattgcgcatactgccttccggcggatggccggtggagggatggaaaaatatcggcgccgttattcgcgctctggtactgccggcctcgaccatcgtattcatgatgagctttacactgtcgaggtatattagggcaagcgtacttaatgtgctggactcaggctatatacgcacgtcccgatcacttggtttttcccaggtttcatcttttatactccacggtatcaaaaacgcgtatgttcctgtaattgccatcctggggatagaactttcctcaaccttactcggagccgtagtggtggaaaatattttctccctccccggactcggttcaatgctgaccaaagcaatcgcccagcatgactatccgtctattcagggagtattacttactactacttttctggttcttgtaatcggatttatcgccgatgtaattcaacggctcatcgatccccggctaagaagacataagggcggacagtaa

SEQ ID NO: 74388 - protein, 173 aa, Unknown
  Obtained from environmental sample
  DOMAIN (1)...(168): Binding-protein-dependent transport system inner membrane component
  misc_feature (1)..(173): Xaa is any amino acid
MGIIFVWIFALKLRILPSGGWPVEGWKNIGAVIRALVLPASTIVFMMSFTLSRYIRASVLNVLDSGYIRTSRSLGFSQVSSFILHGIKNAYVPVIAILGIELSSTLLGAVVVENIFSLPGLGSMLTKAIAQHDYPSIQGVLLTTTFLVLVIGFIADVIQRLIDPRLRRHKGGQ

SEQ ID NO: 74389 - DNA, 336 bp, Unknown
  Obtained from environmental sample
  misc_feature (1)..(336): n is a, c, g, or t
atggcgcgaaaaaaaacaccggttcggttatacgttgccgttgtacttctattaataactcttaccgtcgcgtttgtttcttttttctggactccgtaccgccttgacgatacttcggggggacgtcttgaagcccctggtgccgctcacatcttcggtactgacagactcggcagggatctggcgagttatgttatggtcggtaccaggatcgcctattcaatagggttaagtgcaactatgatagccgtggtttttggcattaccattggcgttctcgcggcatggctcccccagtgggccgataatgccgcttcttctttctcgacgtggtga

SEQ ID NO: 74390 - protein, 111 aa, Unknown
  Obtained from environmental sample
  SIGNAL (1)...(26)
  misc_feature (1)..(111): Xaa is any amino acid
MARKKTPVRLYVAVVLLLITLTVAFVSFFWTPYRLDDTSGGRLEAPGAAHIFGTDRLGRDLASYVMVGTRIAYSIGLSATMIAVVFGITIGVLAAWLPQWADNAASSFSTW

SEQ ID NO: 74391 - DNA, 1014 bp, Unknown
  Obtained from environmental sample
  misc_feature (1)..(1014): n is a, c, g, or t
gtgggcaattttcctggccaaagcggctgcccgaaagcaggtggggtgtttatccagagcgaggacgagatcagcgcctgctgcgcggctatcggcgcgtcctgggcggggcggcgggccatgaccgtcacagcggggccaggcatcagcctgatgcaggagagcatcggctttgccgtagctacggaaacacccttggtcattgtggatgtgcagcgttttggcccttccaccggcgtgccttcggtgggcttggcggcggacatggtacaggtggcgcacggctcccacggcgattaccaaatcatcgcgctggccccggatacgccgcaatccatgttttccatcatgatccgcgcttttgatctggccgagcgctttcgcgtgcccgtattcgtcatgacggacggctttgcggggcatatgcgcgaacgcatcagcattccggatgcctcgtccgtggcggtgcgcagccgcaagatcgcaaagcccgccggttccgtgcttgagcgcaaagattttctggatgaggacgtggcgcccatgccggtgtttgggcgcggccttgcggcgcatgtgaccagttcctgccacgatgcgcacggcatgcgcaatctgagcgatccggaaaccatgcacacctatgtggtggcgcctgtgaacaaaatactcaagcaccgccacgagatcgtacgcgtggaggaaacgcgggtggaggatgcggatctgatcatcatcagctacggcacggtgtcccgttgcggggccgccgcgcttgccgcggcaaggaaggaagggtttgccgtcggccagttgcgcctggaaacctgctggcccctgcctgatgtggagatacgtcgcgtggcgcaaaaggcaaaacatctgctggtgctggaaaacaacatgggccagatgctgccttatatccaggccgctacagggaatccggcaaggtgcatttcatgggccccaagctcctgggcaattcagaacccgggccattactcgcgataa

SEQ ID NO: 74392 - protein, 337 aa, Unknown
  Obtained from environmental sample
  DOMAIN (1)...(218): Pyruvate flavodoxin/ferredoxin oxidoreductase, thiamine diP-binding domain
  misc_feature (1)..(337): Xaa is any amino acid
MGNFPGQSGCPKAGGVFIQSEDEISACCAAIGASWAGRRAMTVTAGPGISLMQESIGFAVATETPLVIVDVQRFGPSTGVPSVGLAADMVQVAHGSHGDYQIIALAPDTPQSMFSIMIRAFDLAERFRVPVFVMTDGFAGHMRERISIPDASSVAVRSRKIAKPAGSVLERKDFLDEDVAPMPVFGRGLAAHVTSSCHDAHGMRNLSDPETMHTYVVAPVNKILKHRHEIVRVEETRVEDADLIIISYGTVSRCGAAALAAARKEGFAVGQLRLETCWPLPDVEIRRVAQKAKHLLVLENNMGQMLPYIQAATGNPARCISWAPSSWAIQNPGHYSR

SEQ ID NO: 74393 - DNA, 804 bp, Unknown
  Obtained from environmental sample
  misc_feature (1)..(804): n is a, c, g, or t
atgaagttgttcgacgggtttctgccggaaatcgaaaagatttcgatctatgaattacttgccgaaaacggcctgggcgccgatgattgcgaactctcatttgccgtattcgatccctgtgcggcgagagatttcccggaaatgaaaaaagcggtaagagaactcgccgttgatggagacattatcctcacggaattgccggacgaaaaccgctgctgcgggttcggcggacatattcgcgccgcaaatcagcaactttttgatacgatcgcggaacacaggatttcggcggatgaaacgccgtatctggtctattgcgcgaactgcgcggagacttttgctctcgagggcaaggcgcacgcccatatcctcgatcttgtgttcgagaccgacgatgtggttgaacctgaaagtttgcagcagcggcgcgataacgcggtcagtgcgaaggcagctttgaccgaattatatgaagacgtatcttttgaaccagctgcgcgcccctgggacgctctgcgtgtaaatatcccggcttcgcttgccgccaacatgaacctgcggctgatccttgcggacgatgtaaaagaagcgatttatgaagccgcgcgcactggcggggtatttgtactgccgggcgccgcttcagacggcggcgatttgcgtcaatgctgccttatcagagatgtcgtaacaatctgggtgcagtatgtaaagcgcggtgaaggcgaaacagcggaggattacgattacacggtcgcagacgtctggaatcaccgtatgcgtttttcagatacggcggactaa

SEQ ID NO: 74394 - protein, 267 aa, Unknown
  Obtained from environmental sample
  misc_feature (1)..(267): Xaa is any amino acid
MKLFDGFLPEIEKISIYELLAENGLGADDCELSFAVFDPCAARDFPEMKKAVRELAVDGDIILTELPDENRCCGFGGHIRAANQQLFDTIAEHRISADETPYLVYCANCAETFALEGKAHAHILDLVFETDDVVEPESLQQRRDNAVSAKAALTELYEDVSFEPAARPWDALRVNIPASLAANMNLRLILADDVKEAIYEAARTGGVFVLPGAASDGGDLRQCCLIRDVVTIWVQYVKRGEGETAEDYDYTVADVWNHRMRFSDTAD

SEQ ID NO: 74395 - DNA, 933 bp, Unknown
  Obtained from environmental sample
  misc_feature (1)..(933): n is a, c, g, or t
ttgtctgtgtttttatcctgttcagccggtggcgatggagaggatggtggctccagcagtggtggcggcggtggtactagcaacggcggcggcggcactagcagtggcggtggtggcaacggtagcagtagcagcggtggtggcggcaccagcagtggcggaggtggtttaaatgggtggccatttgactcctctggcgaaactttatcgccaagccctgacctagaggctctacgccttgacaaccgtattgatattgtatataaaaatggaagcgaccctgtgataaccaacgattacaacgaagttcaaataagcaatcctctaaatagcgaagacgtagttgttaatgttcccaatacgtcaacaacgaaatacaactttgtaataagcggaattgccaggaacggttcccttaaattttatggagacggaagcgaaaaagggctttacttaaacggcgttgatatcacgaacaataggggacccgctataaacattcaaaggagcaaaaagataactgttcatttgattaacgggacaaaaaactatttgacagatggttcaaattatagatgttccaatattccaaaaaacgaagaacaggcaaaaggagccttctttagcgaaggcaagctggagtttgagggtagcggctctttggaggttaagggaaaatgcaaccacgcgatagcggttgacaatgattttgagatacaaaacgggacaataatcgtcagcgagtccgttaacgatggcattcatgcaaacgataaaattaaagttcacggcggagttttgaaaatcacaagcagaggcgatgctattcaaaacgagagcgaaaccgattctataaaaattactggcggaaaaattgcagctacaaccacagactcaaaatcgcacgggatagcgagcctcggccgaatctga

SEQ ID NO: 74396 - protein, 310 aa, Unknown
  Obtained from environmental sample
  misc_feature (1)..(310): Xaa is any amino acid
MSVFLSCSAGGDGEDGGSSSGGGGGTSNGGGGTSSGGGGNGSSSSGGGGTSSGGGGLNGWPFDSSGETLSPSPDLEALRLDNRIDIVYKNGSDPVITNDYNEVQISNPLNSEDVVVNVPNTSTTKYNFVISGIARNGSLKFYGDGSEKGLYLNGVDITNNRGPAINIQRSKKITVHLINGTKNYLTDGSNYRCSNIPKNEEQAKGAFFSEGKLEFEGSGSLEVKGKCNHAIAVDNDFEIQNGTIIVSESVNDGIHANDKIKVHGGVLKITSRGDAIQNESETDSIKITGGKIAATTTDSKSHGIASLGRI

SEQ ID NO: 74397 - DNA, 453 bp, Unknown
  Obtained from environmental sample
  misc_feature (1)..(453): n is a, c, g, or t
gtggttctgtatgnntttgggcagcgtcccgatgcatatcanggggttttcaccgacacgagtgaatggacgtgntcacaaaaggtttccccgcntgatntggatcatacgggccactacctatgcacggtggcagcgcagggacaccctcgattagtacgtccgacacggtatggccagcggcacggcaagagaatagttgtcaaccgccagctatgcgtggcgagcgcttttgagcaggcaatagccgacaaactcccgcatttgcacaaaaaagcacgatatttgtatgacacatacggatatccgctgtcacggtatataacaactaaataccgagccgattttgtatacctgcttatgaagcctatcgagtacacctttgttctttttttatactcaattgatgccaagcctgaaaatagaattgccgcccaatatttagatgaatga

SEQ ID NO: 74398 - protein, 150 aa, Unknown
  Obtained from environmental sample
  misc_feature (1)..(150): Xaa is any amino acid
MVLYXFGQRPDAYXGVFTDTSEWTXSQKVSPXDXDHTGHYLCTVAAQGHPRLVRPTRYGQRHGKRIVVNRQLCVASAFEQAIADKLPHLHKKARYLYDTYGYPLSRYITTKYRADFVYLLMKPIEYTFVLFLYSIDAKPENRIAAQYLDE

SEQ ID NO: 74399 - DNA, 507 bp, Unknown
  Obtained from environmental sample
  misc_feature (1)..(507): n is a, c, g, or t
atgatggcgagccttagggaggttcttgagcgcgcggctacccaaaacgcaatcccgataataaattataacgacgcggtaagcgaaaccgagagcagaaagctggaaattcaatccttaaaagacagcgggaaagaaacagtcgagtgcgtcgataatgacgaaaccgccagccaaatcgcctgcattttaaaatgcaggcggcttttgattttaaccagcgttgacgggatttattatgacccggatgactctaacagcctgattcataaaatcacgggcgaaacgattgaagaacttttgcaaaatgttgacgcatactgttccagatgcaaaggttcatcaagaaaaggcgcgaagggcatgtccgcaaaaatgtcatacataaaagaacctctgaaaaacggcacgatggtgataatagcttcctcgcgttattcgatcgacgatatattaagaggtttaacaccgcaaacgcggattggtttaaaatcggaggtaggttaa

SEQ ID NO: 74400 - protein, 168 aa, Unknown
  Obtained from environmental sample
  misc_feature (1)..(168): Xaa is any amino acid
MMASLREVLERAATQNAIPIINYNDAVSETESRKLEIQSLKDSGKETVECVDNDETASQIACILKCRRLLILTSVDGIYYDPDDSNSLIHKITGETIEELLQNVDAYCSRCKGSSRKGAKGMSAKMSYIKEPLKNGTMVIIASSRYSIDDILRGLTPQTRIGLKSEVG

SEQ ID NO: 74401 - DNA, 603 bp, Unknown
  Obtained from environmental sample
  misc_feature (1)..(603): n is a, c, g, or t
atgcaaaggttcatcaagaaaaggcgcgaagggcatgtccgcaaaaatgtcatacataaaagaacctctgaaaaacggcacgatggtgataatagcttcctcgcgttattcgatcgacgatatattaagaggtttaacaccgcaaacgcggattggtttaaaatcggaggtaggttaatgccgcgttgtgataaaaaaacgataacttttttacttactacgcgctgcaatttaaattgcacttactgttacggcaacagaaaaacggattataaaactcttgattttgggtttgccaggcatttgttatgtgattatgccgagatggaagagttaaacagcatacgtttttccgcggacggcgagcctacaacggaaatggaattacttaaaaagatttataatgaggcaaagcggcttaacccgggagtcttgacagatattattactaacggaacatttaatgaggacacagccaaatggcttgccgaanatttggattttatttatatttccgctgaccttttgccggagagccacaataaatgccgtttaacaataaccggtacccccgtcctcgccccctattctnaagaaccttga

SEQ ID NO: 74402 - protein, 200 aa, Unknown
  Obtained from environmental sample
  misc_feature (1)..(200): Xaa is any amino acid
MQRFIKKRREGHVRKNVIHKRTSEKRHDGDNSFLALFDRRYIKRFNTANADWFKIGGRLMPRCDKKTITFLLTTRCNLNCTYCYGNRKTDYKTLDFGFARHLLCDYAEMEELNSIRFSADGEPTTEMELLKKIYNEAKRLNPGVLTDIITNGTFNEDTAKWLAEXLDFIYISADLLPESHNKCRLTITGTPVLAPYSXEP

SEQ ID NO: 74403 - DNA, 765 bp, Unknown
  Obtained from environmental sample
  misc_feature (1)..(765): n is a, c, g, or t
atggcgagatggaaatccccatcttccggcggcagcaagggctttgcgtacctgctgtgggacgcggagcctctggaagaacctgacggcgggaaactgcgcctgaccctgaccagccccgacggcgacatggggtatccgggtacgcttaaaacggaagtaatctatacccttagcaaagacaacggcgtttccctgaaatactcggcaaagacggacgcggacacggtgattaacctgaccaaccatgtgtacttcaacctgaaaggccatgacaagggcgatgtcctgagccaccgcatccgcattgactcggccgcgtatctgccgacaaatcccaccggcattcctattggcggcccggccaatgtcgagggcactccgtttgacctccgcgccatgactgaaatcaacagccggtacaagtccgatcatgtacagatggcccagaaatcgggttttgacattcactattttttggacaataaaaaggaactcagaaaggtctgcgaggttgaggagccggaacagggcaggcgcatggaagtgtggacaaccaatccgggcattcagttttacattgcaaccaatattagggatactcccgtgtttatcggcaagggcgggtatgcttacaaacagtactgcggcttttgcctggaaacccaattcccgcccgacggccccaacggcccggatcgtcaggccgtgatcctccgccccggcgaggagtattgccaccagacagtgtatgcgtttggttga

SEQ ID NO: 74404 - protein, 254 aa, Unknown
  Obtained from environmental sample
  DOMAIN (2)...(252): Aldose 1-epimerase
  misc_feature (1)..(254): Xaa is any amino acid
MARWKSPSSGGSKGFAYLLWDAEPLEEPDGGKLRLTLTSPDGDMGYPGTLKTEVIYTLSKDNGVSLKYSAKTDADTVINLTNHVYFNLKGHDKGDVLSHRIRIDSAAYLPTNPTGIPIGGPANVEGTPFDLRAMTEINSRYKSDHVQMAQKSGFDIHYFLDNKKELRKVCEVEEPEQGRRMEVWTTNPGIQFYIATNIRDTPVFIGKGGYAYKQYCGFCLETQFPPDGPNGPDRQAVILRPGEEYCHQTVYAFG

SEQ ID NO: 74405 - DNA, 714 bp, Unknown
  Obtained from environmental sample
  misc_feature (1)..(714): n is a, c, g, or t
ttgctcaacgccatgatggaacggggggaactgcacctgtctcccggttcntgcatcgaatacgcccgcaggccggagcgttacntgctcgtcccggacatggccataggctcgaacggcccggtgatgagcgtgttgctgctttcgcgcgttcctcttgaggcgcttgacggacaaagcatctgcatcagcggggagagccatacctcggttgccctgctcaggctgttgctggcgcggcagaaagtgaacgcccgtttcgaaaacggcctggtcagcgcgagaatacgcgatcctgagcccccggcggcctttttggctatcggcgacgaggcgttgcgcctgcgcgatcatccggactatccgcaccgtctggatttgggcgaagcctggcgcgcctggaccggcctgccctttgtgttcgggttgtggtttgtgagccgcaaggcggtggagcaaaaggtgttcacctcggatccggcggccctgcttcaggcggggcgcgactggggcctggccaacatggacgcgattctggacttgaccggacacggttgtcccctgtcgcgcgaggaactgatccgctactatgcggggctggtctatcatatgcgcgaacaagagcttgagggtctcaagctcttttacgtccggctgcatgaggcgggactgctggacgccgtgcccgccttgacatttttcggccagcgataa

SEQ ID NO: 74406 - protein, 237 aa, Unknown
  Obtained from environmental sample
  DOMAIN (1)...(226): Uncharacterized ACR, COG1427
  misc_feature (1)..(237): Xaa is any amino acid
MLNAMMERGELHLSPGSCIEYARRPERYXLVPDMAIGSNGPVMSVLLLSRVPLEALDGQSICISGESHTSVALLRLLLARQKVNARFENGLVSARIRDPEPPAAFLAIGDEALRLRDHPDYPHRLDLGEAWRAWTGLPFVFGLWFVSRKAVEQKVFTSDPAALLQAGRDWGLANMDAILDLTGHGCPLSREELIRYYAGLVYHMREQELEGLKLFYVRLHEAGLLDAVPALTFFGQR

SEQ ID NO: 74407 - DNA, 990 bp, Unknown
  Obtained from environmental sample
  misc_feature (1)..(990): n is a, c, g, or t
atggcgagtaagagctccgcctcattctcctccgtcaagacgacatcaggagtatcaacgcttgaatttacctggattgtaaacgccaatgtggacgaaactcagcttgcatgggcaaacccgtggttaagtgataccgataatattaccgatatggcggggaacccgattgatctgatcaacttgccgcaaggcggtgaccttaacgggaatagcgccggtgaacgcgcctttattgataccatagctcctccggctccggcttttaccattcacactaccgccggtacgggtgcaaacccgatcccggatccggttcttgccaatgtgtcccggtatattaatgtaacagcagggacaggagtcaataataccacgctctatttttccgttaccggcggaagcaatcccataaactttacgagcggggatcgaacgcttgccgactctgatatagctaacaaagacaaggatacatacaaaccgtcggaatacgcggtaacggcatggcaaacagaccgcgccggaaaccgttcgcctaacgcggcggtacgcaacgttacaatcaattcacgcgctcccgagttggaaggcataagctgcacccagcctgacggttcgtatgcggcaggttccagcatggaattcaagttgaatttttcacgcaaggtgtggacgacgcagaatgacaatggaacaaggcttatcaggcttacccttaagggaacagagtcgggctttagcgatgaaacgacgattaccatgcgagccggagataaccagacggccagtcccatattcacctttaactggaccgttccggcggggctgaggatgagaaaaatccaggcgataacgattcggcttgacaacgtgcaggacgagtacggcaatacatttcacagcaacaaaagttttaccagcaccgtctctgaagaaaccgcgactcaacgacccataccggtaaaacttttgaccgggacggcatag

SEQ ID NO: 74408 - protein, 329 aa, Unknown
  Obtained from environmental sample
  misc_feature (1)..(329): Xaa is any amino acid
MASKSSASFSSVKTTSGVSTLEFTWIVNANVDETQLAWANPWLSDTDNITDMAGNPIDLINLPQGGDLNGNSAGERAFIDTIAPPAPAFTIHTTAGTGANPIPDPVLANVSRYINVTAGTGVNNTTLYFSVTGGSNPINFTSGDRTLADSDIANKDKDTYKPSEYAVTAWQTDRAGNRSPNAAVRNVTINSRAPELEGISCTQPDGSYAAGSSMEFKLNFSRKVWTTQNDNGTRLIRLTLKGTESGFSDETTITMRAGDNQTASPIFTFNWTVPAGLRMRKIQAITIRLDNVQDEYGNTFHSNKSFTSTVSEETATQRPIPVKLLTGTA

SEQ ID NO: 74409 - DNA, 768 bp, Unknown
  Obtained from environmental sample
  misc_feature (1)..(768): n is a, c, g, or t
atgcacgccagtatcgcaaaatctatcggcactggggattttgactatgactacgttggcttaaaccatttgagctgggttacgtccattaggtccggtggtaaagaactgctgaccgaccttgtgaatgtaaccggcgcggaaatgaagaacatacccggcgttgcttacgataaagaactgattgcggcaatacctgccctggcttcatcgtatttaagttatttctatttacgggaggaacagctccaaaaatgccttaaagcggaaaaaacccggggcgaaatttgcgttgacttggaacaatcacttttggaacagtataaagaccctaaccttaaagaaaagccaaaagaactcgcccaacggggcggcgcgctctactcgaccgccgcggtttctgtggtagacgccattgaaaatgacaagaacgaatatcatgtggtaaatgtgaaaaactccggagccctttcatttttggatgatgacgatgttgtcgaggtcaagtgcctggtaaaccggaaaggcgcggcgccggtacctgtcgctcaattcgacagcccttatattaaagccatgatccaggctgtaaaggtgtatgaaaaacttacagtcagggcagcccttaacggaagccgggcagacgcgctggcagcgctgatgattcatcccttaatcggagactacaaaaaggccaaggctgtcctggatgaaatgctcgaagctaacgcggattttgtatccgatacactgcggaggtcggtatga

SEQ ID NO: 74410 - protein, 255 aa, Unknown
  Obtained from environmental sample
  DOMAIN (4)...(226): Family 4 glycosyl hydrolase
  misc_feature (1)..(255): Xaa is any amino acid
MHASIAKSIGTGDFDYDYVGLNHLSWVTSIRSGGKELLTDLVNVTGAEMKNIPGVAYDKELIAAIPALASSYLSYFYLREEQLQKCLKAEKTRGEICVDLEQSLLEQYKDPNLKEKPKELAQRGGALYSTAAVSVVDAIENDKNEYHVVNVKNSGALSFLDDDDVVEVKCLVNRKGAAPVPVAQFDSPYIKAMIQAVKVYEKLTVRAALNGSRADALAALMIHPLIGDYKKAKAVLDEMLEANADFVSDTLRRSV

SEQ ID NO: 74411 - DNA, 630 bp, Unknown
  Obtained from environmental sample
  misc_feature (1)..(630): n is a, c, g, or t
ttgtcggcggaaaaattatgtttgaaagggacgattttaatgcctgaaaacgaaaacgttttagtgtcggtggttatggcgtttcataacggcgacaacatcgaagtcgcaaaaacggctatagacagcgttttgtcgcagacgcataaaaatctggaacttatcgtatccgtcggaggagatataagcgcggataaaagcgcaatgcttgaccgatacagacaagaagacgcgcgagttaaaatttttcagagtaagataaataccggaccgtcgttttcaagaaacaggggaatagaaatcgcgtcgggacggtacgtttcgattatcgacagcgacgatatattttttgaggacaaaatagaaaagcagttggagcgcattattgaaagaaacctggattttttgggctgcggatattttgaatttcgcaacaatcataaatctgagaaaaccgcgcaaagaattttgccggcaacgcaccaaagcataaagagagcgctgccttttgcaaaccccgtggctaattcggctttgtttattaaagccgacgtaataaaagaatttttatacgacgagaagtttagaccgggcgacggcgaggattacgatttggctattcgtctttga

SEQ ID NO: 74412 - protein, 209 aa, Unknown
  Obtained from environmental sample
  DOMAIN (23)...(189): Glycosyl transferase family 2
  misc_feature (1)..(209): Xaa is any amino acid
MSAEKLCLKGTILMPENENVLVSVVMAFHNGDNIEVAKTAIDSVLSQTHKNLELIVSVGGDISADKSAMLDRYRQEDARVKIFQSKINTGPSFSRNRGIEIASGRYVSIIDSDDIFFEDKIEKQLERIIERNLDFLGCGYFEFRNNHKSEKTAQRILPATHQSIKRALPFANPVANSALFIKADVIKEFLYDEKFRPGDGEDYDLAIRL

SEQ ID NO: 74413 - DNA, 441 bp, Unknown
  Obtained from environmental sample
  misc_feature (1)..(441): n is a, c, g, or t
gtgcctgaatcgtttttgcccgacgaggccgccacagaggcgttgggcgcggcactcgccgcaagaacgcccttgggagggacttggctgctgaagggcgaactgggggccggcaagaccacgtttgcaaggggcttcgtttcgggcctgggcggcaaccatgaacaggtgacctcgcccacctatgccgtccttcaccgctatgagacgccgaagggcggggtattccacttagacctctaccgccttggtcccgatggtgcgtggggtcttggcctagaggacagcatggcgccaacggacaggctcgtcgtcgagtgggccgaactcaaagatggtcaaggcccctggcccagcgaatgggtctctttcttggagctaagacacaccccctatggtaggatcgctgtctggcgcgggtctgtggagagcgttgaatag

SEQ ID NO: 74414 - protein, 146 aa, Unknown
  Obtained from environmental sample
  DOMAIN (12)...(137): Uncharacterised P-loop hydrolase UPF0079
  misc_feature (1)..(146): Xaa is any amino acid
MPESFLPDEAATEALGAALAARTPLGGTWLLKGELGAGKTTFARGFVSGLGGNHEQVTSPTYAVLHRYETPKGGVFHLDLYRLGPDGAWGLGLEDSMAPTDRLVVEWAELKDGQGPWPSEWVSFLELRHTPYGRIAVWRGSVESVE

SEQ ID NO: 74415 - DNA, 756 bp, Unknown
  Obtained from environmental sample
  misc_feature (1)..(756): n is a, c, g, or t
atggaaatggaggaactgccgttttccgtcaagccagaaaagaaagtcagcatagagaccgtattcgcctacttccgccaaacctacgagggcacagagtacgaccgcttcaagaacctgctggtccccaagaccaggcggcgcgacgagccgcccctgccagagggtcaggagccagaaataatccgcagccccgcggtaaacccttggatgaacgccgacctgatagcactggtaaacgccgtcaagcctggcacaatccagaaccagcgcacaatagccgtgccccagtgcgcctacagccacgtaacgcaactgcgcgactggctgccagacgaggtgggcggcgtggcatggttcagcttcgacaacccaggacaaagcccaagaataccgctcttcgcaggggcgctgggcgtgcccaagcccttcgagatagacccccagaaaaagttccgcatggacagcgcggcctgggcgttccgccgcgcaaacaggctggcccaagtaagatggggccaaacgaaggacatcctgaacgccgcgataatggagtacgagaccaagggcctgcttgaactgcctacggtggagcagcgtgcgaaagacatgctgaaacaggacggctccccggatggtcgcgccaaggtcagggagtacctgaccgcctactccggtgatttctccagatccgccatgcagaggtggattgagcttggcgacaccttttgggccatgttcgccaggggattctga

SEQ ID NO: 74416 - protein, 251 aa, Unknown
  Obtained from environmental sample
  misc_feature (1)..(251): Xaa is any amino acid
MEMEELPFSVKPEKKVSIETVFAYFRQTYEGTEYDRFKNLLVPKTRRRDEPPLPEGQEPEIIRSPAVNPWMNADLIALVNAVKPGTIQNQRTIAVPQCAYSHVTQLRDWLPDEVGGVAWFSFDNPGQSPRIPLFAGALGVPKPFEIDPQKKFRMDSAAWAFRRANRLAQVRWGQTKDILNAAIMEYETKGLLELPTVEQRAKDMLKQDGSPDGRAKVREYLTAYSGDFSRSAMQRWIELGDTFWAMFARGF

SEQ ID NO: 74417 - DNA, 570 bp, Unknown
  Obtained from environmental sample
  misc_feature (1)..(570): n is a, c, g, or t
ttgacgaaattctccaagaagaagctcttcatttattcgaatttgtttgcggtgccgcccagcctgctcgcttttttgctctataaaatcagcccgatgaacctgacgcatcccgtcaacatcgggctgcttgcggtgtgcttcacctttgtgggcatcggcatcggcatccccgtggtcctcatgtccatcatgattgccgactgcgtggactaccaggagtacatgacgggcgagcggccggacggcgtgttcttcgccggccagtccttcgtggccaagctgcaagccgcggtcgcgtcgttcatatcgagcgcgggctacgcggcggtcgggttcacggacgccgccgcggaaaaggtgaacgaatacatcgcggccggcggcgtggcgcgcaccaaccccgcattccagccgtatatgatgattatgttcttcctgattacgatacccgccgcggcggggtatctcctgacagtcgtccccatgtggaaatatgaattggacacggacgagcacagccggatcatcgcggcgctgaacgagagaaggcatggggaaggggcgtga

SEQ ID NO: 74418 - protein, 189 aa, Unknown
  Obtained from environmental sample
  SIGNAL (1)...(24)
  misc_feature (1)..(189): Xaa is any amino acid
MTKFSKKKLFIYSNLFAVPPSLLAFLLYKISPMNLTHPVNIGLLAVCFTFVGIGIGIPVVLMSIMIADCVDYQEYMTGERPDGVFFAGQSFVAKLQAAVASFISSAGYAAVGFTDAAAEKVNEYIAAGGVARTNPAFQPYMMIMFFLITIPAAAGYLLTVVPMWKYELDTDEHSRIIAALNERRHGEGA

SEQ ID NO: 74419 - DNA, 309 bp, Unknown
  Obtained from environmental sample
  misc_feature (1)..(309): n is a, c, g, or t
atgtacagtacgggacttgcttacctcctctggctgataagcggctgcggcgctttgggatttcatcgtttttatcttggaaaaattcctacagggatactttggatgtttaccggcggacttggtatggtcggttctatttatgatttctttacattacccggtcaggtaagggaagctaatatccgtcaggctattctggataatagtgataagtttgacagttacggcaggttgaaacggcttaacgttaatgacggcgaagtcaaaatcgttcatgaaaaagaccggttgagcgcgttattttaa

SEQ ID NO: 74420 - protein, 102 aa, Unknown
  Obtained from environmental sample
  DOMAIN (1)...(51): TM2 domain
  misc_feature (1)..(102): Xaa is any amino acid
MYSTGLAYLLWLISGCGALGFHRFYLGKIPTGILWMFTGGLGMVGSIYDFFTLPGQVREANIRQAILDNSDKFDSYGRLKRLNVNDGEVKIVHEKDRLSALF

SEQ ID NO: 74421 - DNA, 732 bp, Unknown
  Obtained from environmental sample
  misc_feature (1)..(732): n is a, c, g, or t
atgatagtattgcttgcagattcagataaaaaatttgtgaatgaaattttggaaacatggtccataacagaggtttccgtgaccgctgtgaccaataccgcagatatgatttccgttgccgcaaacggcgatgtttccgttgcttttatcagtgcagatttcttgtgggttgcagaactagatgcagtttcctatttgaaagaccataaccttgacattgaaatttttgttttgtgcgagccaaaaaaactgcctgctgcagaatcttccatttcgcggggagcaagcaaatatttgctcaagccagtgtctgtgttcactcttgaaaacacggttagaaaagccctgcaaaaacacagcaacaaaaaaagctaccagcttatggagagccaggttttggaagaactttttggcagcactcccgaaatgcgaaagattttaaaaaccatttacaaaatagcccccaccgcaagcaccattttaataacaggagaatccggcacgggcaaggaatttgctgccaatataatacaccgcctcagcaaaagagccgatgagccttttttggctgtgaattgcggagccattcccgaaaacattgtggaaagcgaactctttggcagccgcagaggcgctttcaccggagctgtggataaaaaagggtttgttgagagcagacggaggtactctttttttagacgaagtgcagagctttcgcaagcggntcagtaa

SEQ ID NO: 74422 - protein, 243 aa, Unknown
  Obtained from environmental sample
  DOMAIN (136)...(239): Sigma-54 interaction domain
  misc_feature (1)..(243): Xaa is any amino acid
MIVLLADSDKKFVNEILETWSITEVSVTAVTNTADMISVAANGDVSVAFISADFLWVAELDAVSYLKDHNLDIEIFVLCEPKKLPAAESSISRGASKYLLKPVSVFTLENTVRKALQKHSNKKSYQLMESQVLEELFGSTPEMRKILKTIYKIAPTASTILITGESGTGKEFAANIIHRLSKRADEPFLAVNCGAIPENIVESELFGSRRGAFTGAVDKKGFVESRRRYSFFRRSAELSQAXQ

SEQ ID NO: 74423 - DNA, 888 bp, Unknown
  Obtained from environmental sample
  misc_feature (1)..(888): n is a, c, g, or t
atgcttccgatgttccttccgcttgtcgcgttcatgggaacgcttttgacattctataagctgcttatctcgtccgaattggtgataatccagtcgtccggcctctcggcgtacgagataatgcgccccatgcttttgatttcggcggctttcggggcgcttacggcgacggcgataaaccccctggccacgcggtacaaccggatggagctgcgaaattcaagaatcgaaagaatcgacggcgcggtgtggcttcgcgaaaaggtgaaaaacgggtcggtaatcatccgcgcgacgggcatggagaattcggaaaacggcgggctttcgcttatcaacgcgacccttttgaaacaggatgaaaagtttcggattactgaaagggcgaacgcggacaaaatgattctggaaaacggaaatttaagcgcgaaaaacgccctgatactcaactccaaaggggcgggaacgcgccgcgatttcagggcgaaaacgtcccttaaccgcgaaaacataattaagcaatatcttaaaccgaaccaagtgtcgttctgggaccttccggaattcatacggacgcttcgccttatgggcgcgccgaccgcatcgcacatcctgcaattcctgtcgcttcttttccttccgttcgtgcttgtatccatgaccgtcttgggggtgcttttctcgcagacgaaacagcggcgcaacttctcgttcacgcgtcagttcgggcttggcgtcataacctgtttcgccgtctatttcataatccagattttcaacgccatggggtccagcggcgcgatgattccggtccttgcggtgttttttccgccggcaatcgtgttgtttttttccgcgaccgcaatcacgaagtacgacagcatataa

SEQ ID NO: 74424 - protein, 295 aa, Unknown
  Obtained from environmental sample
  DOMAIN (1)...(291): Predicted permease YjgP/YjgQ family
  misc_feature (1)..(295): Xaa is any amino acid
MLPMFLPLVAFMGTLLTFYKLLISSELVIIQSSGLSAYEIMRPMLLISAAFGALTATAINPLATRYNRMELRNSRIERIDGAVWLREKVKNGSVIIRATGMENSENGGLSLINATLLKQDEKFRITERANADKMILENGNLSAKNALILNSKGAGTRRDFRAKTSLNRENIIKQYLKPNQVSFWDLPEFIRTLRLMGAPTASHILQFLSLLFLPFVLVSMTVLGVLFSQTKQRRNFSFTRQFGLGVITCFAVYFIIQIFNAMGSSGAMIPVLAVFFPPAIVLFFSATAITKYDSI

SEQ ID NO: 74425 - DNA, 477 bp, Unknown
  Obtained from environmental sample
  misc_feature (1)..(477): n is a, c, g, or t
atggtcgtgaaaaaatgcgagtttgcgggctgcgacaaggccggaacgtgccgctgtccgaaagacaggcggctttgtgaatattggtggttctgtcaaaagcacgcgggcgagtataataaaaaatggaactattacgccggcatgacgacggacgaaatcgacagggagtgggaaaaggacgtgttcggcgaaaataaaaaaaacgatttcgaccaccacaaattcatgtccgatttcataaacggacgcgcgaccggggcgaccggggcgcacgcaacacgcgtttcgggggcggtcgccggcgcttatgcggcgatgggtttaagcccgaccggcgactgggaaaaaatccaaaggaaatacagggcgcttgcaaagcgggaacatcccgacaccggcaaatccaaggagcagagccgtttcgtcaaaatctccgccgcgtatcaaacccttaaaaaacatcttaataaataa

SEQ ID NO: 74426 - protein, 158 aa, Unknown
  Obtained from environmental sample
  DOMAIN (102)...(157): DnaJ domain
  misc_feature (1)..(158): Xaa is any amino acid
MVVKKCEFAGCDKAGTCRCPKDRRLCEYWWFCQKHAGEYNKKWNYYAGMTTDEIDREWEKDVFGENKKNDFDHHKFMSDFINGRATGATGAHATRVSGAVAGAYAAMGLSPTGDWEKIQRKYRALAKREHPDTGKSKEQSRFVKISAAYQTLKKHLNK

SEQ ID NO: 74427 - DNA, 753 bp, Unknown
  Obtained from environmental sample
  misc_feature (1)..(753): n is a, c, g, or t
atggcggttatnagagtaatagcaagcagtattgagggtgtcgaacttgcccgcgttacacatgatgtggtcgctgagcggtgggacaactgggacttaacggagtttcttgtttatcttgtagattcggttaatgcttctgtgttgccgtatttagcagaccagtttgatgttggcgggttacgcgggtttggaattgcaaatacagaagaagaacagcgagagttgataaaacaggcaatcgctattcataagcatatcggtacgccatgggcaataaaaaaagcatgtgaaacggtcggttttcctgttgtcattctggaagagggtgtgtctggataccctgatgagatattgagtattaatgcgcagattgttacagacagtaattttacgtttcctgtagaccgtaatggaaatgtaatagcaatttcaatagatgttaatgcaccccgtcaagactgggcgcgttttaacgtgtttgtttccactggtgataacaaacctgttactgttgaaatgatgactgcgatacggaattttataaatatatataagccggaacgttcgcatcttcaaaagttaggtttttatcaggaattaaccgataatgaggggcttattcgtcaggatgaggcgctggaaatccgtattaatggagatataaagtgggcgcacgtgcttacagacagtaattttacgtttcctgtagaccgtaatggaaatgtaatagcaatttcaatagatgtttaa

SEQ ID NO: 74428 - protein, 250 aa, Unknown
  Obtained from environmental sample
  misc_feature (1)..(250): Xaa is any amino acid
MAVXRVIASSIEGVELARVTHDVVAERWDNWDLTEFLVYLVDSVNASVLPYLADQFDVGGLRGFGIANTEEEQRELIKQAIAIHKHIGTPWAIKKACETVGFPVVILEEGVSGYPDEILSINAQIVTDSNFTFPVDRNGNVIAISIDVNAPRQDWARFNVFVSTGDNKPVTVEMMTAIRNFINIYKPERSHLQKLGFYQELTDNEGLIRQDEALEIRINGDIKWAHVLTDSNFTFPVDRNGNVIAISIDV

SEQ ID NO: 74429 - DNA, 765 bp, Unknown
  Obtained from environmental sample
  misc_feature (1)..(765): n is a, c, g, or t
ttgatggagggcggccgagagcccagcccctcgaattcgccgacgcagtctatgacgaagtgttctatccccagttgccgcgccgcctgcgccgcctgcgccactatcccctggtcgccgaagccggccgtgtggaagttcagcgtagcgccgacaacctcccacccgtccttcagcaacagcgccgccaccacgctggaatccaccccgccgctgagcgccaccgccaccttgcccttgcttgccattggcacctcgcaactcaccgtctataccttcacagccgcggcttctccctcaacgtggccctccagtgcctcccgcacgggccccgccaaaaaggcgtccacctgctcctccgccctgccggcgaagcgccctgcgtccagcagcgccacaagctcacattcggtcatgcgccaggcagggtcattggccagcagggacaccagtgggttcggcaggccctgctctttcaccgccctgccggcctccagggacgccagcctgaacctctcgtgcaggtcctggcggtcgcccccccgcttgacggcctccatcaaaagcgcctcggcggccatgaagggcagctcctgcgccagcctggcctcgatcattttgggatggacaaccaggcccgacgctatgttcctgtacagcaccagaatcgcgtctatggccaggaaacccatgctgatggtcaaacggcggtgggccgaatcgtccagcgtgcgctccatccactgcgtggcactggtctggtag

SEQ ID NO: 74430 - protein, 254 aa, Unknown
  Obtained from environmental sample
  misc_feature (1)..(254): Xaa is any amino acid
MMEGGREPSPSNSPTQSMTKCSIPSCRAACAACATIPWSPKPAVWKFSVAPTTSHPSFSNSAATTLESTPPLSATATLPLLAIGTSQLTVYTFTAAASPSTWPSSASRTGPAKKASTCSSALPAKRPASSSATSSHSVMRQAGSLASRDTSGFGRPCSFTALPASRDASLNLSCRSWRSPPRLTASIKSASAAMKGSSCASLASIILGWTTRPDAMFLYSTRIASMARKPMLMVKRRWAESSSVRSIHCVALVW

SEQ ID NO: 74431 - DNA, 645 bp, Unknown
  Obtained from environmental sample
  misc_feature (1)..(645): n is a, c, g, or t
gtgaggctgtttcagcacctgaaagaaatcgaggagcctttcgagaaggggcaggttggttcaagcgccatgccctacaagcgcaaccccatgcgctccgagcgcatcaacagcctgtccaggttcgccctgggcctgttgccgtcgagctaccagaccagtgccacgcagtggatggagcgcacgctggacgattcggcccaccgccgtttgaccatcagcatgggtttcctggccatagacgcgattctggtgctgtacaggaacatagcgtcgggcctggttgtccatcccaaaatgatcgaggccaggctggcgcaggagctgcccttcatggccgccgaggcgcttttgatggaggccgtcaagcgggggggcgaccgccaggacctgcacgagaggttcaggctggcgtccctggaggccggcagggcggtgaaagagcagggcctgccgaacccactggtgtccctgctggccaatgaccctgcctggcgcatgaccgaatgtgagcttgtggcgctgctggacgcagggcgcttcgccggcagggcggaggagcaggtggacgcctttttggcggggcccgtgcgggaggcactggagggccacgttgagggagaagccgcggctgtgaaggtatag

SEQ ID NO: 74432 - protein, 214 aa, Unknown
  Obtained from environmental sample
  misc_feature (1)..(214): Xaa is any amino acid
MRLFQHLKEIEEPFEKGQVGSSAMPYKRNPMRSERINSLSRFALGLLPSSYQTSATQWMERTLDDSAHRRLTISMGFLAIDAILVLYRNIASGLVVHPKMIEARLAQELPFMAAEALLMEAVKRGGDRQDLHERFRLASLEAGRAVKEQGLPNPLVSLLANDPAWRMTECELVALLDAGRFAGRAEEQVDAFLAGPVREALEGHVEGEAAAVKV

SEQ ID NO: 74433 - DNA, 966 bp, Unknown
  Obtained from environmental sample
  misc_feature (1)..(966): n is a, c, g, or t
atgctcagattggccgagttcggggctacgatgtactataaaaacagcagtaacaacggtcagacggggagcagcgcatacggttatatttacgatgtttatccgggcgcaagtaatgtggtgaacggtcatgacctttttattagttttaaaataacagttcaggacgttagcggtaattttaaagcgccttatctgactccgcacggcgcaacaataacaattaacagcagcattaccggcaacagcggaattacagaggtttacactgtgggtaatgatttgaaaataatgtcgcaagccggcgtttattggacaccgatagatcttgtgtctttgaacaatacgtcttatggttttctgtttaaatataacggcgtcgaaatgcctgccggaagtattataaaagttaagatctgcgtgccgcttgccgagacagacgggaagaagatggattattacgaatttacatttcaggtagagggtgtcccttttgtggaaggtctggtcagagatcaggaagcgccttccggcaacaagaatcaggaccagaaccagctctacggctggtcagccgcggcaggcgatatcaacggcgacggttatccggatctggtagtgacggatccttactataagtacgacgatatacacaaggctaccggccgggcttatgtttatttcggcggaccggacaaagttcttgatctgacccaaaagctgacaacaccggatattattattgaacatccggagtatgccgatcccgccaggagaaaagcgcatgaaaacgatgtcggcggccgagaatttgcttataaagttaaagtagccgacataaacggtgacggttatgccgatattattctgggacatccttcatacagcggcaacaatacgcgaaaagtgaacagcggacgtattttgatctattacggcggtccgcattttaagacggcgatttga

SEQ ID NO: 74434 - protein, 321 aa, Unknown
  Obtained from environmental sample
  DOMAIN (271)...(311): FG-GAP repeat
  misc_feature (1)..(321): Xaa is any amino acid
MLRLAEFGATMYYKNSSNNGQTGSSAYGYIYDVYPGASNVVNGHDLFISFKITVQDVSGNFKAPYLTPHGATITINSSITGNSGITEVYTVGNDLKIMSQAGVYWTPIDLVSLNNTSYGFLFKYNGVEMPAGSIIKVKICVPLAETDGKKMDYYEFTFQVEGVPFVEGLVRDQEAPSGNKNQDQNQLYGWSAAAGDINGDGYPDLVVTDPYYKYDDIHKATGRAYVYFGGPDKVLDLTQKLTTPDIIIEHPEYADPARRKAHENDVGGREFAYKVKVADINGDGYADIILGHPSYSGNNTRKVNSGRILIYYGGPHFKTAI

SEQ ID NO: 74435 - DNA, 570 bp, Unknown
  Obtained from environmental sample
  misc_feature (1)..(570): n is a, c, g, or t
ttgtcccaggcaagccaacgacaggtgcggccaatgaatcttgacagcatcccgcctgaattaaagtggcatccgtattggtgcgcgtggaaatacgagcggaaacaaggagataaaaagccgcgcaaagtgccctataatccccgaaccggacaaaaggcgcaatgcaacaaccctgacacgttcgccccttttaccgacgcattaatcgcctttaacggcggaaaagcaggctatagcggcatcggcgtggggctgtttggcaatctggctgccgtcgatattgacagttgcatcaatccagcgacgaagcaaataagcgatctggcgttagatgtggtgtccgcaatgaagacctacaccgaaatatcgccgagcgggacagggctgcccgctgtcttttttgcggctgactatcaatacaatgaatcccgctactatatcaaaaaacagcaagcggatttggaatatatggggccgggcataccaatcgcttggngaccgttacgggaaacgcaaacggatcccgctgccaaaagaaaatggtcagcccccctcccccttttataa

SEQ ID NO: 74436 - protein, 189 aa, Unknown
  Obtained from environmental sample
  misc_feature (1)..(189): Xaa is any amino acid
MSQASQRQVRPMNLDSIPPELKWHPYWCAWKYERKQGDKKPRKVPYNPRTGQKAQCNNPDTFAPFTDALIAFNGGKAGYSGIGVGLFGNLAAVDIDSCINPATKQISDLALDVVSAMKTYTEISPSGTGLPAVFFAADYQYNESRYYIKKQQADLEYMGPGIPIAWXPLRETQTDPAAKRKWSAPLPLL

SEQ ID NO: 74437 - DNA, 525 bp, Unknown
  Obtained from environmental sample
  misc_feature (1)..(525): n is a, c, g, or t
ttgcgcctgctgcggacagctttttctgcgcgttttcttgaagggctgcccctgcccgcgcagccgctgacctgggatttgggcgcgggcgcgggcctgcccggcattcccctgcgcatggtctggcaggccggggaataccacatgatcgagagccgcgaaaaacgcgctatctttctgcacgccgcgctggcgcggctggcgctcccaaacacctttgccgcacatgaccgcgccgaacacttttttgcccgcatgctcgcgcaggggcgtcaagcggattgtattctcagccgggccttcatgccgtgggaaaaactgctgcccttcacggcggacagcctcgcgccgggcgggcttgtctgtatcgcggccacaggcagaccgccaaagacgctgcccggaacctggaaactcgcggcggaatacgcgtacgagttggacggcgcgcaacgctttttctgggctgtcacgaagctcccgccggaacccgcatgccgtcaaaaaccaatttgctcactttga

SEQ ID NO: 74438 - protein, 174 aa, Unknown
  Obtained from environmental sample
  DOMAIN (2)...(166): Glucose inhibited division protein
  misc_feature (1)..(174): Xaa is any amino acid
MRLLRTAFSARFLEGLPLPAQPLTWDLGAGAGLPGIPLRMVWQAGEYHMIESREKRAIFLHAALARLALPNTFAAHDRAEHFFARMLAQGRQADCILSRAFMPWEKLLPFTADSLAPGGLVCIAATGRPPKTLPGTWKLAAEYAYELDGAQRFFWAVTKLPPEPACRQKPICSL

SEQ ID NO: 74439 - DNA, 822 bp, Unknown
  Obtained from environmental sample
  misc_feature (1)..(822): n is a, c, g, or t
atgtcctcgcgaagatcgccggaaggctgctgcgcttcgccgcccggcagcaaccccgcaccggaatcaacaacctcgtcacgcatctcggaaattgcgtcagcactgatagcgccatcctcgccaaaaccctcttcctcgccgacagccgcgtctaccggcgccgcctcttcggcagccgcatccatcggcgccgcctcttcggcagcctcatctgtcggcggcacctcttcggcagcctcatctgtcggcggcacctcttcggcaacctcgtctgccggtaccacctcttcagcagcaaccatgtctaacggctccgtctcttcggcagcagccgtgtctgtcggcggcatctcttcagcagcagcctcgtctgccggtgccgtctcttcagcagcagcctcgtctgccggctccgtctcttcagcagcaaccgtgtctaccggcggcatctcttcagcagccgccgcgtctgccggctccgtctcttcagcagcaaccatgtctaccggcggcatctcttcggcagcagccgtgtctaccggcggcatctcttcagcagcagccatgtctaccggcggcatctcttcggcagcaaccatgtctaccggcggcatctcttcggcagcagccatgtctaccggcgccgcctcatcggcaacagtcacatctatcggcgccacctcatcggcggctttcgccagaatgatctcttcgtcagcgaattccaccagctctgccgcaaacgtaatatcggaaaactcttctttctgttccacaacatcatttcagcgagagcaagctgctcctcggccgatctga

SEQ ID NO: 74440 - protein, 273 aa, Unknown
  Obtained from environmental sample
  misc_feature (1)..(273): Xaa is any amino acid
MSSRRSPEGCCASPPGSNPAPESTTSSRISEIASALIAPSSPKPSSSPTAASTGAASSAAASIGAASSAASSVGGTSSAASSVGGTSSATSSAGTTSSAATMSNGSVSSAAAVSVGGISSAAASSAGAVSSAAASSAGSVSSAATVSTGGISSAAAASAGSVSSAATMSTGGISSAAAVSTGGISSAAAMSTGGISSAATMSTGGISSAAAMSTGAASSATVTSIGATSSAAFARMISSSANSTSSAANVISENSSFCSTTSFQREQAAPRPI

SEQ ID NO: 74441 - DNA, 903 bp, Unknown
  Obtained from environmental sample
  misc_feature (1)..(903): n is a, c, g, or t
gtggaacagaaagaagagttttccgatattacgtttgcggcagagctggtggaattcgctgacgaagagatcattctggcgaaagccgccgatgaggtggcgccgatagatgtgactgttgccgatgaggcggcgccggtagacatggctgctgccgaagagatgccgccggtagacatggttgctgccgaagagatgccgccggtagacatggctgctgctgaagagatgccgccggtagacacggctgctgccgaagagatgccgccggtagacatggttgctgctgaagagacggagccggcagacgcggcggctgctgaagagatgccgccggtagacacggttgctgctgaagagacggagccggcagacgaggctgctgctgaagagacggcaccggcagacgaggctgctgctgaagagatgccgccgacagacacggctgctgccgaagagacggagccgttagacatggttgctgctgaagaggtggtaccggcagacgaggttgccgaagaggtgccgccgacagatgaggctgccgaagaggtgccgccgacagatgaggctgccgaagaggcggcgccgatggatgcggctgccgaagaggcggcgccggtagacgcggctgtcggcgaggaagagggttttggcgaggatggcgctatcagtgctgacgcaatttccgagatgcgtgacgaggttgttgattccggtgcggggttgctgccgggcggcgaagcgcagcagccttccggcgatcttcgcgaggacatgaagcgggtcttgggctatctcgacgctttgtttgacgagcttcccgaggatcgcgtcaaggaattcgcgcattctgaatactttgggctttataatcgcctcttcaaagaattgggtatctag

SEQ ID NO: 74442 - protein, 300 aa, Unknown
  Obtained from environmental sample
  misc_feature (1)..(300): Xaa is any amino acid
MEQKEEFSDITFAAELVEFADEEIILAKAADEVAPIDVTVADEAAPVDMAAAEEMPPVDMVAAEEMPPVDMAAAEEMPPVDTAAAEEMPPVDMVAAEETEPADAAAAEEMPPVDTVAAEETEPADEAAAEETAPADEAAAEEMPPTDTAAAEETEPLDMVAAEEVVPADEVAEEVPPTDEAAEEVPPTDEAAEEAAPMDAAAEEAAPVDAAVGEEEGFGEDGAISADAISEMRDEVVDSGAGLLPGGEAQQPSGDLREDMKRVLGYLDALFDELPEDRVKEFAHSEYFGLYNRLFKELGI

SEQ ID NO: 74443 - DNA, 330 bp, Unknown
  Obtained from environmental sample
  misc_feature (1)..(330): n is a, c, g, or t
gtgccgtctcttcagcagcagcctcgtctgccggctccgtctcttcagcagcaaccgtgtctaccggcggcatctcttcagcagccgccgcgtctgccggctccgtctcttcagcagcaaccatgtctaccggcggcatctcttcggcagcagccgtgtctaccggcggcatctcttcagcagcagccatgtctaccggcggcatctcttcggcagcaaccatgtctaccggcggcatctcttcggcagcagccatgtctaccggcgccgcctcatcggcaacagtcacatctatcggcgccacctcatcggcggctttcgccagaatga

SEQ ID NO: 74444 - protein, 109 aa, Unknown
  Obtained from environmental sample
  misc_feature (1)..(109): Xaa is any amino acid
MPSLQQQPRLPAPSLQQQPCLPAASLQQPPRLPAPSLQQQPCLPAASLRQQPCLPAASLQQQPCLPAASLRQQPCLPAASLRQQPCLPAPPHRQQSHLSAPPHRRLSPE

SEQ ID NO: 74445 - DNA, 699 bp, Unknown
  Obtained from environmental sample
  misc_feature (1)..(699): n is a, c, g, or t
atggaaaccactcttgacgtatttgtcgccgcctcgctgaacggcgtcgtgcgtgagatagccgaccagttcgaagccgacacccccggtgcgacggttcgtctgtcgccgggaggttccgcctcgctcgtgacacagattcgtgagggcgctcccgccgacattctcatcaccgccgacgaacgcacgatggagcaggtcaccgacgatgcgtcgctgcatgcgggggaaccggtcgcgttgacgacgaactcactcgccctcatcgcgtcgcccggcaaccccgccgacgtcgtgtccttggaggatgccgccacggaggacgtgctgctcgtcatctgcgccccgcaggtgccatgcggagccgcgaccgtccaactgtccgaactgacgggcatcgagttctccccggtcagcgaggaaacctccgtcaccgacgtccttgccaaggtgaatagtggacaggccgacgcgggcatcgtctacgtcaccgacgtgcgcgccgccatcgctgctgctgcagcggcaggaaccgaccccatcgttgacattccccttcccgaggacgcgtcgaacatcgtcacccgttcgatggctgtggcgctcacctcgaacgatggcgtcaccgacttcctttccttcctgtctggtactcaggcgcaggcagccttcgcagcggcaggattcggtgcgccgtaa

SEQ ID NO: 74446 - protein, 232 aa, Unknown
  Obtained from environmental sample
  misc_feature (1)..(232): Xaa is any amino acid
METTLDVFVAASLNGVVREIADQFEADTPGATVRLSPGGSASLVTQIREGAPADILITADERTMEQVTDDASLHAGEPVALTTNSLALIASPGNPADVVSLEDAATEDVLLVICAPQVPCGAATVQLSELTGIEFSPVSEETSVTDVLAKVNSGQADAGIVYVTDVRAAIAAAAAAGTDPIVDIPLPEDASNIVTRSMAVALTSNDGVTDFLSFLSGTQAQAAFAAAGFGAP

SEQ ID NO: 74447 - DNA, 723 bp, Unknown
  Obtained from environmental sample
  misc_feature (1)..(723): n is a, c, g, or t
atggaaaaggcccggctggaattgtccgcgcagggcgtctcccattcggtgcttgcggctcacctttttgcgtcaggcggcatggaggccggttcggagcggattttcctcggcaatgcggagcaagtcagctcttctctctttaaatgtttcgactacatcgccctgggacaccttcaccgctgtcagcgcgttggggaaaatgcctggtacccgggaagccccctggcctattcttttggcgaggcgtcgtctcgccaaggtgggtatgaaaaatttttcctctccgtggaactcgggaaaggcgggacggatgtggcgaagatccccgttaaaccccggcggaggcttacaagcttctcgggcccctttgcccggtttaccgggaatatttcaacggatccggaacttctggccgcaaaagaggattatattgaaatacgcctaacggatcggggaatcacggaaaacgcccgggacatactccgcaggcgcttcccacatctcctttccttgagacaggacgaagccctagcggggctttccgttattgcggcgaggacgccggtttctgaaacaggacgccaggacatcggacatcgggatgtctcctctgattttaaagactttcttgcgggcctctatgaggaagcggacaaggacgaattggagcttttcaacaccctccttaccgaaacagaggcggaggaactctcgtcatga

SEQ ID NO: 74448 - protein, 240 aa, Unknown
  Obtained from environmental sample
  misc_feature (1)..(240): Xaa is any amino acid
MEKARLELSAQGVSHSVLAAHLFASGGMEAGSERIFLGNAEQVSSSLFKCFDYIALGHLHRCQRVGENAWYPGSPLAYSFGEASSRQGGYEKFFLSVELGKGGTDVAKIPVKPRRRLTSFSGPFARFTGNISTDPELLAAKEDYIEIRLTDRGITENARDILRRRFPHLLSLRQDEALAGLSVIAARTPVSETGRQDIGHRDVSSDFKDFLAGLYEEADKDELELFNTLLTETEAEELSS

SEQ ID NO: 74449 - DNA, 864 bp, Unknown
  Obtained from environmental sample
  misc_feature (1)..(864): n is a, c, g, or t
gtgttaagcccctactcggtgctgtaccgctggccgggcgcaaacgatgcggccaatgatcctgacaatgtggtattattcctggcccattacgatgtagtacccgccgaaagggaaaaatggagcgttgatccctttggcgcggaaatgaaggaagggtttatttacggccggggcagcctagacatgaaaggcatattgatcagcatcatggaggccgcggaaaagctctgcgccgcaggattcaggccaaagcgggaaatctggtttgcctttgggggtgacgaggaacgtaccggcgttctgggcgcactggaaagcgccaaatggtttgcccggcgggggctgcgtttcgcgtgggttcttgacgagggcacaccggttgcggaagaccaaatcaagagcgttaatacgcccctagccctgatcagcgtagaggaaaaagggtacctcagcctggaactgaacgtggcgcaggagccgggtcattcttcaaggccgcccaggacacaggccgcggtggtacttgcccgggctttgtgcagaattgcggccaaccccttttcctgcaaactaaccccgactatcgaaaattttttcaggcagatttcgtcccttataccgggtcttcaggggttcgccatgcgccatgcacgcgcacttggcccgctgtttcttaaacccgccgcgtccagaatagcaattaattccatgctgcggaccacagtcgccatgaccagacttgagggcagcgccgcggaatacgtgatgccgtcggaagtccgcgccgtaatcaacctgcggctgcttcagccctggaccaaagagacggcaatagcttttataaaaaaggcccgtcaatga

SEQ ID NO: 74450 - protein, 287 aa, Unknown
  Obtained from environmental sample
  DOMAIN (145)...(287): Peptidase dimerisation domain
  misc_feature (1)..(287): Xaa is any amino acid
MLSPYSVLYRWPGANDAANDPDNVVLFLAHYDVVPAEREKWSVDPFGAEMKEGFIYGRGSLDMKGILISIMEAAEKLCAAGFRPKREIWFAFGGDEERTGVLGALESAKWFARRGLRFAWVLDEGTPVAEDQIKSVNTPLALISVEEKGYLSLELNVAQEPGHSSRPPRTQAAVVLARALCRIAANPFSCKLTPTIENFFRQISSLIPGLQGFAMRHARALGPLFLKPAASRIAINSMLRTTVAMTRLEGSAAEYVMPSEVRAVINLRLLQPWTKETAIAFIKKARQ

SEQ ID NO: 74451 - DNA, 903 bp, Unknown
  Obtained from environmental sample
  misc_feature (1)..(903): n is a, c, g, or t
ttggccgaactttgcggacggtctttaaactatcgtcacacggacgccaccgtgaggagcgcgccctcaaagaccggggagaccatgttcacggcgaagaagggtaccaaggtgcaggtgttcggcatatccaaggacgggtgggcgaacgtttctgtaagggacgtcgtgccgaagaggggctggattttcggcgagtacgttgatttcaaagaggggatgaatttcaagggtatgaaaacggttgatatgaagatcaccgagttcaatattacggctaaggactcctctacggccgacctgacggcgacatatgagatcaacggcgccgaaaagaccttgaagtttaatgcgtttaaggaaaaagggcagaaatttttcacctttttctacgatgcctacattgatgggtcgcactatagcgtcatgcccggtttgtatacgtgggatttcaccaagaatcagttgaagaacacagtcctttttacacgcgatccttacgtattcaacgacgcgagtatgttgttgtggaaaaaggcaaggtttaccgatgacaaaaagttcttcatcgtgggcgacagatcggaagccggtgtaaaagcggtgtttaaggcgagcgataaaaaacaactgtttgactggaactttccaaacgggtgcgataataccctctcgttcggtttcaagaacaacacggcgacattcgcctgtccttccgacgctgaaatggccaagaattaccaaaaccttgaggaaatggacgacgcgatttcggagtacggcaacgggtatgtggagggaaatccgcaaccgggttccgctactcttgaagtgatatgcgatgtgaatctagataccggagctaggaagaataccggagctcggtgggtgtcttgtgagtaa

SEQ ID NO: 74452 - protein, 300 aa, Unknown
  Obtained from environmental sample
  misc_feature (1)..(300): Xaa is any amino acid
MAELCGRSLNYRHTDATVRSAPSKTGETMFTAKKGTKVQVFGISKDGWANVSVRDVVPKRGWIFGEYVDFKEGMNFKGMKTVDMKITEFNITAKDSSTADLTATYEINGAEKTLKFNAFKEKGQKFFTFFYDAYIDGSHYSVMPGLYTWDFTKNQLKNTVLFTRDPYVFNDASMLLWKKARFTDDKKFFIVGDRSEAGVKAVFKASDKKQLFDWNFPNGCDNTLSFGFKNNTATFACPSDAEMAKNYQNLEEMDDAISEYGNGYVEGNPQPGSATLEVICDVNLDTGARKNTGARWVSCE

SEQ ID NO: 74453 - DNA, 366 bp, Unknown
  Obtained from environmental sample
  misc_feature (1)..(366): n is a, c, g, or t
ttgagcttgataaagctttgcgacgtgctaaagaacgggattgttataggagggatatttatgccttttatcagggtagacccggaacaagaacaaagggagtttgaggaattgttaaaagacccggcagcaaaaaacgcatacgaagaatttgagcgggaatactcatttagacaaaaattagcggaagcaaggagagcaaaccatgttactcagcaggaaatccaaaacaggacaggactaccgcaacaatcaataagcagaattgaaaaaggtacagcacagaaacagagccctacgttaagaactctgcttaagtatgttgacgctatcggttgtgagttaaccataacacaaaagcagtga

SEQ ID NO: 74454 - protein, 121 aa, Unknown
  Obtained from environmental sample
  DOMAIN (61)...(118): Helix-turn-helix
  misc_feature (1)..(121): Xaa is any amino acid
MSLIKLCDVLKNGIVIGGIFMPFIRVDPEQEQREFEELLKDPAAKNAYEEFEREYSFRQKLAEARRANHVTQQEIQNRTGLPQQSISRIEKGTAQKQSPTLRTLLKYVDAIGCELTITQKQ

SEQ ID NO: 74455 - DNA, 906 bp, Unknown
  Obtained from environmental sample
  misc_feature (1)..(906): n is a, c, g, or t
gtggcnttaatgcttccgctttatttgaacgaagttaatcaaatcaaagtaaatccgagagataataagacgaccgtgaaatcattctcgtttatctcgttttatgaaggcgcagcattagccacacaagcgtttgttgatgcaaaagatataaaaatcaacgtacaggtgtttgatgttaccgaagacgaaaataccgctgttcgtttgattaacagcggaaaattgaaggatatggatatgattattggccctttgttttcgcgttcgttcaaagcaatgagcgattttgccaaacaacaggaaattttcatcatcaatccgttgtccgaaagggataatattttgatagataacccgtacgtgattaaaattactccctctgaaaaagtccaattgcaatcattgttatattatgttacgaaagaggacaatattaagcaacatattttaattgtttcaagtgatagtctacccaatgaaaaggaacgttcggaacaggcgaaattattttttgaaacatattgcagtcatctcccagcgcctgttttcgttgatatttcaaaagacaagtttcaaaatttcagcaatcgtttgtctgataccaaacgcaatgcgattgtttacttgtccaacaaccaggcatttgttacggaaatattatctcaaatttccaaacgggaaaattcgttgggagatgtgttgtattgtttgcacagactgcctcaatttgacctcacggaaatacagtatttaaatgatttgcaaacgcattacacatcgccttttttcgtggactacaacaatgaacaggtgaaaaattttgaacgtttgttttttgaaacttatcacacgatacccgataacaatgcttacattggttatagtgtctcgtgccgattttga

SEQ ID NO: 74456 - protein, 301 aa, Unknown
  Obtained from environmental sample
  misc_feature (1)..(301): Xaa is any amino acid
MALMLPLYLNEVNQIKVNPRDNKTTVKSFSFISFYEGAALATQAFVDAKDIKINVQVFDVTEDENTAVRLINSGKLKDMDMIIGPLFSRSFKAMSDFAKQQEIFIINPLSERDNILIDNPYVIKITPSEKVQLQSLLYYVTKEDNIKQHILIVSSDSLPNEKERSEQAKLFFETYCSHLPAPVFVDISKDKFQNFSNRLSDTKRNAIVYLSNNQAFVTEILSQISKRENSLGDVLYCLHRLPQFDLTEIQYLNDLQTHYTSPFFVDYNNEQVKNFERLFFETYHTIPDNNAYIGYSVSCRF

SEQ ID NO: 74457 - DNA, 624 bp, Unknown
  Obtained from environmental sample
  misc_feature (1)..(624): n is a, c, g, or t
ttgccctttgcggccgatggcgttggtgagctgatcgtcgggcacgatgacttcgagcaggttttcctcttcatccacgatgatgcgcgacaccatggccggtgccagggcgttgcgggcataggcggcgatttccggattccagaccacgatgtcgatacgttcgccgcgcagttcctgcacgatgttctggattcgcgaaccgcgcacgcccacgcatgcgcccaccgggtccacatcgcgctcacgggacaataccgccaccttggcgcgggaacccggatcacgggccacgcccatgatctgcaccgtgctgtcgtccacctcggggacttcgcggcggaacagggccgccatatagtcacggtgcgcgcgggagatgagtacctgcgggccgcggccttccttgcgcacgtcaatgatcagcgcctggacgcggtcgccgcgcttgtaatgttcgcggggaatctgctcgtccttgggcagaagagcttcggtgcgtccgagattgatgatccagccgcccttgtcgcggcgctgcacgatgccgctgacgatttcgcccatgcgatccttgtattcctcgtaaatgatttcctttcggcgtcgcgcatgcgcggatga

SEQ ID NO: 74458 - protein, 207 aa, Unknown
  Obtained from environmental sample
  misc_feature (1)..(207): Xaa is any amino acid
MPFAADGVGELIVGHDDFEQVFLFIHDDARHHGRCQGVAGIGGDFRIPDHDVDTFAAQFLHDVLDSRTAHAHACAHRVHIALTGQYRHLGAGTRITGHAHDLHRAVVHLGDFAAEQGRHIVTVRAGDEYLRAAAFLAHVNDQRLDAVAALVMFAGNLLVLGQKSFGASEIDDPAALVAALHDAADDFAHAILVFLVNDFLSASRMRG

SEQ ID NO: 74459 - DNA, 642 bp, Unknown
  Obtained from environmental sample
  misc_feature (1)..(642): n is a, c, g, or t
gtgggccgccagtttgccagggccctgctggacgccgtgccgcggggccgctatcttatcgtaaacggttccgttcacgatgtaaacagctttgacatcagcaaagggcttcaccagattcttgatcctcagatccagcgcggcagcgttcagctggttcaggaaatatggctggaagaatggagctctgacgaagccctggaaaagatagggaagatcttcgatgaaaccacggattttgacgcaatagcctgcgccaacgacgctatggcgggagcggcgatacagttgctttccgaacgccgcctagccgggaaaattgccgttgtcgggcaggatgcggatttaagcgcctgtcagcgtatcgtggaaggaacgcagctaatgacggtttataagcccatcggaaagataggagtcagggcggcagagctggcagttgctttgggcaggaaagccagaggagaaagcgacgtagaaattccgcctccggatgtaatgctcgataataacagcggggttttggtgccgtcttatttggaaaaatctacggctatttttaaacagaatatcgatgaagtgattcgtgatggttttcattcccgagtcgatgtatttcgtaatgttgcgttggttccatga

SEQ ID NO: 74460 - protein, 213 aa, Unknown
  Obtained from environmental sample
  misc_feature (1)..(213): Xaa is any amino acid
MGRQFARALLDAVPRGRYLIVNGSVHDVNSFDISKGLHQILDPQIQRGSVQLVQEIWLEEWSSDEALEKIGKIFDETTDFDAIACANDAMAGAAIQLLSERRLAGKIAVVGQDADLSACQRIVEGTQLMTVYKPIGKIGVRAAELAVALGRKARGESDVEIPPPDVMLDNNSGVLVPSYLEKSTAIFKQNIDEVIRDGFHSRVDVFRNVALVP

SEQ ID NO: 74461 - DNA, 492 bp, Unknown
  Obtained from environmental sample
  misc_feature (1)..(492): n is a, c, g, or t
atgaagcctgacggcaagatagaaaacctgaaccgggccctgaccaccgatgccatcggcaccatggccagcgcggtcatgggcacttcaaccgtaacttcctacgtggagagcgcggccggggtggccgaaggcggccggaccggccttaccgccatgaccgtggccgttcttttcttggcggccctgttcttctcacccctaatcggcctggttccggccttcgccacggccccggctttgatagtcgtcggggccatcatgatgaccgaagtcgtcaatctggagcttgacgacatcaccgaggccatcccggcctttttgaccatcatcatgatgcccttgacctacagcattgccaacggtttcgccttcggcttcatcagctacaccttgcttaaaatatgctctggcaagattcggcaggtgaactgggtgatgatactggtcagcctggcttttatggtcaatttccatttgcggctgcactga

SEQ ID NO: 74462 - protein, 163 aa, Unknown
  Obtained from environmental sample
  misc_feature (1)..(163): Xaa is any amino acid
MKPDGKIENLNRALTTDAIGTMASAVMGTSTVTSYVESAAGVAEGGRTGLTAMTVAVLFLAALFFSPLIGLVPAFATAPALIVVGAIMMTEVVNLELDDITEAIPAFLTIIMMPLTYSIANGFAFGFISYTLLKICSGKIRQVNWVMILVSLAFMVNFHLRLH

SEQ ID NO: 74463 - DNA, 639 bp, Unknown
  Obtained from environmental sample
  misc_feature (1)..(639): n is a, c, g, or t
ttgacgtacactcaaaaaatccgcgaacttttcaataactgccaaacaccgccgatcgcctatacgcacagctacggttgccgggcgaacgtgtcggacggcgaaaaaatcaacggcatgctcgccgaaatgggctacggattttcactttcccccgaaaacgccggctttatactgcttaacacctgcgccgtgcgcgaaaacgccgaaaaccgcgtgttcggcaacgtcggcgcgttaattcatcaaaaacgccgcaatcccgatttgttcgtcgcggtatgcggctgtatggttcagcaagagcatatcgccgaaaagctgtacaagtcatatccttttgtcgatctgattttcgggactaacgccctgccccgcttccccgaacttttttacaaatcgctttgcgagaaaaagcgaaaacgcgtcgtggatctgggaggagaagacgttataaccgagggtctgccgattaggcgcggtgacgcactcaaagccgacgtgcccgttatgtacgggtgcgacaatttttgcgcctactgcgtcgtgccttatgtcagagggcgggagcgctctcgcagttccggggacgtgataaacgaagtttcagggctgataaaagcggttataaagagataa

SEQ ID NO: 74464 - protein, 212 aa, Unknown
  Obtained from environmental sample
  DOMAIN (20)...(120): Uncharacterized protein family UPF0004
  misc_feature (1)..(212): Xaa is any amino acid
MTYTQKIRELFNNCQTPPIAYTHSYGCRANVSDGEKINGMLAEMGYGFSLSPENAGFILLNTCAVRENAENRVFGNVGALIHQKRRNPDLFVAVCGCMVQQEHIAEKLYKSYPFVDLIFGTNALPRFPELFYKSLCEKKRKRVVDLGGEDVITEGLPIRRGDALKADVPVMYGCDNFCAYCVVPYVRGRERSRSSGDVINEVSGLIKAVIKR

SEQ ID NO: 74465 - DNA, 525 bp, Unknown
  Obtained from environmental sample
  misc_feature (1)..(525): n is a, c, g, or t
gtgatggtagccgacgatgcatacgctcatatgggaacgtatgagacggcgacggcgcttgcgtctgcggtgaagaagataggggaatgggatataatattctgcggcgaaggttcggcggacatgtacgctcagcaggtgggaatggaactgggcgagttgctgggagttcccgtattgaacagcgtaatcaaggctgaagtatccggcggtaaagtatctgtggatcgttcgttggaagacgacgtagagagcgtggaagtaagtcttccttgcgttctttcggtatctcccgagatgaacactgctcgcgttccaagcatgaaagatataatggcagccggtaagaaacccgtaacggtatggaaatcatccgatataggttctgcgtctaagagcaacgtggaagtggtgagcgtgaaagctcccgagtctgcagagcgtaagaaaataatagtggaaggggattcggacgaagcgatagccgacttcatcaaaaagatttctccggaatttaaagggtga

SEQ ID NO: 74466 - protein, 174 aa, Unknown
  Obtained from environmental sample
  DOMAIN (1)...(131): Electron transfer flavoprotein domain
  misc_feature (1)..(174): Xaa is any amino acid
MMVADDAYAHMGTYETATALASAVKKIGEWDIIFCGEGSADMYAQQVGMELGELLGVPVLNSVIKAEVSGGKVSVDRSLEDDVESVEVSLPCVLSVSPEMNTARVPSMKDIMAAGKKPVTVWKSSDIGSASKSNVEVVSVKAPESAERKKIIVEGDSDEAIADFIKKISPEFKG

SEQ ID NO: 74467 - DNA, 879 bp, Unknown
  Obtained from environmental sample
  misc_feature (1)..(879): n is a, c, g, or t
ttgatttcaaaacacattctttctaacgcaagcgaattagagcaatacagaaatcagctacaaaaatttacaggcgatgcccagggcgcgacagacgtgctgtccgaacttcgcgacaaaatgggaaacgacctttttggtactggcaacatggttcaggcatacaaacagcttcgcaatctcggcatgggcgcggaaaaagcttctgcaatgatggatgtgcttggcgatgtcgcggatgggtcggcagaaaattttaacgcgttatccagcattttaaccagagtatcggtatcaggaaaagtcaacgcaggaacaatgcgtcagcttaccaatgctggatttggcatggatgacatggcacaggctttgggaaaatctacaaaacagttacaggctgaaattgatgccgggcgaatagggttcaaagaattaacccttgcaatgaccaacgctacaaaagaaggcggcaggttttaccaaaatatggaacgccaggcacggacattctctggcagcgttaaaatattaaaaagcgcattaagcaatataggaacggaaatagggacaagagtacttcctaaaattgtcgatacaatccggtatataacagaattaataaagctcggaaaagatgggttcgttaatttcggcgctaaagcatttgaagcccttatccatgcaatacaggacgtgataattttctttcagcttctccaaatgcggatgaaaaaattcggaggggcctttactcctatcaaagctatattttcggacgtattcggatttttgaaaagcgttatagaaagtgcgtacccatttctgatgaatcttgcgatgctctttcttcttgcgttcaaaccaattcaggctttataa

SEQ ID NO: 74468 - protein, 292 aa, Unknown
  Obtained from environmental sample
  misc_feature (1)..(292): Xaa is any amino acid
MISKHILSNASELEQYRNQLQKFTGDAQGATDVLSELRDKMGNDLFGTGNMVQAYKQLRNLGMGAEKASAMMDVLGDVADGSAENFNALSSILTRVSVSGKVNAGTMRQLTNAGFGMDDMAQALGKSTKQLQAEIDAGRIGFKELTLAMTNATKEGGRFYQNMERQARTFSGSVKILKSALSNIGTEIGTRVLPKIVDTIRYITELIKLGKDGFVNFGAKAFEALIHAIQDVIIFFQLLQMRMKKFGGAFTPIKAIFSDVFGFLKSVIESAYPFLMNLAMLFLLAFKPIQAL

SEQ ID NO: 74469 - DNA, 396 bp, Unknown
  Obtained from environmental sample
  misc_feature (1)..(396): n is a, c, g, or t
atggaagacggtcggttttccgcaaaaccttatgaagacccggataccactcgaatttacacgaaaagcaaattacaaacaatttggttgaaaatgccactgtttctgcaatatcaaaaaggagatttttatgtaacagcaggcgttgtcggcaatgtaaaaacggctacgtacaacaagctatcttatgctataagcaatagtgccataagaggtcgcgagaaacacggagcaccctattatctcaatggattgcgtgccgatgcggaagtgcgcatcggttacaaccaagttagtttttttgcaacgtggggtttgaccgatatgtttgtgaaaggtcacggtccgaaacttcgagtgggatcgttcggcgtgtcgttgtttccatatcagtaa

SEQ ID NO: 74470 - protein, 131 aa, Unknown
  Obtained from environmental sample
  misc_feature (1)..(131): Xaa is any amino acid
MEDGRFSAKPYEDPDTTRIYTKSKLQTIWLKMPLFLQYQKGDFYVTAGVVGNVKTATYNKLSYAISNSAIRGREKHGAPYYLNGLRADAEVRIGYNQVSFFATWGLTDMFVKGHGPKLRVGSFGVSLFPYQ

SEQ ID NO: 74471 - DNA, 573 bp, Unknown
  Obtained from environmental sample
  misc_feature (1)..(573): n is a, c, g, or t
gtggcgaggaagcggccgcattccatagacggctttgacatcgcaaaggccacaattcattcgctgcgcgcgcagatgggcgtgatgctgcaggacagcttcatcttttccggcacggtgatggacaatatccgctacagccggatggacgccccggacgacgaggtggtcgccgcagccaaggccgtgtgcgcgcacgattttataatggagatggaaaaaggctattataccgaagtcaacgagcgcggcagccgcctttcagtgggtcagcggcagctaatcgcgttcgcgcgggcgctgctcgccgaccctaaaatattaatactggacgaggcaactgccaacatcgacacccacacggagaaagccttgcaggaggggctaagccggctgctgaaaggcaggacatcctttatcattgcccaccggctcagcaccatccggcacgccgcgcggattatggtggtggacggcgggcgcgtcgcagagtccggcagccacgacgaactgatggcgctgcgcggcaaatactacagcttgtacatgtcgcagtacagcggtttcgagtga

SEQ ID NO: 74472 - protein, 190 aa, Unknown
  Obtained from environmental sample
  DOMAIN (1)...(160): ABC transporter
  misc_feature (1)..(190): Xaa is any amino acid
MARKRPHSIDGFDIAKATIHSLRAQMGVMLQDSFIFSGTVMDNIRYSRMDAPDDEVVAAAKAVCAHDFIMEMEKGYYTEVNERGSRLSVGQRQLIAFARALLADPKILILDEATANIDTHTEKALQEGLSRLLKGRTSFIIAHRLSTIRHAARIMVVDGGRVAESGSHDELMALRGKYYSLYMSQYSGFE

SEQ ID NO: 74473 - DNA, 783 bp, Unknown
  Obtained from environmental sample
  misc_feature (1)..(783): n is a, c, g, or t
atggccgaggggatttgccacacgctgcggataatccgccacgacaaagacgtgaaagcggtggtatttcgggtaaactcgcccggcggcagtgcgcaagcgtccgaaattattgcccgcgaagtgaatttgctaaaagaggccggaaaaccggtagtagtgtctatgggcaatttagcggcttcgggcggttattggatttcggcgccggcgaacaaaattgtggtgaatcccacgtcgctcaccggttctatcggtgtgttcgggctaattccgaatgtaaaaaaaggcctgaacaatcatttgggcgttacggtagatgtggccaagagcaatacttctgccgattacctcagcatcatgcgcccgatcacggagcatgaacgtaaagtaatacaatcgtccgtagatttgatttatacgcaatttgtaagcaaagtatccgatgcgcgacttcttacgcctgaaaaggtggacgaaatagggcaggggcgtgtgtggtgcggcatcaatgccgtggaactgggtctagccgaccaattaggcggcctcaccgatgccattgccgaagcggctaacctggcggaattggagaactataaaatcgaagaactgccggttatcaaaactccgtttgcacaaataatggaatcgctactgaggggcggaatatctgtaacagcgccgctgtccaaggaaattcgcaccgtagaacgttttttgcaagaggtaacggaacccggtgtatatgctcgcgtgccggttgagatgagtgtgtattaa

SEQ ID NO: 74474 - protein, 260 aa, Unknown
  Obtained from environmental sample
  DOMAIN (44)...(198): Peptidase family S49
  misc_feature (1)..(260): Xaa is any amino acid
MAEGICHTLRIIRHDKDVKAVVFRVNSPGGSAQASEIIAREVNLLKEAGKPVVVSMGNLAASGGYWISAPANKIVVNPTSLTGSIGVFGLIPNVKKGLNNHLGVTVDVAKSNTSADYLSIMRPITEHERKVIQSSVDLIYTQFVSKVSDARLLTPEKVDEIGQGRVWCGINAVELGLADQLGGLTDAIAEAANLAELENYKIEELPVIKTPFAQIMESLLRGGISVTAPLSKEIRTVERFLQEVTEPGVYARVPVEMSVY

SEQ ID NO: 74475 - DNA, 408 bp, Unknown
  Obtained from environmental sample
  misc_feature (1)..(408): n is a, c, g, or t
atggccgagaggcacgtgatagagggcgagtggaagatgttccgcgcaccaatggccgaagcgccaaatccggacaagatgtacaaatcgcacgtgcataataataatgtaaaagcggccgctaaattgaaaggacggccggtggtttacaaaggagtgtttactttgtccgaaaccggcgatacgtttattgacatggaaaactggggcaagggaattattttcatcaatggcaaccacattggccgctactggcacgtgggaccgcagcaaacgctgtatattccgggcgtgtggttgaagaaaggcgaaaacgaaattgtcatttttgaacaacaaaacgataaaccgcaaaccactgtcagcactatcaaaatgcccgtattgacgaaattgaacattccataa

SEQ ID NO: 74476 - protein, 135 aa, Unknown
  Obtained from environmental sample
  misc_feature (1)..(135): Xaa is any amino acid
MAERHVIEGEWKMFRAPMAEAPNPDKMYKSHVHNNNVKAAAKLKGRPVVYKGVFTLSETGDTFIDMENWGKGIIFINGNHIGRYWHVGPQQTLYIPGVWLKKGENEIVIFEQQNDKPQTTVSTIKMPVLTKLNIP

SEQ ID NO: 74477 - DNA, 888 bp, Unknown
  Obtained from environmental sample
  misc_feature (1)..(888): n is a, c, g, or t
ttggaagcgttagctttgcaggggttggatttagagatcaatcgcggcgagttgatggcgattatcggcaattcgggttccggtaagtccacattattaaatatgctgggcggacttgataaaccttcggcgggccgtctggttgtagacggcaaggatttattcaaactgacggataaagaattagccgattataagcgcttgacggtcggttttgtttggcagaacaacgccaggaatttgatcccttatttgaccgccgtcaacaacgtgatgctgccgatgcaattcgccggtcaagttaaaaaatatgtcgaacgccgcgcatgggcgctggaactgctagatatggttggattatcgaacaaagccaacaagaaactgggcgagctgtccggcggcgagcagcagcgcgtagcgttggcaatcgggcttagcaacaaaccaaggatcttacttgccgacgagccgacgggctcggtcgacgcaaatacctgtttgcagataatgtctatttttcgtaaattcaacgaggagctcaacgttaccgtcgttctggtaacgcacgacagaacgctgaccaaatacgttaaacgcgtcgtcgctatccgcgacggaaaaacgagcagcgaaatgataatgaaagcggacaccgacgacgccacggcggcatggagcgagatggaagagacgcacgacgaatatgcggtgctcgatcgggctggacgcgttcagatacccgaggatttcctaaaaaaactcgatttacaaggaaacaaggtaaaactagcgctggaagaaaaagcggtcgttatgagcaaacccagcggcgcaaattanacggatttgtctatgcatgggcggcgttccgccgtcccgcgcgaatag

SEQ ID NO: 74478 - protein, 295 aa, Unknown
  Obtained from environmental sample
  DOMAIN (16)...(206): ABC transporter
  misc_feature (1)..(295): Xaa is any amino acid
MEALALQGLDLEINRGELMAIIGNSGSGKSTLLNMLGGLDKPSAGRLVVDGKDLFKLTDKELADYKRLTVGFVWQNNARNLIPYLTAVNNVMLPMQFAGQVKKYVERRAWALELLDMVGLSNKANKKLGELSGGEQQRVALAIGLSNKPRILLADEPTGSVDANTCLQIMSIFRKFNEELNVTVVLVTHDRTLTKYVKRVVAIRDGKTSSEMIMKADTDDATAAWSEMEETHDEYAVLDRAGRVQIPEDFLKKLDLQGNKVKLALEEKAVVMSKPSGANXTDLSMHGRRSAVPRE

SEQ ID NO: 74479 - DNA, 369 bp, Unknown
  Obtained from environmental sample
  misc_feature (1)..(369): n is a, c, g, or t
gtggcgtcgtcggtgtccgctttcattatcatttcgctgctcgtttttccgtcgcggatagcgacgacgcgtttaacgtatttggtcagcgttctgtcgtgcgttaccagaacgacggtaacgttgagctcctcgttgaatttacgaaaaatagacattatctgcaaacaggtatttgcgtcgaccgagcccgtcggctcgtcggcaagtaagatccttggtttgttgctaagcccgattgccaacgctacgcgctgctgctcgccgccggacagctcgcccagtttcttgttggctttgttcgataatccaaccatatctagcagttccagcgcccatgcgcggcgttcgacatattttttaacttga

SEQ ID NO: 74480 - protein, 122 aa, Unknown
  Obtained from environmental sample
  SIGNAL (1)...(21)
  DOMAIN (66)...(104): Protein of unknown function (DUF1602)
  misc_feature (1)..(122): Xaa is any amino acid
MASSVSAFIIISLLVFPSRIATTRLTYLVSVLSCVTRTTVTLSSSLNLRKIDIICKQVFASTEPVGSSASKILGLLLSPIANATRCCSPPDSSPSFLLALFDNPTISSSSSAHARRSTYFLT

SEQ ID NO: 74481 - DNA, 576 bp, Unknown
  Obtained from environmental sample
  misc_feature (1)..(576): n is a, c, g, or t
ttggccattggattgaagtttatccccaacgggatgatcaagggctgtatcatttttggaaaatttattgtggttgtcataaccattggccttgtggcggcgggttttgagatgatcaccggggtagtggtcatccccggcctgacccctgtcggcgacgcattggcaatcgtcggacaaatcggcgtggttctgttgggaaccttcccggttctttcactgcttaccaaggttttggacaagcccctcacgtctatcggcaaaaaaatcggaatggacgcaacctctaccgcaggggttattttcaccctggccaattccatcccggtatacaagatgatgaaggacatgaatccccgcggtaagatcatcaataccgcatggctggtgcccgctaccgcggccctgggggatcacctgggctttaccgccggtgtgtatcccaaagcgatcaccgctgtggtgatctccaagatcatagccggtgtccttgccattgggcttgccatgctgatgaccaagagtaccgagcttgaagacaagcagagcgccgctattgaagcggcatcgaaatag

SEQ ID NO: 74482 - protein, 191 aa, Unknown
  Obtained from environmental sample
  DOMAIN (1)...(188): Ethanolamine utilisation protein, EutH
  misc_feature (1)..(191): Xaa is any amino acid
MAIGLKFIPNGMIKGCIIFGKFIVVVITIGLVAAGFEMITGVVVIPGLTPVGDALAIVGQIGVVLLGTFPVLSLLTKVLDKPLTSIGKKIGMDATSTAGVIFTLANSIPVYKMMKDMNPRGKIINTAWLVPATAALGDHLGFTAGVYPKAITAVVISKIIAGVLAIGLAMLMTKSTELEDKQSAAIEAASK

SEQ ID NO: 74483 - DNA, 366 bp, Unknown
  Obtained from environmental sample
  misc_feature (1)..(366): n is a, c, g, or t
atggcgcgtaaattttatctcggcgtggatcagggaaccaccgggaccacggccctgctttttgatgaaaaatggacaatcgttggacacggctacaaggaacacacccagatataccctgaagcgggctgggttgagcatgaccctatagaaatctggaatgcgatccttgataccataagccaggtattgaagcaagccaatgcttccgcggacgagattgcctgtatcggccttgataaccagggcgaaacctgcatggtatgggatcccaagaccgggaaaccggcctataatgccattgtctggcangacaggcggacttcccgctttgccgatcagcttggcgaaaatatggggacatga

SEQ ID NO: 74484 - protein, 121 aa, Unknown
  Obtained from environmental sample
  DOMAIN (5)...(121): FGGY family of carbohydrate kinases, N-terminal domain
  misc_feature (1)..(121): Xaa is any amino acid
MARKFYLGVDQGTTGTTALLFDEKWTIVGHGYKEHTQIYPEAGWVEHDPIEIWNAILDTISQVLKQANASADEIACIGLDNQGETCMVWDPKTGKPAYNAIVWXDRRTSRFADQLGENMGT

SEQ ID NO: 74485 - DNA, 903 bp, Unknown
  Obtained from environmental sample
  misc_feature (1)..(903): n is a, c, g, or t
atgacgaaatacttgatgccatcgtatttcccccgtaaggtcctgcgggaaatctgcaacagcgttcagatatacgggtataccgatcccgcagatttctttggcgcaaaagtcccgatatccggctccgtggtggatcaacaagcggccctcttcgggcaggcntgctattcgcccggcaatatcaagaccacntacggtacgggctgcttcatgctgatgaacaccggagacaagccggtgtattcgcagaacggccttttgactaccgttgcctggggccttggcggaaaaatgacctttgccttggacggcggggtgtacattaccggcgccgcggttcaatggctccgtgataaaatgcggatcattgacaattctgcacaaaccgaagaaatcgcaaaatctgtcgaggataccggaggggtcttctttgtaccggcctttgccggacttgctgcgcctcactgggaccagtatgcgcggggaaccattgttggcattaccggcggcactaccagggagcagatcgtccgcgccactctggaaagcgttgcctatcaggtaagtgacaacctggcggttatgaacaaagatgccggcatccctgtaaaagttatgcgggttgacggcggcatggtggcgaataagttcctcatgcagttccaggcggacattatgggtatcccggttgacgtgccggtgatcaccgaaactaccgccctgggcgccgcgtatcttgcggctttcggcatcggggaattttccaacctggacgatctgacccaccactggaggttggcgcagcgcttcgagccaaacatgagcgccgataaacgggagagccttttgcataactggcaccgggcggtggaacgttccaaggcctgggaagagaactga

SEQ ID NO: 74486 - protein, 300 aa, Unknown
  Obtained from environmental sample
  DOMAIN (56)...(281): FGGY family of carbohydrate kinases, C-terminal domain
  misc_feature (1)..(300): Xaa is any amino acid
MTKYLMPSYFPRKVLREICNSVQIYGYTDPADFFGAKVPISGSVVDQQAALFGQACYSPGNIKTTYGTGCFMLMNTGDKPVYSQNGLLTTVAWGLGGKMTFALDGGVYITGAAVQWLRDKMRIIDNSAQTEEIAKSVEDTGGVFFVPAFAGLAAPHWDQYARGTIVGITGGTTREQIVRATLESVAYQVSDNLAVMNKDAGIPVKVMRVDGGMVANKFLMQFQADIMGIPVDVPVITETTALGAAYLAAFGIGEFSNLDDLTHHWRLAQRFEPNMSADKRESLLHNWHRAVERSKAWEEN

SEQ ID NO: 74487 - DNA, 324 bp, Unknown
  Obtained from environmental sample
  misc_feature (1)..(324): n is a, c, g, or t
ttggaacgttccaccgcccggtgccagttatgcaaaaggctctcccgtttatcggcgctcatgtttggctcgaagcgctgcgccaacctccagtggtgggtcagatcgtccaggttggaaaattccccgatgccgaaagccgcaagatacgcggcgcccagggcggtagtttcggtgatcaccggcacgtcaaccgggatacccataatgtccgcctggaactgcatgaggaacttattcgccaccatgccgccgtcaacccgcataacttttacagggatgccggcatctttgttcataaccgccaggttgtcacttacctga

SEQ ID NO: 74488 - protein, 107 aa, Unknown
  Obtained from environmental sample
  misc_feature (1)..(107): Xaa is any amino acid
MERSTARCQLCKRLSRLSALMFGSKRCANLQWWVRSSRLENSPMPKAARYAAPRAVVSVITGTSTGIPIMSAWNCMRNLFATMPPSTRITFTGMPASLFITARLSLT

SEQ ID NO: 74489 - DNA, 888 bp, Unknown
  Obtained from environmental sample
  misc_feature (1)..(888): n is a, c, g, or t
atgggcaagaagagcgtcgaagccatggcccaggaacgttcacgcttcgtggacggggcgcgcgccaacggcatcggcgagaaaaaagccaatgacatcttcaacttgatggaaaaattcgcggaatacggcttcaacaagtcgcattctgcggcctatgcgctgatatcctaccacaccgcctacctgaagacgcatttcaagggcgcatttatggcggccctgctgacgtccgaaatgggcaaccaggacaagctgctcaagtacgtggccgcctgcaaggacatgggcatccaggtgatgcagccctcggtcaaccgcagccggctcgagttcgccgcatacgaagggcaggtgatcttcggccttggcggcattaagaacacgggcgtcgaggccgtcaaggacatcgtcgaagcccgggcggcgggcggcgagttcgcgtccctgctcgatctcgcctcgcgcgtcagtttgcgcaaggtgacgaagcgcgtacttgaagcgctcatcaagggcggggcctgcgattgcttcggcatctcgcgcgccgccatgcttgcgggtctggatatcgtattgtcccgcgcccggaaacgcgcgaaggaaaaggcctccaaccaggcatcgctgttgtccgccgcgtccggcccgcaggaaacgccgcccggcgggctgggcttcgcctgcgaggaggggaagcttccggaaatggaggaggcccaacggctgaagctggaaaaagaggcgctcggcttctttttgaccagccatccgctccagccctaccggggtgagatggatcgcctcggtctgaccacgctcgagggagcgcccgcactccccgccggttcggaaaatcgttgcccctgcttgttacgcaaataa

SEQ ID NO: 74490 - protein, 295 aa, Unknown
  Obtained from environmental sample
  misc_feature (1)..(295): Xaa is any amino acid
MGKKSVEAMAQERSRFVDGARANGIGEKKANDIFNLMEKFAEYGFNKSHSAAYALISYHTAYLKTHFKGAFMAALLTSEMGNQDKLLKYVAACKDMGIQVMQPSVNRSRLEFAAYEGQVIFGLGGIKNTGVEAVKDIVEARAAGGEFASLLDLASRVSLRKVTKRVLEALIKGGACDCFGISRAAMLAGLDIVLSRARKRAKEKASNQASLLSAASGPQETPPGGLGFACEEGKLPEMEEAQRLKLEKEALGFFLTSHPLQPYRGEMDRLGLTTLEGAPALPAGSENRCPCLLRK

SEQ ID NO: 74491 - DNA, 879 bp, Unknown
  Obtained from environmental sample
  misc_feature (1)..(879): n is a, c, g, or t
atgtcttatgaacaaatatctgaactatttgcggagcctttgnacttgtttaatataaaggcttcagatataaaacatgaaaaatcatctataattttcattggtggtcgaggaacaggaaaaactatgattttacggcaattttcttataatgtacaaagggtgtcattaccagataaatcttctttttataataaagtaaaagatgataagtacattggaatatattttcgtgttaatactcctctccttagaagtttagataatatcgctttatattcaaaaaaaccggactttgccgaatccatatttactcattattttgaattaacagtttttaaggaatatcttgaaattataaaattatttcttcttgataaagattataaaaagggaagtgaaacttatttcacaataattgaaactctcaaacagttaattgattgttcagaaacatcatctatttctgatattgataaacttcttgagtttgtaattaatcaaataaattatatttcgaaataccaatcagaaaaagccattgatatagatgaaaatgtaatattttcaccttcttgtggtatgatgtcgcaaggtagacttacaaataattttttaaaaacatcaataatgaaaatatttgatctagataatgtcaatattttattattaattgatgaatttgagaatttttctgagatacaacaaagagtacttaacacagctatgcgattcactaatgattattgtgtaagttttcgtattggtatgcgtccaaacgggtttaagacatatgatacgctagataaaattgattttataaaagaaggtcgtgattaccgtaaaattgaaattggatttcttctgaaagaaaggtaa

SEQ ID NO: 74492 - protein, 292 aa, Unknown
  Obtained from environmental sample
  misc_feature (1)..(292): Xaa is any amino acid
MSYEQISELFAEPLXLFNIKASDIKHEKSSIIFIGGRGTGKTMILRQFSYNVQRVSLPDKSSFYNKVKDDKYIGIYFRVNTPLLRSLDNIALYSKKPDFAESIFTHYFELTVFKEYLEIIKLFLLDKDYKKGSETYFTIIETLKQLIDCSETSSISDIDKLLEFVINQINYISKYQSEKAIDIDENVIFSPSCGMMSQGRLTNNFLKTSIMKIFDLDNVNILLLIDEFENFSEIQQRVLNTAMRFTNDYCVSFRIGMRPNGFKTYDTLDKIDFIKEGRDYRKIEIGFLLKER

SEQ ID NO: 74493 - DNA, 804 bp, Unknown
  Obtained from environmental sample
  misc_feature (1)..(804): n is a, c, g, or t
atgggtggacttgccgttgaaaaaactggtgacgtgcctgaatttctgggtctcggccagacgcagctgccggatcccgccctcggccagcacttcgcccaagagccggggcaggccctcgtccccgcccatggggcccagcagatactcggtcagttcatcgtaatagcgggtcaggcccagatacttgacccgcggccgacggggcgggtggccgggataggccgggtccaaaaaggcctgggtcaactgtatggcccgatcctggcggaaattggtgtggatgaccgcatcgccctcggccaggccggggtaaccttcgcagaccaagggggggatgtattcatcgaccatgtcgaagttgtccggggtcttgtcctcggcccaggaacgctccaccgcggccaggggctcggtgaaggggcggccctcggcctcgaccaaggcgcggtaggcccggtcggtgaggttccaatcgcggctgcggtccatggcgtaatagcgtcccatcatagtgcctattttcacgccgccgacctcttctatgaccagcttaagcttggccagaaaccccggactggagcggggcggagtatcccggccgtccaggaaggggtggacgaagatggtcccggccggattttcagcccgggcccggcgcaaaaacttgaagagatgctcctggtgggcgtggacgccctcgtcctggagcagccccagcatatggagggccacgcctttttcccgccagtgggtcatgatttcgccccacttgggcagcctgaaaaaactcccgtcgcttaa

SEQ ID NO: 74494 - protein, 267 aa, Unknown
  Obtained from environmental sample
  misc_feature (1)..(267): Xaa is any amino acid
MGGLAVEKTGDVPEFLGLGQTQLPDPALGQHFAQEPGQALVPAHGAQQILGQFIVIAGQAQILDPRPTGRVAGIGRVQKGLGQLYGPILAEIGVDDRIALGQAGVTFADQGGDVFIDHVEVVRGLVLGPGTLHRGQGLGEGAALGLDQGAVGPVGEVPIAAAVHGVIASHHSAYFHAADLFYDQLKLGQKPRTGAGRSIPAVQEGVDEDGPGRIFSPGPAQKLEEMLLVGVDALVLEQPQHMEGHAFFPPVGHDFAPLGQPEKTPVA

SEQ ID NO: 74495 - DNA, 384 bp, Unknown
  Obtained from environmental sample
  misc_feature (1)..(384): n is a, c, g, or t
atgcgcttgttgatagcatctgatctgcacggttcagccgcccaggccgccaggcttctggaggaaatagcaaagacggaccctgaggccgtggtgctgcttggcgacctgctctaccacggaccacgcaaccaacttccggaaaaatactcaccgatggaaacagccgggctcctggaaaacttgggccggccggttatggctatacgcggcaactgcgacgccgaggttgaccagttggtcctgcctttccacttggctgaaagcgcctggataatggccggtccaaggccgatcctggctattcacgggcacgagctgcctgaaaacggcggccatatgaaaatcccggaaggcgttaccatactctttggtcaatcctag

SEQ ID NO: 74496 - protein, 127 aa, Unknown
  Obtained from environmental sample
  DOMAIN (1)...(109): Calcineurin-like phosphoesterase
  misc_feature (1)..(127): Xaa is any amino acid
MRLLIASDLHGSAAQAARLLEEIAKTDPEAVVLLGDLLYHGPRNQLPEKYSPMETAGLLENLGRPVMAIRGNCDAEVDQLVLPFHLAESAWIMAGPRPILAIHGHELPENGGHMKIPEGVTILFGQS

SEQ ID NO: 74497 - DNA, 504 bp, Unknown
  Obtained from environmental sample
  misc_feature (1)..(504): n is a, c, g, or t
gtgaacagggctttcccattcttcaagataagcggcaaggccttcaccgaccagaccgagccggtggtgcgcgaccgttttctggtcaagctcaaaaagcaacgcggcaatatcggcctttacctggccggacgaaagacctactatgtcttgaagtcgcttgacaatgtcaatgaggaattggcggcccaagaagaacctccggaactggccgccctggacacggttatgctgagcggagtaatattcaaaaaaatacttggacttactgaaaaagatcttgataatccagaggtcgtcgcctatgtcccagaccttgatcaggccctggacctggtaagggagaaaaagcgccaggccgctttcatacttaatccaagcacggtcgaagacgtgatcagggtttcggagaagggtctgaccatgcccagaaaatcgacatttttctaccccaaggtgaccacgggactcatgatgaacctaatagacgattccaggatatga

SEQ ID NO: 74498 - protein, 167 aa, Unknown
  Obtained from environmental sample
  misc_feature (1)..(167): Xaa is any amino acid
MNRAFPFFKISGKAFTDQTEPVVRDRFLVKLKKQRGNIGLYLAGRKTYYVLKSLDNVNEELAAQEEPPELAALDTVMLSGVIFKKILGLTEKDLDNPEVVAYVPDLDQALDLVREKKRQAAFILNPSTVEDVIRVSEKGLTMPRKSTFFYPKVTTGLMMNLIDDSRI

SEQ ID NO: 74499 - DNA, 507 bp, Unknown
  Obtained from environmental sample
  misc_feature (1)..(507): n is a, c, g, or t
atggataaaaacatttacgctttttccgccctggtcggccaggaacacatgaagctggcccttatcctggctgtaatcaatccaggtcttggcggtgtcctgataagaggtgaaaaaggcacggccaagtcaacggccgtgcgggccctgacagcccttctgcctgatcaggaagtggttgatggatgccgctacggctgcgaccctgaccatgttgaattgtggtgcgatgagtgcagcggacgaagcgtcacgagaaaaaaaaggaaaaggccgctggtggaattgccgcttggagccacggaagacagactcttgggcagtataaacctggaagaggccctggtcaagggtgagagccgttttgagcccgggcttctggccgcggccaaccgcggaattttatatgtggatgaagttaaccttctggacgaccatttggttgattcgcttttggacgcggcggccatggggcgcaacattgtggaagagaaggggtttcaataa

SEQ ID NO: 74500 - protein, 168 aa, Unknown
  Obtained from environmental sample
  misc_feature (1)..(168): Xaa is any amino acid
MDKNIYAFSALVGQEHMKLALILAVINPGLGGVLIRGEKGTAKSTAVRALTALLPDQEVVDGCRYGCDPDHVELWCDECSGRSVTRKKRKRPLVELPLGATEDRLLGSINLEEALVKGESRFEPGLLAAANRGILYVDEVNLLDDHLVDSLLDAAAMGRNIVEEKGFQ

SEQ ID NO: 74501 - DNA, 717 bp, Unknown
  Obtained from environmental sample
  misc_feature (1)..(717): n is a, c, g, or t
ttgttatatttaactttatttggagacgatccaacagaaaaaagcattggaaaagataaaaatatttcttatgaaaaaattaattataaatatgatattattaaatggcttgaattatgtaaaaaagaatctgtagataatcccatactgcgtgaaacactaactcaatatattttattggttaggcaattaacaggacaagcaaggagtaaagaaatgtctgaagaaattttatcattaattactaagtcagaagatgatataaaagctgctgttgctattaaacaagcggtagattcaattgatcaaaaaattcgagaattatttgaaaaaaatatatttgataaactgaattatcataatgcatcatatttaaagaacagggattggtattgtatatccttgccgataaaaaacggtaaatatcatttatttatcagatatgattggcgtgcaatttacgttgatatagatgaaaaaaataaaaacgccgaaaccaatgataaagaagccttattcaatgtattttctgaattaccgggaataacaggtggtaataaatggcctattaataattctcaatggggcatttcagaatcagcttattctgaattttctgatgttattggagatttatataaatataaactttataaagaatatttggaaaaacccgaaaatgttgttcaaaaaataaaagatatcgaaacaaattga

SEQ ID NO: 74502 - protein, 238 aa, Unknown
  Obtained from environmental sample
  misc_feature (1)..(238): Xaa is any amino acid
MLYLTLFGDDPTEKSIGKDKNISYEKINYKYDIIKWLELCKKESVDNPILRETLTQYILLVRQLTGQARSKEMSEEILSLITKSEDDIKAAVAIKQAVDSIDQKIRELFEKNIFDKLNYHNASYLKNRDWYCISLPIKNGKYHLFIRYDWRAIYVDIDEKNKNAETNDKEALFNVFSELPGITGGNKWPINNSQWGISESAYSEFSDVIGDLYKYKLYKEYLEKPENVVQKIKDIETN

SEQ ID NO: 74503 - DNA, 654 bp, Unknown
  Obtained from environmental sample
  misc_feature (1)..(654): n is a, c, g, or t
atggatgcccatgcgttgggttttcaatacattgaaaatgttgaaagcggccgtgaagtattgatccgtgaatacgaagacgcctgtgaagataatttgccggatgaaaatttccaaattcgcctgcgttattttgacacgcgcttgattcaggaagagcgccttacctataatgaaaaacatgaaaatttgttgaatgaaattaaaaaattctgggatttgatagaagtcatgtatcaggacgcgaaacctgtatttaaaacgtatgactatgatgaccttatgagaaaaaacaggatcaagataaaggcaggcgatattccccaagggcagttatttaaaaccgaagcggaatacggtcaggataacgtaaggacgcaattcgttttaattaacgagacgatagaaaaattacaaaaaaatctaaaccacggcgaatatgacatacttaaagaccgcctttccgctctgcaaaatagatattcgctgtatgcggaaacaaccaacccaaataaaatacaacccggttttctgattgacgttgacattacgtcaatcaaacggaaaagaacaaccatttcccttttatcctgcgttctgaatgaatttattgagaaaaattctgtatgtgcgctaccatgtcaccgtgaataa

SEQ ID NO: 74504 - protein, 217 aa, Unknown
  Obtained from environmental sample
  misc_feature (1)..(217): Xaa is any amino acid
MDAHALGFQYIENVESGREVLIREYEDACEDNLPDENFQIRLRYFDTRLIQEERLTYNEKHENLLNEIKKFWDLIEVMYQDAKPVFKTYDYDDLMRKNRIKIKAGDIPQGQLFKTEAEYGQDNVRTQFVLINETIEKLQKNLNHGEYDILKDRLSALQNRYSLYAETTNPNKIQPGFLIDVDITSIKRKRTTISLLSCVLNEFIEKNSVCALPCHRE

SEQ ID NO: 74505 - DNA, 810 bp, Unknown
  Obtained from environmental sample
  misc_feature (1)..(810): n is a, c, g, or t
atggctccgccaacttacagcatcatcgcgggagcggccttgcagttcatagattatgacctggacctctccttggccgtggagggcaagccgctggccgaacgccggaagcccttttatgtgaacaccggcgtggacccgccggggctggtcattctggataaagtcaagagcggggacggagacgagcgttacgtggccggcaagaccggccagagcctgcccatgcattttgaggtggagaccagggaggccttcgagtgctgcctgggccgctggctgcccctgccttttctggagcgcagcggcacctggggcgaccagaaaccccgcttcggctccgggcccacggattgggtgcggggcttcctgagccgcctgggcgatgagaaaagccttaagtaccgcctgaccctggtctttgatccccaagtggaagacggaaaagaggccaaccgctacagccgggacggggcggtcatatatcacgccctttccgaaaacaacgttaacgagaatgtcttcttcgccctggccgccgaccagagggattacggctggttcgtcgagctgccctggatcaacgacgccctccgccagaaccaggcggccttccgcaaaaaacagccccgccggccggtggcccgggtggcggacgatttcccggaccggggctatgagacaagcggcgggtccccggccgtggccgcggaatacctggcggtttatgtcgctttccttgagggcctggccctctccggccgtctgggggaggtccgcctggtcaacccggaaaggacaaacccttga

SEQ ID NO: 74506 - protein, 269 aa, Unknown
  Obtained from environmental sample
  misc_feature (1)..(269): Xaa is any amino acid
MAPPTYSIIAGAALQFIDYDLDLSLAVEGKPLAERRKPFYVNTGVDPPGLVILDKVKSGDGDERYVAGKTGQSLPMHFEVETREAFECCLGRWLPLPFLERSGTWGDQKPRFGSGPTDWVRGFLSRLGDEKSLKYRLTLVFDPQVEDGKEANRYSRDGAVIYHALSENNVNENVFFALAADQRDYGWFVELPWINDALRQNQAAFRKKQPRRPVARVADDFPDRGYETSGGSPAVAAEYLAVYVAFLEGLALSGRLGEVRLVNPERTNP

SEQ ID NO: 74507 - DNA, 378 bp, Unknown
  Obtained from environmental sample
  misc_feature (1)..(378): n is a, c, g, or t
ttgaggataatgaatgaaactcccggcaaaaaaacaacaattaaccaacggattaaaatactcagaaaaagcctaagcttaacgcaaaaagaatttgctcaaaaaatatatgtctccacatcatttcaaacgcttatcgagcttgagcaaaaaaaggtcctagatcggcacatcaaacttattatttcagcttttggggtgaatgaagtgtggctacgaaccggagaaggggaaatgtttgaaaaaggtgttaccccggaccataaaattgccgaaactgtagaggttttcaaacaactgaacccgtttttccaggattttattctggatcagctgtataaattgctagaatatgagaaaaaatacaacaataagtaa

SEQ ID NO: 74508 - protein, 125 aa, Unknown
  Obtained from environmental sample
  DOMAIN (18)...(72): Helix-turn-helix
  misc_feature (1)..(125): Xaa is any amino acid
MRIMNETPGKKTTINQRIKILRKSLSLTQKEFAQKIYVSTSFQTLIELEQKKVLDRHIKLIISAFGVNEVWLRTGEGEMFEKGVTPDHKIAETVEVFKQLNPFFQDFILDQLYKLLEYEKKYNNK

SEQ ID NO: 74509 - DNA, 591 bp, Unknown
  Obtained from environmental sample
  misc_feature (1)..(591): n is a, c, g, or t
ttgaggcggctggaggaaaaacacggctggccgcccatcccggtggtggccatgaccgcncacgccatgaagggcgaccgggagaaatacctggcggccggaatggacgattacctgaccaaaccggtcctcttggacgacctggcccgcctgatggaccgcctgggcttaagtctccaggccggcttcccggcggcccggccacatgatgcggttcagccgaatccaccccccgaagcggtcatggacgaaaacataattaagcgctccttcggaaacgaccaaaaactgcttaaaaaaagcctggagatatacttgcgggatgccccgaagctgatgaacaacctcaagaaagccctcgaggccgatgacttcaagcagatcatcggcctggcccacgcgctgaaaggcataagcggctactacacccaggggggcccctttgaactggcccgccttttggacttggcggcccgtaagcggcccggcccggaaatgaaggcgaaactgaaccacttgagtgcggagcttgaaaaagccgtggccgccttgatcgcggccatgaacgggcggctattgattgagagataa

SEQ ID NO: 74510 - protein, 196 aa, Unknown
  Obtained from environmental sample
  DOMAIN (100)...(176): Hpt domain
  misc_feature (1)..(196): Xaa is any amino acid
MRRLEEKHGWPPIPVVAMTAHAMKGDREKYLAAGMDDYLTKPVLLDDLARLMDRLGLSLQAGFPAARPHDAVQPNPPPEAVMDENIIKRSFGNDQKLLKKSLEIYLRDAPKLMNNLKKALEADDFKQIIGLAHALKGISGYYTQGGPFELARLLDLAARKRPGPEMKAKLNHLSAELEKAVAALIAAMNGRLLIER

SEQ ID NO: 74511 - DNA, 351 bp, Unknown
  Obtained from environmental sample
  misc_feature (1)..(351): n is a, c, g, or t
gtgggctttgcgcaaaaaaagtccacgcgccaacaagcaagctccacatggaaagaagaatatgttctgcgcttcacgccggaaagcgaaatcaagcttgttgaaagcgtgcttttgggcgaaactgttgagcttgccgccgcgcacagcataagggagcgcatcgaggaagcgaaagacctttccgccgttgccgctgcaattgaaagcgcgcttctttgcgggcttccccgcgttttggaaaacgccgtttccgccctgcaagcaatgtccgttcacgcggcggatttcagttcgcttgcccttgttctgcaggtcacatgcagacaccgcgtcataccgccgacttag

SEQ ID NO: 74512 - protein, 116 aa, Unknown
  Obtained from environmental sample
  misc_feature (1)..(116): Xaa is any amino acid
MGFAQKKSTRQQASSTWKEEYVLRFTPESEIKLVESVLLGETVELAAAHSIRERIEEAKDLSAVAAAIESALLCGLPRVLENAVSALQAMSVHAADFSSLALVLQVTCRHRVIPPT

SEQ ID NO: 74513 - DNA, 516 bp, Unknown
  Obtained from environmental sample
  misc_feature (1)..(516): n is a, c, g, or t
gtgtccggcctttccgccgtcccgaaaggcgcgaacaggctgtgggactgttcctgttcccggtgcggctccgtttttacggccaccagaacgctgctcaaaacgaaaaattcggcattatgcaaaaaatgccacccgttccgtaacagggtgaaagatattacgggccggactttcggccggctgaccgcggtgcggagggttgaaaacaacccggaaaccggcctcgcccaatggcttttttcctgctcctgcggcaacgcctgcgtcacttcctcgttttacgtcctccacggcatgacccgctcctgcgggtgcctccgcaaaggcaagaaagaccgccgtcccgattcaaccggcgtttattttaacgccgccgcgaaacggtattacgcgtatatcagccgttcggggggacgcctgtacctcggctgcttcgcccgcttcgccgacgcgaaacgcgtccgcgccgccgttaaaatttgtttcgccaaacgggcccgttttaaaaaatga

SEQ ID NO: 74514 - protein, 171 aa, Unknown
  Obtained from environmental sample
  misc_feature (1)..(171): Xaa is any amino acid
MSGLSAVPKGANRLWDCSCSRCGSVFTATRTLLKTKNSALCKKCHPFRNRVKDITGRTFGRLTAVRRVENNPETGLAQWLFSCSCGNACVTSSFYVLHGMTRSCGCLRKGKKDRRPDSTGVYFNAAAKRYYAYISRSGGRLYLGCFARFADAKRVRAAVKICFAKRARFKK

SEQ ID NO: 74515 - DNA, 816 bp, Unknown
  Obtained from environmental sample
  misc_feature (1)..(816): n is a, c, g, or t
gtgaaggtcgtctcactcttcagtggcgcaggaggatttgacttgggcttcacacaggccgggcatgaaattgtctgggcgaacgatatatatctcgatgcaattgaaacatacaaactcaatttgggcaaccacatccaatgcaaaaagatcgaaactgtgaaaggggaagatgtcccagactgcgacatcatcattggcgggttcccttgccaaggcttttcaatagccaacacaaagcgacataccgacgatgaacgtaacaagctatacctagagctagtacgaatcataaagtacaagcgccccatgtttttcctagccgaaaatgtcaagggcataaccactttagcaaagggcaaaataatcgaaatgatacaccaggatttcgccgaattaggctacatcgtcaaaagagaaatcctcaacgcagccaatttcggagtgccacagctgcgccaaagagtattcatcgccggcgtcaggaatgacattgatttcgattttgaatttccggccaaaacgcacaactccaacggcactgacggcctccaaaaatgggttggctccggcgaggcattagctgcattacctgacccggacaaaccacacaaaatacacaaccacagctattcaaaatacaagctaagattcaatagatacttggggcatagaacaattgaccctctcaaacctgcgcctaccggtgaccgccagaggcgacgaacggggcggagtcgtcgtaactccatcatcccaacaaccttcgacgcatgtcctgccgggagcttgcaaccttacaaggcttcccattga

SEQ ID NO: 74516 - protein, 271 aa, Unknown
  Obtained from environmental sample
  DOMAIN (1)...(271): C-5 cytosine-specific DNA methylase
  misc_feature (1)..(271): Xaa is any amino acid
MKVVSLFSGAGGFDLGFTQAGHEIVWANDIYLDAIETYKLNLGNHIQCKKIETVKGEDVPDCDIIIGGFPCQGFSIANTKRHTDDERNKLYLELVRIIKYKRPMFFLAENVKGITTLAKGKIIEMIHQDFAELGYIVKREILNAANFGVPQLRQRVFIAGVRNDIDFDFEFPAKTHNSNGTDGLQKWVGSGEALAALPDPDKPHKIHNHSYSKYKLRFNRYLGHRTIDPLKPAPTGDRQRRRTGRSRRNSIIPTTFDACPAGSLQPYKASH

SEQ ID NO: 74517 - DNA, 303 bp, Unknown
  Obtained from environmental sample
  misc_feature (1)..(303): n is a, c, g, or t
ttgaatgcgtacggccgctgcatcatcactgatgtcacgctccccgaagtcttagaggcggcgcacatcaagccagtcaagtacaatggcgaagacacagttgcaaatggatttcttatgaggatggacatccatttgttgtttgacgcaggacatctgcggatctccgattcaggcttattagaactttctttccgggcaagacaagactatggagcatctattcgcccagcaattcatctgcctgacactgtaaataaagaattcctgaaatggcggtggaacaactacaacggattctga

SEQ ID NO: 74518 - protein, 100 aa, Unknown
  Obtained from environmental sample
  misc_feature (1)..(100): Xaa is any amino acid
MNAYGRCIITDVTLPEVLEAAHIKPVKYNGEDTVANGFLMRMDIHLLFDAGHLRISDSGLLELSFRARQDYGASIRPAIHLPDTVNKEFLKWRWNNYNGF

SEQ ID NO: 74519 - DNA, 672 bp, Unknown
  Obtained from environmental sample
  misc_feature (1)..(672): n is a, c, g, or t
ttgggaggcttcgacatgaggagagatttttatcatcatcttgaggatgagatcaatacgcttaaacaaaagggtacttataaaaactttaagtataataccaatgccctcaagggtaaaataaatgtcgaaggttttggcgagcaaattgtactttgttcgaataactatatcggcctggcaaataatcccgaaataatcaaagctgcccacgaatcgctggatcagtacggggcaggcgccagcagcgtgcgttttatctgcggaacctacgatattcaccgtttgttagaagaaaaaaccgcgaagttcctgggtatggaagccgcgttaacctacacttcctgctgggcggcaaataccgcctgtattcccgcgcttcttggtgaaaacgacgcggtaatttccgacgcgctgaaccacgcaagtataatcgacggctgccgggcagtggcaaaaggtgtgacgcggtctgtgtatgcccattctgatatgaaagccctggaagaaaaactcattgaaacaaaagactgcggcgcggtattggtagtaaccgacggcgtgttctccatggaaggggatattgccaattgccggagatcatcgggctttgcaaaaatacaatgccctgctcatggtggacgacagccacgcgacaggggtcattggtaa

SEQ ID NO: 74520 - protein, 223 aa, Unknown
  Obtained from environmental sample
  misc_feature (1)..(223): Xaa is any amino acid
MGGFDMRRDFYHHLEDEINTLKQKGTYKNFKYNTNALKGKINVEGFGEQIVLCSNNYIGLANNPEIIKAAHESLDQYGAGASSVRFICGTYDIHRLLEEKTAKFLGMEAALTYTSCWAANTACIPALLGENDAVISDALNHASIIDGCRAVAKGVTRSVYAHSDMKALEEKLIETKDCGAVLVVTDGVFSMEGDIANCRRSSGFAKIQCPAHGGRQPRDRGHW

SEQ ID NO: 74521 - DNA, 873 bp, Unknown
  Obtained from environmental sample
  misc_feature (1)..(873): n is a, c, g, or t
atgatgcgtcccgatgtctatgacttgacggcctatgcttcctccaggggcctgcgctgcgtgttttcgcccaacggcacgctgatcgacgcggacaacgccgcgcgcctcaaggcatccggcgtgcagcgctgctccatttccatagacggggccgatgccgcaagccacgatgcctttcgcggcgtgcccggcgcctttgacgcttccatgcgcggcattgcccatctgcaacaggccggactggagttccagatcaacaccacggtcacgcgcgacaatctggcaagcttcaaaagcatcttcgaactgtgcgaacgcaccggcgccaaggcttggcacatctttctgctcgtgcccacgggccgggccgccgggcttgcggatcagatcatcaccgccggggaatacgaagaaacgctgaactggttctatgaattccgcaagcacagttccatgcatctcaaggccacctgcgcgccgcactattaccgcatcatgcgccggcgcgcccgtgaagagggcgtcgcggtcacggcggaaaatttcggcatggatgccatgacgcgcggctgcctgggcggcacgggcttctgcttcatcagccatgtggggcagttgcagccctgcggctatctggcgctggactgcggcaacgtgcgcgcaacgcctttcccggaactgtggcgcacgactccgcactttcaggagttccgcacccaatccgcatacaagggcaagtgcggggtatgcgaataccacaaggtctgcggcggctgccgcgcccgggcctacagcatggacggcgaccacatgggccctgaacccctgtgcgcctatgaaccggcacgggaaagagcgccctcacgctga

SEQ ID NO: 74522 - protein, 290 aa, Unknown
  Obtained from environmental sample
  misc_feature (1)..(290): Xaa is any amino acid
MMRPDVYDLTAYASSRGLRCVFSPNGTLIDADNAARLKASGVQRCSISIDGADAASHDAFRGVPGAFDASMRGIAHLQQAGLEFQINTTVTRDNLASFKSIFELCERTGAKAWHIFLLVPTGRAAGLADQIITAGEYEETLNWFYEFRKHSSMHLKATCAPHYYRIMRRRAREEGVAVTAENFGMDAMTRGCLGGTGFCFISHVGQLQPCGYLALDCGNVRATPFPELWRTTPHFQEFRTQSAYKGKCGVCEYHKVCGGCRARAYSMDGDHMGPEPLCAYEPARERAPSR

SEQ ID NO: 74523 - DNA, 750 bp, Unknown
  Obtained from environmental sample
  misc_feature (1)..(750): n is a, c, g, or t
gtggtggcgtatcattttgtttcgttggttgctgatatgattagattaagcacaaggggcgtctcaatgattccaacgggccaactgaacagcgaccgcaaaaagtcgacttttctggatgacctaccagaggtcgaaagcaaattattggtcagtgccagtgaaatgcgctcatattccgacagggaagtggttttcgccatgggggacgagttgcatgggatgtatgtcgtttcaacaggtgcgctaaagataaccaggactgcattaaaggatagcttccaagtgctggatatgatactgcctggccagtgcataggcgaggctcaggttttcacgggatgcacatcggcctcaagggccgaagcccatgggcatacagagtgctggttcgtccccgctgaggtgcttcgcaagatagtttatgaaagctccatcgtctcggaaaccatcattaagcatttggcggggaagatgctgcatcttgtgtccttggtggagactctaagcctgcggactgtgccagagagggtggcgcagatggtgctaagccatgcaaaaaaactagcagacgctcagccaacggaatttctggaaacacaggaggaactgtcacgctacattgggtgcagccgtgaggcctttaacagagcgttgaagcatttggccgatatgggtttcatccaaaatgcatacccagtaattcgcattctagatcgcgatggtctccatggatattccaagtgttga

SEQ ID NO: 74524 - protein, 249 aa, Unknown
  Obtained from environmental sample
  DOMAIN (56)...(146): Cyclic nucleotide-binding domain
  misc_feature (1)..(249): Xaa is any amino acid
MVAYHFVSLVADMIRLSTRGVSMIPTGQLNSDRKKSTFLDDLPEVESKLLVSASEMRSYSDREVVFAMGDELHGMYVVSTGALKITRTALKDSFQVLDMILPGQCIGEAQVFTGCTSASRAEAHGHTECWFVPAEVLRKIVYESSIVSETIIKHLAGKMLHLVSLVETLSLRTVPERVAQMVLSHAKKLADAQPTEFLETQEELSRYIGCSREAFNRALKHLADMGFIQNAYPVIRILDRDGLHGYSKC

SEQ ID NO: 74525 - DNA, 312 bp, Unknown
  Obtained from environmental sample
  misc_feature (1)..(312): n is a, c, g, or t
atgaacaccgtactttttaccatgttcgccctgtttcaattattcaacgcctttaattgccgggagcttcataccgacagcatattcaaacatttatttaaaaataaaacgatgctggcaatcacagggtgcactttcattttacagatactttttatccagtacgcggacgagtttttcaacactgtccctctgccgctttcattgtggctcacgctttttgcggttacattcagcgtgattgttgtatcggaatcggcaaaattggtttatagatgttctcacaaacctatttcgactttgcggccctga

SEQ ID NO: 74526 - protein, 103 aa, Unknown
  Obtained from environmental sample
  DOMAIN (1)...(94): Cation transporting ATPase, C-terminus
  misc_feature (1)..(103): Xaa is any amino acid
MNTVLFTMFALFQLFNAFNCRELHTDSIFKHLFKNKTMLAITGCTFILQILFIQYADEFFNTVPLPLSLWLTLFAVTFSVIVVSESAKLVYRCSHKPISTLRP

SEQ ID NO: 74527 - DNA, 666 bp, Unknown
  Obtained from environmental sample
  misc_feature (1)..(666): n is a, c, g, or t
atgaagggatgttataaatcatggtactttaggcgggaaggttattttcaccaggagtgcggaatttgcgggaatgtgcttattgatcccgaagaagcctggtatggcctcttcggagaatgtaaggaagcattgaccaaaggagctttggtcaatgaaactgcggaagttccgattacccgctgtgatctgtgcggacgccgtcttatttccgaaaacgagcgctgtatgtcctgcaggcataatgcggaaaccgaactgcctttttacgatcgaatggccgccctttttccttatcacggaaaatatcagaaactccttagggctttcaaatttgaaaattccttaggggtcggtcattttgttgcaaattgcctgattcagggcatgaaactcctccccttggaagagatgggtaatcccgtactgatacccgttccccctcgggcgggaaaaatccgcaaaactgggtgggatcagatagcggctttatcaaagcttttgaaacaaaggccggactcgcttaaatcgtgtccatgccttaaaagtcatgcttgtcaaacccaaaaaaaactgtaccacacaggatcgctaaacaaacctcaaaggccgtatcctcgtaaaggccaaggttccaaaataatggtatctttcctgataatatga

SEQ ID NO: 74528 - protein, 221 aa, Unknown
  Obtained from environmental sample
  misc_feature (1)..(221): Xaa is any amino acid
MKGCYKSWYFRREGYFHQECGICGNVLIDPEEAWYGLFGECKEALTKGALVNETAEVPITRCDLCGRRLISENERCMSCRHNAETELPFYDRMAALFPYHGKYQKLLRAFKFENSLGVGHFVANCLIQGMKLLPLEEMGNPVLIPVPPRAGKIRKTGWDQIAALSKLLKQRPDSLKSCPCLKSHACQTQKKLYHTGSLNKPQRPYPRKGQGSKIMVSFLII

SEQ ID NO: 74529 - DNA, 927 bp, Unknown
  Obtained from environmental sample
  misc_feature (1)..(927): n is a, c, g, or t
ttgattcatggaaatctgacgcctgaaagcgttttgctgttcagaaactccgaaggccgcatagttccgtttctcagggatttcagactgtcatgccgcgcggatcattacgatggtttccgcagccgtgagtcgatatgttacgcggctcccgaacttttgcttgaaggcgcaggcgtcccgcctgcgagaagcaaagagacggatttttatgctctcggcgtattgctgtatcaggctctggctcgccggctgccgtttgagaacggcgataccgattttctcattcagaaacagatacatggaaacattgatctttgtccggtggaacggttagacggcggaaaaagcgtcgtaccgctgctggaacggcttcttgaaaaggatccggaaaagcgtatcagctccgtcgatgaagctctggcgcttctgccgccgcgaatctgccgtgattttgatttgtccggcggggataagtccgggcgcttttcggcggcgccgtttgttgagcgggaaaaggaaatgcacctgctgcgtgaacgtgccgggcgcgtgaaggcaggcggccgcgggtggacggcttttatcgccggtgaaaccggctcaggcaaaacgcgctgtatggaagaattgcgcggatgggcgctggcgaatggctggagagtcgtggaaggcgtcttttcagccgatgtagaatccacttatgctccatttatgcggatgcttgggaaaacggatttttataaaaaagaaacctgttcattttccggttccgacgacatttcattagccgccgaatctgatttatccgcggacggatttgcgtccgaacggtttcatgaccgactgacgcgcgaacttgtgcgatatttatccatccgtcctactcttttgcttttgcacgatattcatggggctgacccgtga

SEQ ID NO: 74530 - protein, 308 aa, Unknown
  Obtained from environmental sample
  misc_feature (1)..(308): Xaa is any amino acid
MIHGNLTPESVLLFRNSEGRIVPFLRDFRLSCRADHYDGFRSRESICYAAPELLLEGAGVPPARSKETDFYALGVLLYQALARRLPFENGDTDFLIQKQIHGNIDLCPVERLDGGKSVVPLLERLLEKDPEKRISSVDEALALLPPRICRDFDLSGGDKSGRFSAAPFVEREKEMHLLRERAGRVKAGGRGWTAFIAGETGSGKTRCMEELRGWALANGWRVVEGVFSADVESTYAPFMRMLGKTDFYKKETCSFSGSDDISLAAESDLSADGFASERFHDRLTRELVRYLSIRPTLLLLHDIHGADP

SEQ ID NO: 74531 - DNA, 957 bp, Unknown
  Obtained from environmental sample
  misc_feature (1)..(957): n is a, c, g, or t
atgtccggtgtgagggttgatttgatccgccaccaagtgagggcgcctctatttgcgtngcggtcgccgatttcgaacggctgcctgcttgccgatgaggtcggactgggtaagactatcgaagccggactcgtcttggcgcaggcttgggcagagcgcaaacagcgcattctgctcattatgccggcttccttgcgcatccagtggaaaacggaattggaagagaagttcaatataccctgcgcaattattgaacgccccaaaactcgaaaaggcgcggttgcgacgccgaatttattctctcaagccgtgcaagacagaaaggtcgcgatatgctcgtatgagttcgccgcaaagtacagcgtcggcgttggcggcataccgtgggacttggtcatactcgacgaggcgcataggcttcgcaatgtctataagaagacgggcggcaaccgcgccaaggagataaaacaggcgttggccggcagaaaaaaactgctccttacggcgacgccgcttcagaacaaccttaaagagatgtacgggctgaccaccatcatcgacgagcatctgttcggcgacgacgcggtctttgcggccacgcccatacccgagctgcgctcgcgccttcggaacttctgcaagcgcactctgcgcaaagacgtggcccataccggctacatcaagttcacccgccggcaggttatcactaggccgtatacgcccggcgatacggagcaggagctttacgaccgtatgtcggagtacctgcggcgcgaccgtatcaacgccttgccggacaacgggcggcagcttgtcgcgatgatcatccgcaaacttctcgcctcgtcttcggcggctatctctcacacgctgcaatcgctgatctacaaactggaggcattgcttagaagctgcgacgataacctgaaaacgatctctctnctcggccgattctga

SEQ ID NO: 74532 - protein, 318 aa, Unknown
  Obtained from environmental sample
  DOMAIN (11)...(286): SNF2 family N-terminal domain
  misc_feature (1)..(318): Xaa is any amino acid
MSGVRVDLIRHQVRAPLFAXRSPISNGCLLADEVGLGKTIEAGLVLAQAWAERKQRILLIMPASLRIQWKTELEEKFNIPCAIIERPKTRKGAVATPNLFSQAVQDRKVAICSYEFAAKYSVGVGGIPWDLVILDEAHRLRNVYKKTGGNRAKEIKQALAGRKKLLLTATPLQNNLKEMYGLTTIIDEHLFGDDAVFAATPIPELRSRLRNFCKRTLRKDVAHTGYIKFTRRQVITRPYTPGDTEQELYDRMSEYLRRDRINALPDNGRQLVAMIIRKLLASSSAAISHTLQSLIYKLEALLRSCDDNLKTISLLGRF

SEQ ID NO: 74533 - DNA, 852 bp, Unknown
  Obtained from environmental sample
  misc_feature (1)..(852): n is a, c, g, or t
atgacatcggacgtggacggcggcgccctttatatagcgagcggtggaacacacagtacaaatctggattacctttataataccgccgcgggatcgggcggcgccatatacagtaccggcagcattaacaagcacggcggaaatttcatcggaaatgtcgcgggggcaaacggcggcgcgatatacagcaacgggacagatccatcaaccggcggcacggcgacgattatatattccggcgcgcaatcgatgaccttttcgggcaatgtcgcgggcggactcggcggcgcgatatataacgagggatatatggaattgagttccgccctcggcgcaaatatgatatttacaaataacagtgacagtcaaggcgcaaacgacatatacaacgccggtaccataaggctggtttcaaccggcggacttttcatcatagacagcggaatcgccggaacggcggacgcgattctctccaaggaaagccccgcgatattcgtgcttaccggcgataattccagataccttggaacattcaatcaatcaaacggcatagtcgaagcccgcgcccaattcttcggtggccaaagcaatatcatcgccggaatagtaaactggcgcccgggcgcgacaaaggcggacgacgcgatattgagaatcggaacagatgaagaaaatccggcaagcggcacgataaacatattcggaaagctgactctggcgaatacctcggacatgatcgccacgggggcaaccctgaatctctttccgggcggcgttctggaaataaatggcgcaaccgttcatatagattcgaacgacatgatcggctctggcaacataaaacaaatttga

SEQ ID NO: 74534 - protein, 283 aa, Unknown
  Obtained from environmental sample
  misc_feature (1)..(283): Xaa is any amino acid
MTSDVDGGALYIASGGTHSTNLDYLYNTAAGSGGAIYSTGSINKHGGNFIGNVAGANGGAIYSNGTDPSTGGTATIIYSGAQSMTFSGNVAGGLGGAIYNEGYMELSSALGANMIFTNNSDSQGANDIYNAGTIRLVSTGGLFIIDSGIAGTADAILSKESPAIFVLTGDNSRYLGTFNQSNGIVEARAQFFGGQSNIIAGIVNWRPGATKADDAILRIGTDEENPASGTINIFGKLTLANTSDMIATGATLNLFPGGVLEINGATVHIDSNDMIGSGNIKQI

SEQ ID NO: 74535 - DNA, 636 bp, Unknown
  Obtained from environmental sample
  misc_feature (1)..(636): n is a, c, g, or t
ttgaatatggattgggcatactcggctggatcggatattcgacttctgtggatgccaaggcctcgcttttacagggcgacgatattaccggatttaccggccgcctcggaatttcatacagattctgacagtgtgtcattgcgaggagccgcaaagcggcgacgcggcaatcctgtcgaacaagtcgataataattatattgcaatccgccccgtatttttctacaatacgcgcatgaaaaaatataacatagcgatcgtcggcgcaaccggcgcggtgggcgtggaaatgctaaaaatgctcatcgataggaattttccgattggcgcactgcgcctcttcgcctctgaaagatcggccggcaaacaaatcaacggaattacagtagaggccttgaaaccggacggcggcaagggaatggacatcgccctcttttccgcgggcggcgacatatcgcgcgaattcgcgcccctgttcgccaaggacggctgcacggttattgataattccagcgcgtggcgaatggatccaagtatcccgctgatagttcccgaggtcaacccgaacgccatgacgccctcgcataaaatcatcgcgaatccaaattgctcgacgatccagatggtcgttgcgtga

SEQ ID NO: 74536 - protein, 211 aa, Unknown
  Obtained from environmental sample
  DOMAIN (83)...(194): Semialdehyde dehydrogenase, NAD binding domain
  misc_feature (1)..(211): Xaa is any amino acid
MNMDWAYSAGSDIRLLWMPRPRFYRATILPDLPAASEFHTDSDSVSLRGAAKRRRGNPVEQVDNNYIAIRPVFFYNTRMKKYNIAIVGATGAVGVEMLKMLIDRNFPIGALRLFASERSAGKQINGITVEALKPDGGKGMDIALFSAGGDISREFAPLFAKDGCTVIDNSSAWRMDPSIPLIVPEVNPNAMTPSHKIIANPNCSTIQMVVA

SEQ ID NO: 74537 - DNA, 951 bp, Unknown
  Obtained from environmental sample
  misc_feature (1)..(951): n is a, c, g, or t
atgaataagattagcatccccgaggttgtattttttcaagaaggcccaggtgttagaaattctcaatataggaatgcaggtgtaaaactccttaatgttgcgaatctacaagatgggcaggtcgatttatccacgtccgagcgttttatttcgaccgatgaggcacagggtaagtataaacactttcttgtagacgagggcgattttattatcgcgagttcaggaataaaagtcgaatactttgataaaaaaatgggttttataaataaatcccatttaccgctttgcatgaacaccagtacaatacgattcaagccattagaaaccgcgaagattgatatgcgatattttatgtattgcttaaaatcagatttttttaaacatcaattgcaaaaacaaattaccggctctgcgcaattaaacttcggaccaagccacttaaaaaaaatgtttatcccatatatgtcgcttcccaaacaacaacgcatcgctgatgaattggacaccgtttgcgccgttttggcaaaactaaaacggcaatgcaaactctttggcgatttaataaaaagtaaattcaacgaaatgttctgcgttctcattaaaaatgataaagtatgggaaaagagaagcctaaacgatgtttttgagtttatacgaaatggagcanatatcaaacaggaaaaaaacataggcggattccctattacaagaatagaaactatatcaaaccaagaagttaatcgtgagaaacttggttatgctggggtaaatgatatatataaatataagaaatacattttacaaacgaacgacatactaatgtcccatattaacagcatcccacacctggggaaaacagcattgtacgaaaagcagaacaacgaaaaaaataattcatggcatgaatttggttgtgttttaggccccaaagaacaaaaggcagccatttaa

SEQ ID NO: 74538 - protein, 316 aa, Unknown
  Obtained from environmental sample
  DOMAIN (1)...(172): Type I restriction modification DNA specificity domain
  misc_feature (1)..(316): Xaa is any amino acid
MNKISIPEVVFFQEGPGVRNSQYRNAGVKLLNVANLQDGQVDLSTSERFISTDEAQGKYKHFLVDEGDFIIASSGIKVEYFDKKMGFINKSHLPLCMNTSTIRFKPLETAKIDMRYFMYCLKSDFFKHQLQKQITGSAQLNFGPSHLKKMFIPYMSLPKQQRIADELDTVCAVLAKLKRQCKLFGDLIKSKFNEMFCVLIKNDKVWEKRSLNDVFEFIRNGAXIKQEKNIGGFPITRIETISNQEVNREKLGYAGVNDIYKYKKYILQTNDILMSHINSIPHLGKTALYEKQNNEKNNSWHEFGCVLGPKEQKAAI

SEQ ID NO: 74539 - DNA, 516 bp, Unknown
  Obtained from environmental sample
  misc_feature (1)..(516): n is a, c, g, or t
ttgacaccgtacggtggtaatgacgcgggtttaagttttctgcctgatgttgacgatcaggttcttgttatatctatgggcgtaatggacgggcagaaagcgattataggctccgtttggtcaaatgaagtgtccgctccggaaacgggggaaaattccggcgcggactttaacggcgacggagaaaattccctgaaattttttaagagccgcgccggaagcatgttaatttttgacgatacggacggcgcggaaaaaacgcagttaatttccgctggaaaaaaatcacggcttgaattcagcgaggcggatgaattggtttcacttaacaccgagcaagatttgagtataggagcgaaaggcgctgttttaattaaggcggaagaagtatcgataacaagcaaaaaacaaatggatataagcgccgaggaatatcaggtagacgcaaaaaaaggtttggatataaattgcgacaaggatatcggaattaagggttcaggtgttgcccttaattag

SEQ ID NO: 74540 - protein, 171 aa, Unknown
  Obtained from environmental sample
  misc_feature (1)..(171): Xaa is any amino acid
MTPYGGNDAGLSFLPDVDDQVLVISMGVMDGQKAIIGSVWSNEVSAPETGENSGADFNGDGENSLKFFKSRAGSMLIFDDTDGAEKTQLISAGKKSRLEFSEADELVSLNTEQDLSIGAKGAVLIKAEEVSITSKKQMDISAEEYQVDAKKGLDINCDKDIGIKGSGVALN

SEQ ID NO: 74541 - DNA, 336 bp, Unknown
  Obtained from environmental sample
  misc_feature (1)..(336): n is a, c, g, or t
atgaaactcgaaaaagacgttacaaaaaaagccgtttcggagttaaaaagccttttgggtgagcggttgaggcaggtaatacttttcggttcgcgtgcgaggggtgattccgacgatgagtccgatgtggacataatggttttggcggatatagaccgtgagaagttaggcagataccgtccgcaggtagtgcggatttcaagcgatataggcttggacaacaatatttacgtatcgataatgctcgacagcgccgacttctttttcgcgaaccaaaacgtgtcgagtttttacagagatgtcgccaaagaagggaagatgctctacagtgtctga

SEQ ID NO: 74542 - protein, 111 aa, Unknown
  Obtained from environmental sample
  DOMAIN (4)...(108): Nucleotidyltransferase domain
  misc_feature (1)..(111): Xaa is any amino acid
MKLEKDVTKKAVSELKSLLGERLRQVILFGSRARGDSDDESDVDIMVLADIDREKLGRYRPQVVRISSDIGLDNNIYVSIMLDSADFFFANQNVSSFYRDVAKEGKMLYSV

SEQ ID NO: 74543 - DNA, 696 bp, Unknown
  Obtained from environmental sample
  misc_feature (1)..(696): n is a, c, g, or t
gtgcatgttgatcctgactcgccgtcccggcgaaagcctgtatgtgggcgacaatgtccgcatcaccatcctgagcttgcagggcaagcaggtgaggatcgggctgaatgtccccgaagacacggtcgtctatcgggaagaagtataccggcgcgtgacggaggaaaatcgcatggcgctgacaatcagcacggaagaccttttcggggcggcgcagatatggcacaagaaatagaaatcatgacccgtctgggcaggcatacgatcgatccggacaagatcatccactttccgcgcggcctgatgggctttgaaaaacaccacaatttcgcgctgctccagatcagttccggctcgccctttctcgtgctgcagagcatgagcgatccgaatctcggccttctggtggctgatccctacaccttcattcccggctacaatctgcgcgtgggcaacgcggaacaagccatgctgcgccttgatcatccgggacaggcggcgattctggtcacggccagcattccccacggcaaacccgaactggccacgctcagcctgaccgggcctatcctgatcaaccacgagcagcgtcttggtcttcaggtgccgcagtccgacagcgcctttccgccgcgctggcgcattcatgaagatggcgcgccggttgcgcctgtggaaccggcgcctgcaaagtga

SEQ ID NO: 74544 - protein, 231 aa, Unknown
  Obtained from environmental sample
  DOMAIN (93)...(218): Uncharacterized BCR, COG1699
  misc_feature (1)..(231): Xaa is any amino acid
MHVDPDSPSRRKPVCGRQCPHHHPELAGQAGEDRAECPRRHGRLSGRSIPARDGGKSHGADNQHGRPFRGGADMAQEIEIMTRLGRHTIDPDKIIHFPRGLMGFEKHHNFALLQISSGSPFLVLQSMSDPNLGLLVADPYTFIPGYNLRVGNAEQAMLRLDHPGQAAILVTASIPHGKPELATLSLTGPILINHEQRLGLQVPQSDSAFPPRWRIHEDGAPVAPVEPAPAK

SEQ ID NO: 74545 - DNA, 882 bp, Unknown
  Obtained from environmental sample
  misc_feature (1)..(882): n is a, c, g, or t
ttgatgagaaacgatttggaaaatgccataatgagatttcgcataagggcgttgagcattgctgagattatgttcagggataaaagcaatataattctgctgatagacgaagccgatgttttgctaaattgctttgagaaaggttttctgaacaaattgctggaagatatgcgtttgccaacgatttggataagcaatagcctgctcttcacccaacgctcaacgatgcggcgttttaattatagcatagaatttaaggcaaacagcccgtctgtgcggttaaggctttgggaaaacatcgtggaaaagcacaacgcaaccccacttttccctgccgagcgaatgaaaattttggcagaaaaatacgaagccgcaccgggcggaattgaactcgcggtgtctaacgaggttctgctcacaaaagctggcaaacaggggcaggtggcagaacttgtgctaaaacagcacacagagctactcgggtttgaaaataatcacaaaaacacgcaaacccgcgcaccgagatatgatgagagcgttttgaatgttcaaggaatggaaaaggcattatatgccgcaaaatgctatgcccagctcttaaaaaataaagaaacagaaagcaactgcacaatgcttttatacggcgcgcccggcactggcaaaacggaatttgcaaagtatttggcaaggataagcggtttgcagttcaaggagataagttatgggaaaatatcttctatgtttgttggacaaacggagaaaaaacttgcggcggcttttgaagatgcttccaaagagggtgctttgctctttatagacgaggcagacagcttgatttctgataggcgtagtgcaaatcactcttgggaaacacgcaggtga

SEQ ID NO: 74546 - protein, 293 aa, Unknown
  Obtained from environmental sample
  misc_feature (1)..(293): Xaa is any amino acid
MMRNDLENAIMRFRIRALSIAEIMFRDKSNIILLIDEADVLLNCFEKGFLNKLLEDMRLPTIWISNSLLFTQRSTMRRFNYSIEFKANSPSVRLRLWENIVEKHNATPLFPAERMKILAEKYEAAPGGIELAVSNEVLLTKAGKQGQVAELVLKQHTELLGFENNHKNTQTRAPRYDESVLNVQGMEKALYAAKCYAQLLKNKETESNCTMLLYGAPGTGKTEFAKYLARISGLQFKEISYGKISSMFVGQTEKKLAAAFEDASKEGALLFIDEADSLISDRRSANHSWETRR

SEQ ID NO: 74547 - DNA, 663 bp, Unknown
  Obtained from environmental sample
  misc_feature (1)..(663): n is a, c, g, or t
atggaggaggcccttaggctggtcaaggccgcgatagcctctggcctcaggatcaccacctgcatctatccgtattcctactgggccacgtacccaccgtcggagcgctttggccctgggtggcagcagcgctatggcatcacctattccgacctcaccgtagtcggcaccggggaaaagctgaccgaagccagctttgagaagtaccgcaagatgtggaatgtcctggtggctgtccccgaaggcaccatgccgatggacaaaacggttgacctggcgctgcgggaggatttttgcatgataggctccgacggcggcatagagggcgagccaagggccaacagccacccaaggggggccggctgcttcgccacggcgctgcggcacgggatgggcattggcattccacttgaaaaaatgatcgaaaagatgacttcacttccaagaagcgtcctgctgccggccatgaagcaaaggggcgtcctggagaagggggccattgccgacctagtggtgttcgaccctgagacagtgcgcagccccgcaagcgtcgaaaacccaaaccagttttcgattgggatagacacggtcatcgtcagcggtcagatagcctatagggccggcaagctactggcaaaggcgggaaagcctatcagggcctga

SEQ ID NO: 74548 - protein, 220 aa, Unknown
  Obtained from environmental sample
  DOMAIN (175)...(220): D-aminoacylase, C-terminal region
  misc_feature (1)..(220): Xaa is any amino acid
MEEALRLVKAAIASGLRITTCIYPYSYWATYPPSERFGPGWQQRYGITYSDLTVVGTGEKLTEASFEKYRKMWNVLVAVPEGTMPMDKTVDLALREDFCMIGSDGGIEGEPRANSHPRGAGCFATALRHGMGIGIPLEKMIEKMTSLPRSVLLPAMKQRGVLEKGAIADLVVFDPETVRSPASVENPNQFSIGIDTVIVSGQIAYRAGKLLAKAGKPIRA

SEQ ID NO: 74549 - DNA, 606 bp, Unknown
  Obtained from environmental sample
  misc_feature (1)..(606): n is a, c, g, or t
atgaaagtcaatgtgaccagagcggaggagctgaagacaaatctgaatgaagctcaagcgtacacgatcaaagctggggctaaagcattctcagtcctgagtcagaaactctacaagaatccaatcagagcgatcgtgagggagctgtcatgcaacgcgattgatgctcactccgcgaatggcaactcaaatccgttcaaggtttcatttccaaccgcattcagtccggaattttcagttgaggattttggaattggaatgagcagagaggaaatggcagaggtttatcactcgtacttcaattcaacgaaggaggattcagactccatgatcggtggattcggaatagggagcaaaacccctttcgcctactctccctccttcagcgtcaggtcaatcaaggatggaattgaaacaatctcaatgaattttttggatgatgagagggttccgaggtttcagctcctcgagagcaatccaactgacaaacccagtggaacgaaggtttggtttcaggtgaatcaatccgattgcaaggaattcttcagagaagcatacaaagttttcatgtttttgaaacagtgccggaaattgcgtcgggcctga

SEQ ID NO: 74550 - protein, 201 aa, Unknown
  Obtained from environmental sample
  misc_feature (1)..(201): Xaa is any amino acid
MKVNVTRAEELKTNLNEAQAYTIKAGAKAFSVLSQKLYKNPIRAIVRELSCNAIDAHSANGNSNPFKVSFPTAFSPEFSVEDFGIGMSREEMAEVYHSYFNSTKEDSDSMIGGFGIGSKTPFAYSPSFSVRSIKDGIETISMNFLDDERVPRFQLLESNPTDKPSGTKVWFQVNQSDCKEFFREAYKVFMFLKQCRKLRRA

SEQ ID NO: 74551 - DNA, 498 bp, Unknown
  Obtained from environmental sample
  misc_feature (1)..(498): n is a, c, g, or t
ttggatatgttgaccgaagtcggcgcgaaagcagtgataatcggacacagtgaacgccgtacactgtttggtgaaaccgacgaatttatcaatacaaaggtcatcaccgcgctcgcgtccggattcaccgcgattttgtgcgtgggcgaaacgcttgacgaacgaaagggcgaaaaaaccaacgcggttttgaaaaaacaaattaccgccgcccttgccaataccaaatcgctggataaattaattgttgcctatgaacccgtttgggcaatcggcacggggttggttgcaactcccgcgcaaatcgccgaagcgcacgcctttattaaaaagcaactcgccgaaatcgccgataccaaaatcccagtattgtacggtgggagcgcaaacgaaaaaaacgccgccgaaattttcgcaattgaaaacgtggacggcgcattggtcggcggggcgtcgctcgaccccaccaaatttgccactatggtgaacttgaaataa

SEQ ID NO: 74552 - protein, 165 aa, Unknown
  Obtained from environmental sample
  DOMAIN (1)...(162): Triosephosphate isomerase
  misc_feature (1)..(165): Xaa is any amino acid
MDMLTEVGAKAVIIGHSERRTLFGETDEFINTKVITALASGFTAILCVGETLDERKGEKTNAVLKKQITAALANTKSLDKLIVAYEPVWAIGTGLVATPAQIAEAHAFIKKQLAEIADTKIPVLYGGSANEKNAAEIFAIENVDGALVGGASLDPTKFATMVNLK

SEQ ID NO: 74553 - DNA, 477 bp, Unknown
  Obtained from environmental sample
  misc_feature (1)..(477): n is a, c, g, or t
atgcccgcaaataatgtcgcaatgaacccatttaccgcccagtcaacgcctgtgccgcaaaacttccttaattggaaacaaatgtacccaaagccgtacaacaaaaacaaggtcgacccatttacaaagacccgcataattttggcggagggcgcggaatttgaagccgtttggtttttgcaccaattcgcgcgtaattgcaacgataataacttgcgccgcgaagtcgccatgattcgcaatcaggaatcccaacaacaaaaacgtatcggcgcattaaagccgctcgatgaaaactttttggaaaccactatttcatatgaacaattggcaatcgaattgacttctattcttgcccttcatgaaaaggacaaaaataatatcgccgcattgaaccttgcgttgttggaggactttgaccacctgtatcgttttgcaaatctccttaaaaaggactttggtattgaatcccgataa

SEQ ID NO: 74554 - protein, 158 aa, Unknown
  Obtained from environmental sample
  misc_feature (1)..(158): Xaa is any amino acid
MPANNVAMNPFTAQSTPVPQNFLNWKQMYPKPYNKNKVDPFTKTRIILAEGAEFEAVWFLHQFARNCNDNNLRREVAMIRNQESQQQKRIGALKPLDENFLETTISYEQLAIELTSILALHEKDKNNIAALNLALLEDFDHLYRFANLLKKDFGIESR

SEQ ID NO: 74555 - DNA, 879 bp, Unknown
  Obtained from environmental sample
  misc_feature (1)..(879): n is a, c, g, or t
atgaatcctgaccgcctggttgacgcctaccgccgcatccgtaacacctgccgctatctgctcggcaacctgtacgacttcacgcccgatcaggctgtggcccgcgaggacatggacccgctggacctttatgctctggacgcgaccgcccgcgcctgccggcgcatccagcaggcctacgcggattttgagttccacaaggtctatcatacgctgcacaaccattgcgtgacggatttgagcgccctgtatctggatatcctcaaagaccgtctctatgcctcgtcagcggacagccgggaacgccgctcggcccagaccgccctgtggcgcattctcatgctgcttctgcgcggcatggcgcctattttgagtttcaccgccgaagaagcggcgggttatctgccgcaagctctgcgtccgcagggggtgtccacgatttttgccctgcccccgctggacgacgcgcagttggagggtatgctgcttgacgaggcaacgctggagcgctgggcggccctgctccaggtgcgcgccgccttgatccgcgccatcgaacccctgcgcaagtcaggagtcgtcggccttacgctggatacgcgcgcgtgtttgtatctgcaaccggaactcagggccgttctggaaagtttgggcgcggatctgcgcgccgtatgcatggtgtcgcaactggagctgtacccgctggatgcggccccgcagcatgcggtacgggacgaggaggtccccggtctggctttcaccgtggagaaggcatccggcggcaaatgccggcgttgctggctgtacagccaggaactcgggacgcttccggcccatccggaactgtgcccgcgttgcgccggggtactgcaaagctag

SEQ ID NO: 74556 - protein, 292 aa, Unknown
  Obtained from environmental sample
  DOMAIN (260)...(289): Zinc finger found in FPG and IleRS
  misc_feature (1)..(292): Xaa is any amino acid
MNPDRLVDAYRRIRNTCRYLLGNLYDFTPDQAVAREDMDPLDLYALDATARACRRIQQAYADFEFHKVYHTLHNHCVTDLSALYLDILKDRLYASSADSRERRSAQTALWRILMLLLRGMAPILSFTAEEAAGYLPQALRPQGVSTIFALPPLDDAQLEGMLLDEATLERWAALLQVRAALIRAIEPLRKSGVVGLTLDTRACLYLQPELRAVLESLGADLRAVCMVSQLELYPLDAAPQHAVRDEEVPGLAFTVEKASGGKCRRCWLYSQELGTLPAHPELCPRCAGVLQS

SEQ ID NO: 74557 - DNA, 570 bp, Unknown
  Obtained from environmental sample
  misc_feature (1)..(570): n is a, c, g, or t
atgatcagatggccgaggcactctcttgacgggaatcgacaggaagccgcgctgatcgaggcggcgcgcgccaatgcctgcatgctcggccttggggatcgcgtggttttcgcgcgggacgatgtggcggacgcaagcctgcctgcccgcctggggcgcgagagttgcgaactcgtcaccgccaatcccccctaccgcatctccggcacgggacgacgcatcagttcccccgtccgccaaaaagccctggaagcgccgcagggcgcgcttgcggactttgcccgcgccgcggcttctctgttgcgccaccacggacgtttcgcctgcgtgctgccgcccgcgcggctcactgacgcattcgccgctttgcgcgccgcgcggctggagccgcgccgcctgcgctgcgtatatccccgtcaaggatcgaaggccggtcgcgtgctgctggaagcccggaaaaacgcccggccggatctggcgatcgaagcgccgctcatcctccatccagacgcgcgcggggcaaaattcagcccggaagcgtcggccttctgcccttggctggacgcgtaa

SEQ ID NO: 74558 - protein, 189 aa, Unknown
  Obtained from environmental sample
  misc_feature (1)..(189): Xaa is any amino acid
MIRWPRHSLDGNRQEAALIEAARANACMLGLGDRVVFARDDVADASLPARLGRESCELVTANPPYRISGTGRRISSPVRQKALEAPQGALADFARAAASLLRHHGRFACVLPPARLTDAFAALRAARLEPRRLRCVYPRQGSKAGRVLLEARKNARPDLAIEAPLILHPDARGAKFSPEASAFCPWLDA

SEQ ID NO: 74559 - DNA, 345 bp, Unknown
  Obtained from environmental sample
  misc_feature (1)..(345): n is a, c, g, or t
atggcaagctacacgccccgcaaataccaggaggctctgcgctcgttcacggatttcacgaaaacctacgcgagccacaagcaggcgcccaacgcctggttttttacgggagagtccaacttccaactgaaccaattcggccccgcggcactggcgtatgagacggtcatcaccaagtacggctccaatccgagagcccccgcggcctatctgaaacaagctcttgccttcagcaagctgggccagaaggacgccgccgatgcccgcctgaaagatctgatccgtaaatttcccaacagcccggaggcagcgcgggccaagcagattgcgccgcaaatccgctaa

SEQ ID NO: 74560 - protein, 114 aa, Unknown
  Obtained from environmental sample
  misc_feature (1)..(114): Xaa is any amino acid
MASYTPRKYQEALRSFTDFTKTYASHKQAPNAWFFTGESNFQLNQFGPAALAYETVITKYGSNPRAPAAYLKQALAFSKLGQKDAADARLKDLIRKFPNSPEAARAKQIAPQIR

SEQ ID NO: 74561 - DNA, 750 bp, Unknown
  Obtained from environmental sample
  misc_feature (1)..(750): n is a, c, g, or t
gtggagacacgggttaactatgttgatcttacaacggtaataaacgcgcccgtaaccggagatacaccccagtcatctcttgctcccctgcagcagtacactggaaccattacatggtcacctacgggcacatttgcggccgaaaccccatacaccgcgaccgtcaacctgacggtacaggacggctggacatttactggagtgggggcgaactcctttatttataccggggcaacggtcaccaatccagccggcagcgggagaactctgtctgttaccatagtattccccgcaaccggagcggcaccaagatatggaatttccctttcaccaggcgatgttttatttgataccaagccggttggctatactccccagacaactgagataacagtcaccaataccggcaatcaggcgaccggcaaccttaccgtttctaacctgggcgatttcaatgtgacgccgacaacaattaccgatatacccgttggcggtcaagccacatttactgtgagccccaaatccggccttccagcaaaagatgatgactactcctcaaccatcaccgtggctggaggtaatggcataaacaaagggcttacggtaaaattcagggtgaccccagctataatctacgttaccgggagcggtttggagttttcggccagagaaggcgatggtgccccgttttcggagggtgccacaatacaatccactatgacgcaatcagaagccgcggcaatgtcctga

SEQ ID NO: 74562 - protein, 249 aa, Unknown
  Obtained from environmental sample
  misc_feature (1)..(249): Xaa is any amino acid
METRVNYVDLTTVINAPVTGDTPQSSLAPLQQYTGTITWSPTGTFAAETPYTATVNLTVQDGWTFTGVGANSFIYTGATVTNPAGSGRTLSVTIVFPATGAAPRYGISLSPGDVLFDTKPVGYTPQTTEITVTNTGNQATGNLTVSNLGDFNVTPTTITDIPVGGQATFTVSPKSGLPAKDDDYSSTITVAGGNGINKGLTVKFRVTPAIIYVTGSGLEFSAREGDGAPFSEGATIQSTMTQSEAAAMS

SEQ ID NO: 74563 - DNA, 639 bp, Unknown
  Obtained from environmental sample
  misc_feature (1)..(639): n is a, c, g, or t
atggccgagccctatgcctttgcggattggccttgtgtggcgattggggaccaggtatattatgcctctgtcagattggcaggcatgtacggggaagttgacggccgaaacggcggccttccgttcgagcaagcatcgaataagctgttgtcgatgaccaacttgtgcgatgaggacggtaatttgataccgatgatgaccgttacccaggccaattacctgaacgagaacggcatagggaccttcatcaacatggacggctggcgggcctggggtacagaaactaccgcatttcccggcaatacggatattaaagacttcgagcggagcgtccgccgtatgttctgccatactcaaaacgtcgtaaatcggactatgtggcaaaatgttgataggcccacaacacgactccttatagataggatattgttgactggaaacgaataccttaacacgttgcgaagtagaaacgctattatcggcggacgtgtggtgttcttacggcaagataataataaccaaagcattatgggcggaaagctgcttttccgcgtgttcttgacgcccccaaatgcggcccgagagcttgagtttaatttttcatacgacccaaattatcttgaaggtctatttgattaa

SEQ ID NO: 74564 - protein, 212 aa, Unknown
  Obtained from environmental sample
  misc_feature (1)..(212): Xaa is any amino acid
MAEPYAFADWPCVAIGDQVYYASVRLAGMYGEVDGRNGGLPFEQASNKLLSMTNLCDEDGNLIPMMTVTQANYLNENGIGTFINMDGWRAWGTETTAFPGNTDIKDFERSVRRMFCHTQNVVNRTMWQNVDRPTTRLLIDRILLTGNEYLNTLRSRNAIIGGRVVFLRQDNNNQSIMGGKLLFRVFLTPPNAARELEFNFSYDPNYLEGLFD

SEQ ID NO: 74565 - DNA, 750 bp, Unknown
  Obtained from environmental sample
  misc_feature (1)..(750): n is a, c, g, or t
gtgaacgacggttcgacggacaatacccccataattgccggaagattcccggtgaaaatcattaatcaggaaaaccgtggaattcctacggcccgcaacgccgggatgaattgcgccacgggagattacatacattttatggatgttgacgatttgattaacgttgagttttatgaaaaagctgcggcagccgcgcttgatgccgacgctgacatcgcatgcggcggaataatacacgaacggttacctgggctttcgatacattttagcgagaggtcggttgtttctcttacggaagacaagttgtttctcaccaatgtaagaaatcagggtatctgcggaaaatatcttttcagattgggctttttgaaatcaaacggcttgaaatttgacgaggaactacgcaatgctcaagacttggttttttcatttcagtccgtttatttcgctaacaaaatcgtatcggttccaaacgcggtctattatcacaaatgccgcaaaaattcggagactacctcaaaggaaagagatcatcgccgcaggaggcgccaatacgtgaaaagggcgaatcaaatttgcgaagaattcgcaaaacaacacggcatagaaacagtgtcgccgccgccgcaaacggtagaatacaaactgttcggtatcccgctgttgaaaaaacggattctcagcaaagggaaagaacgctggtatctgtttgggatctatctgttgcagcgaaagtacataaacggttag

SEQ ID NO: 74566 - protein, 249 aa, Unknown
  Obtained from environmental sample
  misc_feature (1)..(249): Xaa is any amino acid
MNDGSTDNTPIIAGRFPVKIINQENRGIPTARNAGMNCATGDYIHFMDVDDLINVEFYEKAAAAALDADADIACGGIIHERLPGLSIHFSERSVVSLTEDKLFLTNVRNQGICGKYLFRLGFLKSNGLKFDEELRNAQDLVFSFQSVYFANKIVSVPNAVYYHKCRKNSETTSKERDHRRRRRQYVKRANQICEEFAKQHGIETVSPPPQTVEYKLFGIPLLKKRILSKGKERWYLFGIYLLQRKYING

SEQ ID NO: 74567 - DNA, 588 bp, Unknown
  Obtained from environmental sample
  misc_feature (1)..(588): n is a, c, g, or t
gtggaatacacgccgtttcccggcaaacgggttcaattagacgcctacgatgactgcttagaaagacatcgttttgatacacgatggatagcgttcatagacgctgacgagttcatagtaccgttacaaaacgattctatcccggaatttcttaaaaattttgaagaattttccgcagttgaaatcaattggctttgctatgggtcaggcggcgcaaaaaaacgggagaccggcggcgtaatggaaagattccggacgcacgcggcactcgactatcaagacaatcgctacgttaaaagcatagtgaacccgcgccgtattatcaatttacccagcgtacacgaaccggcgtgcctttcaggtaaaatcgttgatacacacgggactattatcagccgagactataaggaccgtccgccgttattggataaaatccgaataaaccactattctataaaatcattggaagaatttttggaaaaacgctctcgcggcagagcatacagaggtacaacgcataagatggattatttttggaaacgcgataggaacgagataaaccctgacattgataataacactctttga

SEQ ID NO: 74568 - protein, 195 aa, Unknown
  Obtained from environmental sample
  misc_feature (1)..(195): Xaa is any amino acid
MEYTPFPGKRVQLDAYDDCLERHRFDTRWIAFIDADEFIVPLQNDSIPEFLKNFEEFSAVEINWLCYGSGGAKKRETGGVMERFRTHAALDYQDNRYVKSIVNPRRIINLPSVHEPACLSGKIVDTHGTIISRDYKDRPPLLDKIRINHYSIKSLEEFLEKRSRGRAYRGTTHKMDYFWKRDRNEINPDIDNNTL

SEQ ID NO: 74569 - DNA, 567 bp, Unknown
  Obtained from environmental sample
  misc_feature (1)..(567): n is a, c, g, or t
atgtcgctcacagagcgcaagccagccgttgaccgtaaaaacttctgcttctccgcaggaggaaccggcacaggattaaccagcgtatggctttttgaattcgggaaaaagggctttcattttatttatggcaagcacaccagccctggcctttccaacacagaccaaggaaagcacaaccgcctcgccccggacggcaaaggataccacgacgtgtgggtgcgccgttacgcgatcaacgcaggactggttgaaggaagcccccgagctttcatgcggatttgtaacatcgccgtagacccggacgatcccaaacactttgatcccaaattgctcataacaagctgtaagccctacctccccacccccggaggcggaaacgcggttttatttgtaccgccaaccgtttacggacaaattgaggcgctcgcatgggaaaaagggaatgtaaatgttaccgtttccgaagtggcaaactttggaactttagtaaaaatcgtaaacattcccgtcagaccgtgggacgcaatcagcgagaacgaaagcacagtacccgcagcggcgtag

SEQ ID NO: 74570 - protein, 188 aa, Unknown
  Obtained from environmental sample
  misc_feature (1)..(188): Xaa is any amino acid
MSLTERKPAVDRKNFCFSAGGTGTGLTSVWLFEFGKKGFHFIYGKHTSPGLSNTDQGKHNRLAPDGKGYHDVWVRRYAINAGLVEGSPRAFMRICNIAVDPDDPKHFDPKLLITSCKPYLPTPGGGNAVLFVPPTVYGQIEALAWEKGNVNVTVSEVANFGTLVKIVNIPVRPWDAISENESTVPAAA

SEQ ID NO: 74571 - DNA, 312 bp, Unknown
  Obtained from environmental sample
  misc_feature (1)..(312): n is a, c, g, or t
ttgagcaacagcattaaggcgtttaagaaagctaatccgaattactgggttgtggcaatgctgcattggggagaggaataccaaaaagaaccgagccagcggcaacgcgaggaggcttaccttttggtggattccggtgtggatgcgattataggtcaccatccgcacgtgattcaggacaaagagatatacaaagggaaacctattttttacagtttgggtaattttgtttttgaccaaaaggagagcgaccgctcgcccggtttggtggtgagcttatctttttctattttacaaatgtgtttggagtaa

SEQ ID NO: 74572 - protein, 103 aa, Unknown
  Obtained from environmental sample
  misc_feature (1)..(103): Xaa is any amino acid
MSNSIKAFKKANPNYWVVAMLHWGEEYQKEPSQRQREEAYLLVDSGVDAIIGHHPHVIQDKEIYKGKPIFYSLGNFVFDQKESDRSPGLVVSLSFSILQMCLE

SEQ ID NO: 74573 - DNA, 387 bp, Unknown
  Obtained from environmental sample
  misc_feature (1)..(387): n is a, c, g, or t
atggcgatagagtccgcccacatcaaaggcacggtcaaggaggtcggcgagaacggcacggtcaaggtgctgctgccggagtatggcaatttgctcaccgactggctgccggtgttgcagtctgcaacgctgggcgctaggacgtgggcggtgccccgcgtggacacgcaggtgatagtcctgccggggcttggcacagaggacgcggtcgtgcttggtgcaatctacagcgaccccgaccccgcgcccttcgaggacgcggccgttgtgggcgtcaaggccgacgacgacgttgtgatcacctacgaccccggcgcgtcaaccctgacaatcaaaagcccgaagctgataaagattgtcgccgaccagattgactcggccatctga

SEQ ID NO: 74574 - protein, 128 aa, Unknown
  Obtained from environmental sample
  DOMAIN (10)...(111): Phage-related baseplate assembly protein
  misc_feature (1)..(128): Xaa is any amino acid
MAIESAHIKGTVKEVGENGTVKVLLPEYGNLLTDWLPVLQSATLGARTWAVPRVDTQVIVLPGLGTEDAVVLGAIYSDPDPAPFEDAAVVGVKADDDVVITYDPGASTLTIKSPKLIKIVADQIDSAI

SEQ ID NO: 74575 - DNA, 336 bp, Unknown
  Obtained from environmental sample
  misc_feature (1)..(336): n is a, c, g, or t
atgacaggaaaagtatccatattaagcattgacggcggtggcatacgcgggataattccggcggttatcctcaaccacattgagaaagcgttgcagcgtcgtacaggcgataaggatgtaaccttggcagattatttcgatttgatagcaggcacaagtaccggaggtatacttgcctgctattttcttttaccaccactgcccggacaaacccgccacagccgcttttttgcggaaaacatcgggcagttgaaggatgcgggggaatgttttgtgaaggataatgtggaggtgttggaggggatagtagataaattgtttgaaccaggattttaa

SEQ ID NO: 74576 - protein, 111 aa, Unknown
  Obtained from environmental sample
  DOMAIN (8)...(107): Patatin-like phospholipase
  misc_feature (1)..(111): Xaa is any amino acid
MTGKVSILSIDGGGIRGIIPAVILNHIEKALQRRTGDKDVTLADYFDLIAGTSTGGILACYFLLPPLPGQTRHSRFFAENIGQLKDAGECFVKDNVEVLEGIVDKLFEPGF

SEQ ID NO: 74577 - DNA, 687 bp, Unknown
  Obtained from environmental sample
  misc_feature (1)..(687): n is a, c, g, or t
atgtgccaggacgaggagttcgacgaagaagccagccccctagtgacgggtcccatcccgatgaacagatggatatacagcacctccaagcagcttcttgaccgcgtcatctgggcgcacggcttccagaaagggctaaagttcacgctcttccgcccattcaactggatggggccaaagctggacagcctgaataccgcgaaggagggcagcagccgccttgtgacgcagttcagttggaatctctttaacggcgagcccctgaacttggtggacggcggccacgcccgcaggtgcttctgcgacgtgagcgacgccatggacggcctgatggccatcctgcgtaacgagggcggcaaggccgatggcaggatattcaacataggcaaccccgcaaacgacaggagcgtgcgcgagatagccgagctgatgatagggatttggaaggatcaccccttccgcaaggtgcgcggcctccctgagggcaggacaatcgagacgggcagcggcgagttctacggcaagggctaccaagacgtgatgcggcggacgcccagcatcagacggatgcaggagacattcggcttcagtcccaaggtcggcatgaaggaatcgctcgaaaaagccataaacttcttcgtggaagagcacaagtcgctggaaaaagtagtggagacagaaagctaa

SEQ ID NO: 74578 - protein, 228 aa, Unknown
  Obtained from environmental sample
  misc_feature (1)..(228): Xaa is any amino acid
MCQDEEFDEEASPLVTGPIPMNRWIYSTSKQLLDRVIWAHGFQKGLKFTLFRPFNWMGPKLDSLNTAKEGSSRLVTQFSWNLFNGEPLNLVDGGHARRCFCDVSDAMDGLMAILRNEGGKADGRIFNIGNPANDRSVREIAELMIGIWKDHPFRKVRGLPEGRTIETGSGEFYGKGYQDVMRRTPSIRRMQETFGFSPKVGMKESLEKAINFFVEEHKSLEKVVETES

SEQ ID NO: 74579 - DNA, 819 bp, Unknown
  Obtained from environmental sample
  misc_feature (1)..(819): n is a, c, g, or t
atgaaaaggcaaccctctcttgcaagcgcggttgcgcttttaaccgtggcattttttttagtgggggcaccttcgcaaagcagatttaaagttacaaccataaatgaaaaattggcgacaactcccaaaaaaactttgcgaatagctttgttttccgatattcattttgacaatctttttcaaaaagacaagttggaaagattgctggattcccttcgtgttctgcaaccaaatgccatattttttgcaggagatttggctgatattccaacatacaaattgcagatgaaaggctttgattcgctgtttaagcaaataaatgctccgcttggcttttttgccgtggtgggcaatcacgaaggtttcaatatatcaaaaaataaacaaggtagcgttgaatggttgaaaaatttgggcaatgtggtgttgcttatggattctacggtttgcaatgaatatttttgcctaacaggtcgcatagaccataactttgcaaaaaagctaaagcgaaacagagccccgctaaatgaacttatgcctgataacaattccgttccctggtttctgctagaccaccagccaagaggcttagacaagcaagataccgggatttcccgattgccagactttgccatgagcggtcatacacatgcggggcagttttttccagcaacaattgtaattcgctttttatggtctttggtctatggacccggtaatttaaacggcattccttggtttgtaaccagcggaattggtcaatggatgccaatacgcactttcactcgtaatgaacttgtgctgtttgtgtttgaataa

SEQ ID NO: 74580 - protein, 272 aa, Unknown
  Obtained from environmental sample
  SIGNAL (1)...(22)
  DOMAIN (46)...(219): Calcineurin-like phosphoesterase
  misc_feature (1)..(272): Xaa is any amino acid
MKRQPSLASAVALLTVAFFLVGAPSQSRFKVTTINEKLATTPKKTLRIALFSDIHFDNLFQKDKLERLLDSLRVLQPNAIFFAGDLADIPTYKLQMKGFDSLFKQINAPLGFFAVVGNHEGFNISKNKQGSVEWLKNLGNVVLLMDSTVCNEYFCLTGRIDHNFAKKLKRNRAPLNELMPDNNSVPWFLLDHQPRGLDKQDTGISRLPDFAMSGHTHAGQFFPATIVIRFLWSLVYGPGNLNGIPWFVTSGIGQWMPIRTFTRNELVLFVFE

SEQ ID NO: 74581 - DNA, 903 bp, Unknown
  Obtained from environmental sample
  misc_feature (1)..(903): n is a, c, g, or t
ttgnagggcagctacaccagcgccgcgctcatgggcgagcgccaccagcgcatagcttacgaaaaggtacagggcggcaggcagtactactacgcccccgcgctctcggtaaaccccggcgcaagcgtaaccctaaaggcaaagctggacattgaggacagcgatgtgcaccccgacagcattttctttgccacccaagcgggcgagcggctgacctccaagcgcagcggtaataccgccacgctcacgcttacctcaggcacgccgggcgatagccgtcgctactacgcgctgtgcccgtacaagggcaagttggtagtagtgggcgcgtttgaggtggtaacctaccccgccaaaaccgtaagcgtggcgctggtgcctgtaaatgactttggcaagaatattagcacaacggagctggaggcctacctgaacaaaacgtacgcccccgcaaacgtaagcttcaagctgaccaaggaagccaactttagctacggcggcaacctgaagctgcttgaaaacaaaagtggcttgcttgatgcctacaccgaagagatgaaaattctcaacagcgcctatacaaagcatgcaggcgacagcttcaaaaaagatgcgctgtacctcctctttgccaactacggctttggcagcgacaagtttgctgcgggctttatgccacggcaaaagcaaataggctacatcttccttgccgaagctaacaaggatttgtaccgcattgttgcccacgagctggggcatggtatggcaaaccttgcgcacacctttgataaaaccaagtacgggcataccgcagggcagcaccaaaaacctgatggactacagcgagggtacggagctggtgaagctgcagtgggacgcgctgcacaaccccgggaagtgtga

SEQ ID NO: 74582 - protein, 300 aa, Unknown
  Obtained from environmental sample
  misc_feature (1)..(300): Xaa is any amino acid
MXGSYTSAALMGERHQRIAYEKVQGGRQYYYAPALSVNPGASVTLKAKLDIEDSDVHPDSIFFATQAGERLTSKRSGNTATLTLTSGTPGDSRRYYALCPYKGKLVVVGAFEVVTYPAKTVSVALVPVNDFGKNISTTELEAYLNKTYAPANVSFKLTKEANFSYGGNLKLLENKSGLLDAYTEEMKILNSAYTKHAGDSFKKDALYLLFANYGFGSDKFAAGFMPRQKQIGYIFLAEANKDLYRIVAHELGHGMANLAHTFDKTKYGHTAGQHQKPDGLQRGYGAGEAAVGRAAQPREV

SEQ ID NO: 74583 - DNA, 633 bp, Unknown
  Obtained from environmental sample
  misc_feature (1)..(633): n is a, c, g, or t
gtgaaagtgcgcttggtcagcaccaccataaaggtcaagagactgtcgggatgcggatggctaaggcgttccgcaactttcagtatcggttttcgagacatatgtcaatcatacccttcttgttcaagaatgcaagcacaaaaaattccagctgcaaaaaaaccagccaaacgggaagcctcgccgccgcgttgccgatttcttgcgtcatgcggttgggataaaataatttccaagcagacgttgccgtcagccctcctttcctactgggagccacccatggccgcatcccccaaaaaagttttcgtgatggatacgaatgttctgctgcacgacccgcaggcgatattccgctttcaagaacacgaccttgtgatcccgatagtcgtcatcgaagaaatagacacgttcaaaaaagaccagacggaaatcggcagaaacgctaggacggcgtctaggaacattgacgcactcagagccagaggcaggctcagcaagggcgtgggcctagatggcggcggcaccctaaaagtggacatatctgactactctttcaaagacaaattttcgcacatcaacaaaagtccggccgacaacatgatcttggcctgcgccaaggccatcctcgantga

SEQ ID NO: 74584 - protein, 210 aa, Unknown
  Obtained from environmental sample
  misc_feature (1)..(210): Xaa is any amino acid
MKVRLVSTTIKVKRLSGCGWLRRSATFSIGFRDICQSYPSCSRMQAQKIPAAKKPAKREASPPRCRFLASCGWDKIISKQTLPSALLSYWEPPMAASPKKVFVMDTNVLLHDPQAIFRFQEHDLVIPIVVIEEIDTFKKDQTEIGRNARTASRNIDALRARGRLSKGVGLDGGGTLKVDISDYSFKDKFSHINKSPADNMILACAKAILX

SEQ ID NO: 74585 - DNA, 447 bp, Unknown
  Obtained from environmental sample
  misc_feature (1)..(447): n is a, c, g, or t
gtggtatatgcctatgtaaaatcaaatggtctaaacgtcagatctgggccttccgaatattttgatgccatttatcgattaagtgcaaacgaccgtgttgaagttataagcaaatccggtacatggtggaaaataaaatatggaagtttggatgggtacgttaattctcaataccttggggacagtgtagcatcatctgaaaattcaattccatctgcatacaatgcgataaacaattttttcaccaatattaaagatgcggcggcggcgcataaggccgaacaaaaagcaagactggcggaagacccctattacggaaccttcaattcaaaagaggcacaggagtataatgctcgtgttcgcgaagaatataatcgatatatcatcgaacatggaaccccttacgacaatgcctctctgcctgggtctggcgggcctgataaataa

SEQ ID NO: 74586 - protein, 148 aa, Unknown
  Obtained from environmental sample
  DOMAIN (7)...(61): Bacterial SH3 domain
  misc_feature (1)..(148): Xaa is any amino acid
MVYAYVKSNGLNVRSGPSEYFDAIYRLSANDRVEVISKSGTWWKIKYGSLDGYVNSQYLGDSVASSENSIPSAYNAINNFFTNIKDAAAAHKAEQKARLAEDPYYGTFNSKEAQEYNARVREEYNRYIIEHGTPYDNASLPGSGGPDK

SEQ ID NO: 74587 - DNA, 558 bp, Unknown
  Obtained from environmental sample
  misc_feature (1)..(558): n is a, c, g, or t
atgaacaaattgttcggcacagacggcgtaaggggtcaggcgggcacggcgctcacctgcgatacggcgtttaaattggggcttgcggcggcttcgatattaaataaaacaggcagcaaacacagggttgctatctgccgcgacacaagactttccgggtatatgctgcaaagcgccctgcaagcgggactgtgcgcggcgggcgcggacgttatagatatcggcgttatgcccacgcccgcgttaagctatataacccactccttttatttggatttcggcgcggtggtttccgcctcgcataacgtgttttccgacaacggcattaaatttttcggccccgacggcacaaaactgcccgacgcgcttgaagacgaaattgcggacgcgttttttaaagaaaatttctcgcaaaccgcanggcgcaatataggctccggccagcaatcggatatttcgcanatttatttaagttttttggccgccacgatgggcggcatatatttggacggcgttaaaatagtgcttgactgcgcgaacggcgcgggtttaaagtag

SEQ ID NO: 74588 - protein, 185 aa, Unknown
  Obtained from environmental sample
  DOMAIN (2)...(138): Phosphoglucomutase/phosphomannomutase, alpha/beta/alpha domain I
  misc_feature (1)..(185): Xaa is any amino acid
MNKLFGTDGVRGQAGTALTCDTAFKLGLAAASILNKTGSKHRVAICRDTRLSGYMLQSALQAGLCAAGADVIDIGVMPTPALSYITHSFYLDFGAVVSASHNVFSDNGIKFFGPDGTKLPDALEDEIADAFFKENFSQTAXRNIGSGQQSDISXIYLSFLAATMGGIYLDGVKIVLDCANGAGLK

SEQ ID NO: 74589 - DNA, 786 bp, Unknown
  Obtained from environmental sample
  misc_feature (1)..(786): n is a, c, g, or t
ttgttggagaaaagtcgttacagcgtgtttggagaaatcgtaaccgaccgcgttgaggattcgtgcgatttgcaagggaaaaaatatcttgcggtggaatatttacccggacaatttgaccaaagagctagttcggcggtggactgcgtgaagttgatagaacctgcggccgatgtgcatattaaaagttcgcggttgctgatttttgatgaccggattagtgatgcggatgttgacaaaatccgaaaatactatatcaatgcgattgaagcgcgtgaaaaaaatctttctattttagatgatgcggagaatatagaagtcaagcctgttcccgtgttgaaagggtttacggcgatgagcgaaaacgaactcgaaccctattgtcgcgaaaacggattggccatgaatgccgacgatttgcgcgaagtggtcaactatttcaaagccgaagggcgcgacccgcttgaaacggaattgcggattttagatacctattggagcgaccattgccggcataccacatttactacggaacttgaggaaatcacgattgatgattcctttatgaaaacggaattacaaaactcactcgacttttatcacaagatgcgcaaggaattgggtcgcgaggacaagagcatttgcctgatggatatggcgacgattggcgcgcgctacctgcgaaaaaaaggcttgctcaacgatttggaagtgagtgaagaaaacaatgcgtgcagcatttttatcaacgtggatgtggatggaaaaccggaaaatggctgttga

SEQ ID NO: 74590 - protein, 261 aa, Unknown
  Obtained from environmental sample
  misc_feature (1)..(261): Xaa is any amino acid
MLEKSRYSVFGEIVTDRVEDSCDLQGKKYLAVEYLPGQFDQRASSAVDCVKLIEPAADVHIKSSRLLIFDDRISDADVDKIRKYYINAIEAREKNLSILDDAENIEVKPVPVLKGFTAMSENELEPYCRENGLAMNADDLREVVNYFKAEGRDPLETELRILDTYWSDHCRHTTFTTELEEITIDDSFMKTELQNSLDFYHKMRKELGREDKSICLMDMATIGARYLRKKGLLNDLEVSEENNACSIFINVDVDGKPENGC

SEQ ID NO: 74591 - DNA, 870 bp, Unknown
  Obtained from environmental sample
  misc_feature (1)..(870): n is a, c, g, or t
atgctgaacaatctcagcgacgacaatgttgtatcgcaaaaaggattgatagagatgttcgattcancagtgggtgcatccactgtgttgatgccctttggcggaaaaacacaacacaccgaaacacaggtttccgtgcaaaaaattcccgtgcaaaaaggctataccgatacggcgagcatgatggcgttcggctacaatccgtttatcgcatcgtggagtccctatcatggcgcggcttatgccgttgtggaggcttgcgcgaaaattgtggcatcaggcgcatcgtttgaaaacatgcggttttcgtatcaagaatatttcgagcgtatgaccaacgacagtcgtacatggggtaagcctttgagcgccctgctcggtgcgttgaaaatgcaagccgaattgggattgccggccataggcggtaaagattcgatgagcggaacatttaaaacgatcaatgtaccgccaacccttattgcgttcggcattacgacgattgatgccggcaaggtcatcagtcccgaatttaaaaacgccggaaattccctctatctcatcaaacacacgcctttagaaaattatatgccgaacacggcgcaactgaaagcgaattggaattttgtaaccgaacatattcacaacaaaaccatcgtgtcggcgtatgccgttggatttggcggtgttggcgaggctgttgcgaaaatggcctttggaaatgccgttggcggacagatagaattggaagaaaaatcattatttgattattcgtatggttcgattttggtggaaaccaccaaacctttacatttggaaaatgccgtttatttggggcataccgtagaacaagccgcgtgctggccgatctga

SEQ ID NO: 74592 - protein, 289 aa, Unknown
  Obtained from environmental sample
  misc_feature (1)..(289): Xaa is any amino acid
MLNNLSDDNVVSQKGLIEMFDSXVGASTVLMPFGGKTQHTETQVSVQKIPVQKGYTDTASMMAFGYNPFIASWSPYHGAAYAVVEACAKIVASGASFENMRFSYQEYFERMTNDSRTWGKPLSALLGALKMQAELGLPAIGGKDSMSGTFKTINVPPTLIAFGITTIDAGKVISPEFKNAGNSLYLIKHTPLENYMPNTAQLKANWNFVTEHIHNKTIVSAYAVGFGGVGEAVAKMAFGNAVGGQIELEEKSLFDYSYGSILVETTKPLHLENAVYLGHTVEQAACWPI

SEQ ID NO: 74593 - DNA, 729 bp, Unknown
  Obtained from environmental sample
  misc_feature (1)..(729): n is a, c, g, or t
atgctcaaagacaagcatgggcgcacaattgattatctacgaatttcggtgacagaccgatgtgatttgagatgcatatcctgcatgccccaagatggcgttcagccgcttggccacactgacatcctgcgatttgaagaaattgaagccatagtgaaggtgggttccgagttggggataagaatcgcccgtctgactggcggagaaccactggctcgcttgggggtcaccgccctcgccaaaaaacttcgttccataccgagtctcaatgatttggctttgacgaccaacggaattcaattctcgcagcaggcggaggccctgctggacgcaggggtcaggcgggtcaactttggcatccccaacctagactccgccaaataccgcactgccactaggcgcgggaacctctcggatgccctcgatggcctagagagcgcgattcgccttggcttttcgccaataaaaataaacgtggtggtgatgcgcgggatcaacgatggattggaagacctgcgccagttcgccgccatcgcatcaaaaaagcctgtacacgtcaggttcattgaatacatgccaataggtgacgccagacacgccgaatactttgtgccattggcagatattgaacaaaacctaaaggcattgttaaccgatttggcggctctgcccccagtggatagcagcggccaatttcagaatgtcaaagtgccaggcgcccggccataa

SEQ ID NO: 74594 - protein, 242 aa, Unknown
  Obtained from environmental sample
  DOMAIN (15)...(176): Radical SAM superfamily
  misc_feature (1)..(242): Xaa is any amino acid
MLKDKHGRTIDYLRISVTDRCDLRCISCMPQDGVQPLGHTDILRFEEIEAIVKVGSELGIRIARLTGGEPLARLGVTALAKKLRSIPSLNDLALTTNGIQFSQQAEALLDAGVRRVNFGIPNLDSAKYRTATRRGNLSDALDGLESAIRLGFSPIKINVVVMRGINDGLEDLRQFAAIASKKPVHVRFIEYMPIGDARHAEYFVPLADIEQNLKALLTDLAALPPVDSSGQFQNVKVPGARP

SEQ ID NO: 74595 - DNA, 471 bp, Unknown
  Obtained from environmental sample
  misc_feature (1)..(471): n is a, c, g, or t
atgggtatgttcggcgggtttttgattacctatggcttttctgtctggaaagtgtatgggaagcttgatttcacgattaactttgcttcaggcatttntgcattgctcatcgcttgttttccttgctttaatcaagcggttgaaatagcggggctcattccgcttccaattaaagtatgcgccaccatacacaatgtttcggcggcgttattcttcctactgcttgcgcttaacatcctcatgctttttacgaaaagctcaggagccaaaacaaaagaaaaaatatggagaaatgccatataccgtatttgcggcatcgggattttgcttttcatggcggttcaggcatatacgtcatttttcgcgaagctagacggcccctatacaatgatcaacgaagcagggatgcttgttaattttggcattgcatggctcatcaagggcgagacggtttttaaggatgccctttaa

SEQ ID NO: 74596 - protein, 156 aa, Unknown
  Obtained from environmental sample
  misc_feature (1)..(156): Xaa is any amino acid
MGMFGGFLITYGFSVWKVYGKLDFTINFASGIXALLIACFPCFNQAVEIAGLIPLPIKVCATIHNVSAALFFLLLALNILMLFTKSSGAKTKEKIWRNAIYRICGIGILLFMAVQAYTSFFAKLDGPYTMINEAGMLVNFGIAWLIKGETVFKDAL

SEQ ID NO: 74597 - DNA, 852 bp, Unknown
  Obtained from environmental sample
  misc_feature (1)..(852): n is a, c, g, or t
atgagtcctctttcggaatcaacaataaaaaaatacaaactaatagatgatcaaggtagaaaatacagactaaatggtagagggatcactggaagtccaattcgttcagctaaggatgttgatgcaaaatgggagctttcaaatcctgagttagtaattagagattatttgagagatggttatccaccagaggattggtggttaattgatattgtcaatcaagtagctctagaacgagttgaatacgccactcaaaaacccgaagccctattagaacgcattatcaaagcaagtagcaatgagggcgatttaatattggattgtttttgcggcagcggcaccaccgccgccacagccgaaaagttaaaccgccgctggataacctgcgacctcggccgcttcgccatccacacggcaagaaaacgctttttaggaatcccaaacgtccgcccgtttataatgcaaaacttatgcaaatacgagcgccagccatggattcaagccgagtttgacaatccgcaaggccgtctacagcaggaaaaagcatacaaagactttatctgcgacctctaccacgccaagcccctcgacagcggctacgtctacatccacggggtaaaggctgggaggatgattcacgtcggcggcgttgaagcgcctattacgagtgaagatattaagaaagccatcttggaattttggcaaatggttggcaaagaaaagcggtttccactaacgggatcgattttctgggatgggattttgctttccacatcaacgaaacggccgcccaggtcccccaaaacaacaaggtcaacgttcaatttcaaaaaattccccgagaggtgttaa

SEQ ID NO: 74598 - protein, 283 aa, Unknown
  Obtained from environmental sample
  DOMAIN (1)...(141): DNA methylase
  misc_feature (1)..(283): Xaa is any amino acid
MSPLSESTIKKYKLIDDQGRKYRLNGRGITGSPIRSAKDVDAKWELSNPELVIRDYLRDGYPPEDWWLIDIVNQVALERVEYATQKPEALLERIIKASSNEGDLILDCFCGSGTTAATAEKLNRRWITCDLGRFAIHTARKRFLGIPNVRPFIMQNLCKYERQPWIQAEFDNPQGRLQQEKAYKDFICDLYHAKPLDSGYVYIHGVKAGRMIHVGGVEAPITSEDIKKAILEFWQMVGKEKRFPLTGSIFWDGILLSTSTKRPPRSPKTTRSTFNFKKFPERC

SEQ ID NO: 74599 - DNA, 954 bp, Unknown
  Obtained from environmental sample
  misc_feature (1)..(954): n is a, c, g, or t
gtgcgcgccatccgcggcggcaaggcgcagaatgtcccgcgcaaggatctggtggtcggcgatatcatcctgctcgaaaccggcgaggaaaccccggcggacgccgaggtgctggaggcctattcgctggaggtggatgaatccaagctgaccggcgaatcgcatcccgtgagcaaaaaaccgcgcgatgcgggcgaggttcccgatgcggcctacccctcgttccgcgtcatgaagggcactctcgttgccgacgggcatgggatttttcgcgttgagaaggtcggcgaggccagtgagatcggcgcggtcgcccgtctctccgccgaagagacccaaaacgaaacaccgctgatgcggcagttggcgcatctcgcgcggatcctgggcgttgtggcctttgccgtcgcggcggcgttttttgcggtgctgctcgcgcgcgggatcatgaccggacagttcgtgctcacgggggcgaaatgggcgcttttgggcgtattgttcaccgcgctgcttatcttgttgcaccgtgtctggctgccgatcatttttgatctccccttgctctgggggcgtgaaccatcgcctcccgcctggcttgcgcgcgtcggcggctggaagtcctggacgataagcgcggcgtttgcctgtctcgtcggcggcatcggtatatacatactcacggcaagcggtttacttccttcggtgaagctgtccttttcggtattcgcggggtttgccgactggctgccctctgcggtgctcatggaaattctcgcgtatttcatggcggcggtcgcgctgattgtggtcgcggtgcccgagggcttgccgctgtcggttacgctcgcgctttcgtataatatgcgcaaaatggtcgcgaataacgcgttggtgcgccgactctatgcctgcgaaacgattggcgcggtaactgtgatctgctcccgataa

SEQ ID NO: 74600 - protein, 317 aa, Unknown
  Obtained from environmental sample
  DOMAIN (2)...(307): E1-E2 ATPase
  misc_feature (1)..(317): Xaa is any amino acid
MRAIRGGKAQNVPRKDLVVGDIILLETGEETPADAEVLEAYSLEVDESKLTGESHPVSKKPRDAGEVPDAAYPSFRVMKGTLVADGHGIFRVEKVGEASEIGAVARLSAEETQNETPLMRQLAHLARILGVVAFAVAAAFFAVLLARGIMTGQFVLTGAKWALLGVLFTALLILLHRVWLPIIFDLPLLWGREPSPPAWLARVGGWKSWTISAAFACLVGGIGIYILTASGLLPSVKLSFSVFAGFADWLPSAVLMEILAYFMAAVALIVVAVPEGLPLSVTLALSYNMRKMVANNALVRRLYACETIGAVTVICSR

SEQ ID NO: 74601 - DNA, 480 bp, Unknown
  Obtained from environmental sample
  misc_feature (1)..(480): n is a, c, g, or t
gtggctaagtacaaattaccgcctcaaagtgattatcagaaagcaattcgagacggcgcgcagatgattttcaaccatgtcgctccgtcactgggagcagttaatttggaacgcctgaaatatattccggagggcggcagttggcgggatattccacaagaattattgccggcagggatgaaacgcgcccgccgttcagaccatacaaagcgatacggcagattacgcagaaatggttttgcctcaacgattctaactaaatgcgatcctcattggggggcattttttcatcccacacaagacagagttatttctgttagggaagccgctcgcttacaatgctttcccgataaaagacgatttgagggcagccgagttgaacaatataaacaggttgggaatgctgttccggttttattgtctgcagccgtcgcgaaagttgttaataatgcattatccgagttttataggggacggtga

SEQ ID NO: 74602 - protein, 159 aa, Unknown
  Obtained from environmental sample
  misc_feature (1)..(159): Xaa is any amino acid
MAKYKLPPQSDYQKAIRDGAQMIFNHVAPSLGAVNLERLKYIPEGGSWRDIPQELLPAGMKRARRSDHTKRYGRLRRNGFASTILTKCDPHWGAFFHPTQDRVISVREAARLQCFPDKRRFEGSRVEQYKQVGNAVPVLLSAAVAKVVNNALSEFYRGR

SEQ ID NO: 74603 - DNA, 354 bp, Unknown
  Obtained from environmental sample
  misc_feature (1)..(354): n is a, c, g, or t
gtgccatgttcacccgtgccctgcacttccaccaactgtcctgtgccggtcaggataacattcatgtccacttctgcggcgctgtcctctagatacatcaaatccagacgcggttcgccttccacaataccgaccgaaatagccgccacagaatcaataatcggatcgctcaaaactttacctgaggccagcaatttattcaccgccaaacgcagggcgacaaacgctcccgtaattgaagccgtgcgcgtgccgccatcggcctggatcacatcgcaatccagagtgatagtaatctcgccaagctttttgaggtcgattgccgcgcgtaaagcccgcccgatcaaacgctga

SEQ ID NO: 74604 - protein, 117 aa, Unknown
  Obtained from environmental sample
  misc_feature (1)..(117): Xaa is any amino acid
MPCSPVPCTSTNCPVPVRITFMSTSAALSSRYIKSRRGSPSTIPTEIAATESIIGSLKTLPEASNLFTAKRRATNAPVIEAVRVPPSAWITSQSRVIVISPSFLRSIAARKARPIKR

SEQ ID NO: 74605 - DNA, 432 bp, Unknown
  Obtained from environmental sample
  misc_feature (1)..(432): n is a, c, g, or t
atgggagcaatgagctttatcgggagaaatatgagaaaaatccccgaaacaaaaggttttaacagtccaacaaagtgggaaatacctcatgaagtattngaggaattattggtaaacgcattggtacacagggattatttaatttcttctacggttaaagtttttattttttctgacagggtagaaataattagtcctggtaaactgcctaattctttgaccgttgaaaaaataaagagcggagtttcaatttctcggaatccaatacttctgtcaacagtgcagtatatactaccatataaagggctgggaactggtgttccgcgttcattgtcgctttatcctgatataacaatggaaaatagaatagatgaaaatcagtttaaggtgattattaaacgtcctcaagcgcttttcggagataaacaatga

SEQ ID NO: 74606 - protein, 143 aa, Unknown
  Obtained from environmental sample
  misc_feature (1)..(143): Xaa is any amino acid
MGAMSFIGRNMRKIPETKGFNSPTKWEIPHEVXEELLVNALVHRDYLISSTVKVFIFSDRVEIISPGKLPNSLTVEKIKSGVSISRNPILLSTVQYILPYKGLGTGVPRSLSLYPDITMENRIDENQFKVIIKRPQALFGDKQ

SEQ ID NO: 74607 - DNA, 597 bp, Unknown
  Obtained from environmental sample
  misc_feature (1)..(597): n is a, c, g, or t
gtgctgaccgccctggttaagcggaccagccggcccgtctccatagacacctacaaggccggcgtggccgaaaaagccctggcggccggagcggccgccgtcaacgatatctacgcgggccggaaagatcctcgcctcctggccgtggccgccgaatggcgggtgccgctcatacttatgcacatgcagggcgaaccggccaccatgcagatcgccccccgctacgacgacctcttgggggagattcacgattttctcctggagcgggccgaggccgccctggccgccgggttgccccgggaactaatttggctggacccggggatcggcttcggcaagaccgtggcccacaacctgtccctcatcaagcatttcgaccgggtcatgccccgggggtaccgccgggtcatggccctgtcccggaagggttttttcaggaccatcctgggggacgccccgcccacggcccgcgacggcctcacggcggtggccgacgccctgtccgtgctgaagggcgccgagattctccgggtgcaccgggccgcccccaaccggccggccgtggacctggccttggctatccggtcggccgcttga

SEQ ID NO: 74608 - protein, 198 aa, Unknown
  Obtained from environmental sample
  DOMAIN (1)...(149): Pterin binding enzyme
  misc_feature (1)..(198): Xaa is any amino acid
MLTALVKRTSRPVSIDTYKAGVAEKALAAGAAAVNDIYAGRKDPRLLAVAAEWRVPLILMHMQGEPATMQIAPRYDDLLGEIHDFLLERAEAALAAGLPRELIWLDPGIGFGKTVAHNLSLIKHFDRVMPRGYRRVMALSRKGFFRTILGDAPPTARDGLTAVADALSVLKGAEILRVHRAAPNRPAVDLALAIRSAA

SEQ ID NO: 74609 - DNA, 492 bp, Unknown
  Obtained from environmental sample
  misc_feature (1)..(492): n is a, c, g, or t
atggcgggtgccgctcatacttatgcacatgcagggcgaaccggccaccatgcagatcgccccccgctacgacgacctcttgggggagattcacgattttctcctggagcgggccgaggccgccctggccgccgggttgccccgggaactaatttggctggacccggggatcggcttcggcaagaccgtggcccacaacctgtccctcatcaagcatttcgaccgggtcatgccccgggggtaccgccgggtcatggccctgtcccggaagggttttttcaggaccatcctgggggacgccccgcccacggcccgcgacggcctcacggcggtggccgacgccctgtccgtgctgaagggcgccgagattctccgggtgcaccgggccgcccccaaccggccggccgtggacctggccttggctatccggtcggccgcttgaagaagcgcgggtttaatggtctttttgccccctggcagcgccagggctga

SEQ ID NO: 74610 - protein, 163 aa, Unknown
  Obtained from environmental sample
  misc_feature (1)..(163): Xaa is any amino acid
MAGAAHTYAHAGRTGHHADRPPLRRPLGGDSRFSPGAGRGRPGRRVAPGTNLAGPGDRLRQDRGPQPVPHQAFRPGHAPGVPPGHGPVPEGFFQDHPGGRPAHGPRRPHGGGRRPVRAEGRRDSPGAPGRPQPAGRGPGLGYPVGRLKKRGFNGLFAPWQRQG

SEQ ID NO: 74611 - DNA, 789 bp, Unknown
  Obtained from environmental sample
  misc_feature (1)..(789): n is a, c, g, or t
ttggactatgcgcgccgcttcggtgacgaattgaaacgccccggttttttgtgcgagcttgcgcggcgctttgtagtaatttggacgctcatagcgcgcgtaccgatgcgaaaacgttggtggcctgatgtaacgccaggggcggcggacgcgttgaccatgatatcgctggcgggggggattctcggttttgtttcggtgtttccggcgcgccttctggcatatgcgcttccgccctcagtctgtgcatggatcgcctgcggcgtctacacggttgccggttggagcttgcatctcgatggttggggtgacctatgggacggcgtcggctccggcaagaggggcgaggagatacgcgctgttatgaaggacagctgttcgggcagcttcggagtcgctggcatcgtgctcgcgatctcaattcgggcgtcgttgttgtcggccatcgcctctgggcgatggttagccgtctgtatcgtggctgggggtgtcgggcgtttcgcttcggcggtggctgcccgcgtcggaatgtatccgtgggaggccggtctcggcaaggacttcgtcagcgatttcaaaggctatcacctcttctgcgcgtttctggccacatgcttcctctttcctttctcgccgttcggctggattgtcggagtccttctggcgagccttgcaggcggagcgcttgcgttgtgggcgaatcgctccctgggcggaacgaacggcgatattctgggcgctgccgccgtttccggtgaactttttgcgctccttgcactgagcagatga

SEQ ID NO: 74612 - protein, 262 aa, Unknown
  Obtained from environmental sample
  DOMAIN (27)...(260): Cobalamin-5-phosphate synthase
  misc_feature (1)..(262): Xaa is any amino acid
MDYARRFGDELKRPGFLCELARRFVVIWTLIARVPMRKRWWPDVTPGAADALTMISLAGGILGFVSVFPARLLAYALPPSVCAWIACGVYTVAGWSLHLDGWGDLWDGVGSGKRGEEIRAVMKDSCSGSFGVAGIVLAISIRASLLSAIASGRWLAVCIVAGGVGRFASAVAARVGMYPWEAGLGKDFVSDFKGYHLFCAFLATCFLFPFSPFGWIVGVLLASLAGGALALWANRSLGGTNGDILGAAAVSGELFALLALSR

SEQ ID NO: 74613 - DNA, 801 bp, Unknown
  Obtained from environmental sample
  misc_feature (1)..(801): n is a, c, g, or t
atgacactagaggagcgagccaagatccctggcatcaacccgcaacgagcggatgtgatcgtcggcggagcagcgattttacaaacgttgatggaggagctaggcatccgggaggtcgtcataagcaggcgaggactgctagacgggatgttgcaggactatctcgaacgaggccgatggggttatctcgacggcacgacgtcagcacgcgaacagagcgcactacagctagctcgctcttgcctcttcgacgaaaatcatgcacgctggatgacgcgcctggcgctctcactctttgacagtacccgagagattggcctgcacagctatggagcgcaggaacgcgaactgctctattttgcgggcctgttgcacgatatcggactcttcttgtctttcagaaatcaccacgaacacacccgctacatcatcgaaaacacggaactccttggcttccataggcgtgagatcgagatcatagcggcgagcgccgcgatgcaccgcaagcagtcgctacaaaaacaaaggaaaaacgcgttcggtcatggtgtacgtccctcgttgaccgaagaacagtggaaattgtcagcgaccctcggtctcttcctccgcatggcggagcgcttagatcgcagccaacaacagaccatcacgaacgcgcgcattgaacgcgaaggtaaaaaactcgttctgcgcgtgcgactcctccgtgattcccccgccgaactcctctccatccgggagtgcgggggcgcctttaaaaaacgcttcggggaaaattttaaaatagaaacctcgtag

SEQ ID NO: 74614 - protein, 266 aa, Unknown
  Obtained from environmental sample
  DOMAIN (84)...(212): HD domain
  misc_feature (1)..(266): Xaa is any amino acid
MTLEERAKIPGINPQRADVIVGGAAILQTLMEELGIREVVISRRGLLDGMLQDYLERGRWGYLDGTTSAREQSALQLARSCLFDENHARWMTRLALSLFDSTREIGLHSYGAQERELLYFAGLLHDIGLFLSFRNHHEHTRYIIENTELLGFHRREIEIIAASAAMHRKQSLQKQRKNAFGHGVRPSLTEEQWKLSATLGLFLRMAERLDRSQQQTITNARIEREGKKLVLRVRLLRDSPAELLSIRECGGAFKKRFGENFKIETS

SEQ ID NO: 74615 - DNA, 393 bp, Unknown
  Obtained from environmental sample
  misc_feature (1)..(393): n is a, c, g, or t
ttgcgcgcacgtgcaaggtttccaggggtggttgtaatttccgcaagggcaagggttcatcgcggccacgagcatgaagtttgcagggtagtcaatagacattcgtgcacgagaaacattgacaacgcggtcttccatcggttggcgcaacacttccagcacttggcgtttgaattccggcatttcgtccaaaaacaacacgccgttgtgtgccagcgaaatttcgccgggttgcggaacagaacctccaccgaccagagccacatccgaaatggtgtgatgcggtgcgcgaaacggccgtgccgacaccaatcctcgcaaacggccaagtttgccggccacagagtgaattttggttgtttccaacgcttcgtgcaaagtcatcggcggtag

SEQ ID NO: 74616 - protein, 130 aa, Unknown
  Obtained from environmental sample
  misc_feature (1)..(130): Xaa is any amino acid
MRARARFPGVVVISARARVHRGHEHEVCRVVNRHSCTRNIDNAVFHRLAQHFQHLAFEFRHFVQKQHAVVCQRNFAGLRNRTSTDQSHIRNGVMRCAKRPCRHQSSQTAKFAGHRVNFGCFQRFVQSHRR

SEQ ID NO: 74617 - DNA, 537 bp, Unknown
  Obtained from environmental sample
  misc_feature (1)..(537): n is a, c, g, or t
atggccggactttttcttcacatctgctgcggtccctgtgcggtctatcccctggaatggttccgggaccggcggccggacctggaactggagggttggttctacaaccccaacatccaccccggggccgagttccgccgccgccgggacagcctggcttttctggccctccatagcggcctcaaggttgatttttcacagccctatgacgcggcccccttcctggccgccttggggcctcggccccaaggcccggaccgctgccgggcctgttacgcctggcgtctttccgccgcggcccgggaggccgccgagcggggccatcgggccttcgccaccaccctggccttcagcaaaaggcagaaacacgacctgatcctggaagagggcctttccgccgccgcccgccacggcctggaatttttctacgaggactggcggcccggctggacccgaggccgggaagcggcccgggctctggggctctaccgccagtcctactgcggctgcctccatagcgagctggccggcctttga

SEQ ID NO: 74618 - protein, 178 aa, Unknown
  Obtained from environmental sample
  DOMAIN (4)...(177): Uncharacterized BCR, COG1636
  misc_feature (1)..(178): Xaa is any amino acid
MAGLFLHICCGPCAVYPLEWFRDRRPDLELEGWFYNPNIHPGAEFRRRRDSLAFLALHSGLKVDFSQPYDAAPFLAALGPRPQGPDRCRACYAWRLSAAAREAAERGHRAFATTLAFSKRQKHDLILEEGLSAAARHGLEFFYEDWRPGWTRGREAARALGLYRQSYCGCLHSELAGL

SEQ ID NO: 74619 - DNA, 993 bp, Unknown
  Obtained from environmental sample
  misc_feature (1)..(993): n is a, c, g, or t
atggccgagagatttcgagtactaaagcggcagtttgacagcatgaaggggtgggtggattatatcaaagatcattgtagcccaaacggcctgtggcaaaccgggcatcagtacggagactggctctctctggacaaagaaaatggcgcaccacccgccggtcccggcggtaccgacgtttatttggttgcgaattcttattacctgcgatctattgatattgtgcgacaaaccgcaaaactcatcggagacatccacgaagaagaaaaatacaacaaactgtacgatgaaacattggcggcttttcaaaacgaatatattaccaacacgggaagggtattaaacgagactcaaaccgcctgcatactggtgttggcttttaatctcgcaaagaacgaacaccgacagcggatattagattctcttgtttcaaatcttgctaagcataacgatcatttaactaccggttttgttggtactccttatatctgtcatgtattatccgaaaacggcagacatgatcttgcggtaaaactgctgttacaggaagattacccctcatggctttacgcagtaaaaaaaggagcaactaccatttgggaacggtggaattccatactgccatcgggagattttgagacttcaggtatgaattctctcaatcattatgcatacggcgccataggcaattggatgtaccggaaactcgcgggtatagttcctctggaggcaggttaccggaaaattctcatccggcccatgccagcaagcggtatcaatgatataaaggcaagccttgttacaccctatggcttggtttctgtaaagatgaattgttccaatggctgcataacagtagatgttgtaataccaccgaatacggaagcgctactgtaccttccgggtaaagaggaagaaatagccgcaggttcaagcaatcatcacttcgtttatgatacagacatcaaccttgatatcagttctatactataa

SEQ ID NO: 74620 - protein, 330 aa, Unknown
  Obtained from environmental sample
  DOMAIN (1)...(300): Bacterial alpha-L-rhamnosidase
  misc_feature (1)..(330): Xaa is any amino acid
MAERFRVLKRQFDSMKGWVDYIKDHCSPNGLWQTGHQYGDWLSLDKENGAPPAGPGGTDVYLVANSYYLRSIDIVRQTAKLIGDIHEEEKYNKLYDETLAAFQNEYITNTGRVLNETQTACILVLAFNLAKNEHRQRILDSLVSNLAKHNDHLTTGFVGTPYICHVLSENGRHDLAVKLLLQEDYPSWLYAVKKGATTIWERWNSILPSGDFETSGMNSLNHYAYGAIGNWMYRKLAGIVPLEAGYRKILIRPMPASGINDIKASLVTPYGLVSVKMNCSNGCITVDVVIPPNTEALLYLPGKEEEIAAGSSNHHFVYDTDINLDISSIL

SEQ ID NO: 74621 - DNA, 312 bp, Unknown
  Obtained from environmental sample
  misc_feature (1)..(312): n is a, c, g, or t
atgcgtctgccctgggggaaaagtagcctcgccttgccatgcctgccgggaactgctattttcatatcactggaggccgctatgtccgctacaatttttgacacccttggatactttgaaaaactcaaggccgtgggtgtgccggaagaacaagccaaggtacaagccggcgcgttgcgggaactcattgaggataagcttgcaacaaagcaagacctgaaagagcttgaatacaggcttacaatccgccttggcggcatgatagccgctgccgtggccgttcttgccgctttgatggccttgttgaagtag

SEQ ID NO: 74622 - protein, 103 aa, Unknown
  Obtained from environmental sample
  SIGNAL (1)...(27)
  misc_feature (1)..(103): Xaa is any amino acid
MRLPWGKSSLALPCLPGTAIFISLEAAMSATIFDTLGYFEKLKAVGVPEEQAKVQAGALRELIEDKLATKQDLKELEYRLTIRLGGMIAAAVAVLAALMALLK

SEQ ID NO: 74623 - DNA, 654 bp, Unknown
  Obtained from environmental sample
  misc_feature (1)..(654): n is a, c, g, or t
ttgagaatcagggcccaggcggagcggcttgcctcaaacatcaaagccgatgccaagacagaggccgaaaagataaaggcaagggcaaacgaactaacggctaaggcagaacatgcgctagaggcggcgcagcagaacgcggcttggaccataagcgaggccaacaagcgggcggagaagatagccggcgacgcatacaaggccatgcagaatgccgacctctaccatgagaccgtacaggcaatgaagaacatgattgacggctatggtgacaagtatattgtctcaacgtccgcaatgcttgatgaactcgcggcgcagtatggcttcacggacgcgggcgaacagctcaagaaagctatggaacacgccgacatgctctttgaaagaggcagggccgccacctgcgattatgtggagaagaacagggagaccaccgccatcaagttcgtgctgtatgcgttccatggcgcgtttgacagtgtgctggcgaaagccaagcacgacaactttggcaagctggagcgcagatacgcgaccacttcaccgtcatcaacttcaacggtcagtcgttccgcaacgccaagatactcgaagaatacctacaggcaaagattatggtcctcaaatggacggtggccgtcaacgagataa

SEQ ID NO: 74624 - protein, 217 aa, Unknown
  Obtained from environmental sample
  misc_feature (1)..(217): Xaa is any amino acid
MRIRAQAERLASNIKADAKTEAEKIKARANELTAKAEHALEAAQQNAAWTISEANKRAEKIAGDAYKAMQNADLYHETVQAMKNMIDGYGDKYIVSTSAMLDELAAQYGFTDAGEQLKKAMEHADMLFERGRAATCDYVEKNRETTAIKFVLYAFHGAFDSVLAKAKHDNFGKLERRYATTSPSSTSTVSRSATPRYSKNTYRQRLWSSNGRWPSTR

SEQ ID NO: 74625 - DNA, 351 bp, Unknown
  Obtained from environmental sample
  misc_feature (1)..(351): n is a, c, g, or t
atggtcctcaaatggacggtggccgtcaacgagataaagctgatggagagagaagagcagcgcaggatacgggaacaaattaaggaagaggagcgggcgcaaaaggaattcgagcgtgccctgcgggaggcagagaaggaagaggatacgctgcggaaggccatggacaaggtgaaagaccagatggaaaaggcatccgaggaacagcgggacaagtacgagaaaaacttgccgacatggaggaaaagctgcgccaagcggaggaaaagaaccacgcgcaaagtcaatggcggagcagacnaagtgcggtcacgtctatatcatctcgaacataggttccatcggagatga

SEQ ID NO: 74626 - protein, 116 aa, Unknown
  Obtained from environmental sample
  misc_feature (1)..(116): Xaa is any amino acid
MVLKWTVAVNEIKLMEREEQRRIREQIKEEERAQKEFERALREAEKEEDTLRKAMDKVKDQMEKASEEQRDKYEKNLPTWRKSCAKRRKRTTRKVNGGADXVRSRLYHLEHRFHRR

SEQ ID NO: 74627 - DNA, 471 bp, Unknown
  Obtained from environmental sample
  misc_feature (1)..(471): n is a, c, g, or t
atgaatttacaaaattttgaaggcgatcttttattagaagacacgctggatggtggcgatatcgttatattggacggactcatatcaagcgactgcgcatttgacacggctgtatacctttctcttttcggcgggaaccaagatgacaacggaaaggtcaggaacagaaagacatggtggggaaatactctgcgcggagtcagcgaaaatcaaaagctcgtctcgcggtttcaggcgattatattcggacttcccatgacaacaaaaaacatactggacaccgaggaagccgctaagctcgacctccagtggatgatcgacgagaaattagcggatgagattttagcggacggcagagtggtttcaaacattcgattccatctgaaaattcaaatcaaattgaagggaaaaacagtttatagcagtacctttgttattccctggaaggcaggatcacatggcacagtttga

SEQ ID NO: 74628 - protein, 156 aa, Unknown
  Obtained from environmental sample
  misc_feature (1)..(156): Xaa is any amino acid
MNLQNFEGDLLLEDTLDGGDIVILDGLISSDCAFDTAVYLSLFGGNQDDNGKVRNRKTWWGNTLRGVSENQKLVSRFQAIIFGLPMTTKNILDTEEAAKLDLQWMIDEKLADEILADGRVVSNIRFHLKIQIKLKGKTVYSSTFVIPWKAGSHGTV

SEQ ID NO: 74629 - DNA, 720 bp, Unknown
  Obtained from environmental sample
  misc_feature (1)..(720): n is a, c, g, or t
atgattgatgctagtatttttggggttcctcaaagcaggcataggtttgttatgttagctattgataaaaatataaatattgatggtaatccttttgataaacttttatctatggcaaaatcatttaggaaagataaaggactaccagaagaaggtattatttctgtttcaaatgctctttctaatcttcaaacatatagtggtaaatatgtagaagaatctcatgaaaataaaggttatatgcaaataaaatacagaagaaactgtaactcaaaatatcaacaattaattcataatgattgtccattagattatactccaaacggtctccgattagcaaagcacaagaaagagatagtaaaaagatttaagactatattaaaaaaatgtgaaaaaggaaaaaatgtaccaaaggagaaacttaagaaactgggtacaaataagttttcatttacaccgttacaccctaataaattatctagaactataacgacgctcccagatgattttttacattattcagaaccgagaattttaactgttcgagagaatgctagattacaatcttttcctgattggtttgaaataaagggaaaatataccacaggcggaaatcggcgtaaaaaagaatgtcctaaatatacacaagttggtaatgctgtaccaccattacttgcggaagtattggggaaactaatcttagaaataaataggaaataa

SEQ ID NO: 74630 - protein, 239 aa, Unknown
  Obtained from environmental sample
  DOMAIN (1)...(235): C-5 cytosine-specific DNA methylase
  misc_feature (1)..(239): Xaa is any amino acid
MIDASIFGVPQSRHRFVMLAIDKNINIDGNPFDKLLSMAKSFRKDKGLPEEGIISVSNALSNLQTYSGKYVEESHENKGYMQIKYRRNCNSKYQQLIHNDCPLDYTPNGLRLAKHKKEIVKRFKTILKKCEKGKNVPKEKLKKLGTNKFSFTPLHPNKLSRTITTLPDDFLHYSEPRILTVRENARLQSFPDWFEIKGKYTTGGNRRKKECPKYTQVGNAVPPLLAEVLGKLILEINRK

SEQ ID NO: 74631 - DNA, 909 bp, Unknown
  Obtained from environmental sample
  misc_feature (1)..(909): n is a, c, g, or t
gtggcgagctggctgattggacctcacggcggggtgagcggtggaatccacgtcacggacgtcaccaatgcatcgagaacccttttgatgaacatacgcacccttgaatgggacgaggaaatgttggactttctggagattcccatctccatgatgcctcgaatcgagccttccagtttcatatacggtaaaacggccaagagcgccgctttaggcgtgggagttcctattgccggaaatctcggagaccagcaggcggcgcttttcggacaggtgtgttttgagcctggatctgtgaaaaatacctatggtacgggactttttatgctcatgaacacgggaggcgtttgcgcatcctcgttaaacggacttttgactactccggcctacagtttgaaaagagggagctgcgtttatgcgttggagggctccgtggccatgggcggggccacattgcagtggctgcgcgacaacttaagaatgatcgattcaaccgaggacagcgcttatttagcacagaaggccaaggactcgggtggcgtgtattttgtcccggctttttccggcttgttcgccccgcattgggacatggacgccagaggggtcatcgtcggccttacgcgttacatacgcaaggaacacctggtttacgccgcgttggagagtatatgctaccagaccagggacgtactcgaggcaatgcaaaaggactccaacattaacgtgtcggagatgaaggttgacggcggcgccgttgtgaacgatgttttaatgcagatgcaggctgacatggcgggaagcggcgtagtacgcccaacgttcagggaaacaacggccctgggcgccgcgtatgcggcaggacttgcngttggattctggagttcaccagcttctctgaaagcattgtga

SEQ ID NO: 74632 - protein, 302 aa, Unknown
  Obtained from environmental sample
  DOMAIN (93)...(302): FGGY family of carbohydrate kinases, C-terminal domain
  misc_feature (1)..(302): Xaa is any amino acid
MASWLIGPHGGVSGGIHVTDVTNASRTLLMNIRTLEWDEEMLDFLEIPISMMPRIEPSSFIYGKTAKSAALGVGVPIAGNLGDQQAALFGQVCFEPGSVKNTYGTGLFMLMNTGGVCASSLNGLLTTPAYSLKRGSCVYALEGSVAMGGATLQWLRDNLRMIDSTEDSAYLAQKAKDSGGVYFVPAFSGLFAPHWDMDARGVIVGLTRYIRKEHLVYAALESICYQTRDVLEAMQKDSNINVSEMKVDGGAVVNDVLMQMQADMAGSGVVRPTFRETTALGAAYAAGLAVGFWSSPASLKAL

SEQ ID NO: 74633 - DNA, 912 bp, Unknown
  Obtained from environmental sample
  misc_feature (1)..(912): n is a, c, g, or t
atgcagccggtaattaccaattccgacaaagcgctggccacagtcaacagcctgaccgccgggcaatatgtatttcaaataaaagtaacggatagtaaaggtgcgtatgatatagccaccacaaccattaccgtaaatccggcgaccgaacctccccagtataatccgccgacagcgagcgtcagtgttaatcaatctaccatcaaattgccgactaactccgtaatcttacagggtagccttcaagaaggcgatgccgccattgattactatacgtggaaaaaaattagcggtccggccggcggtataatagtcaaccccaatgatctaaccgacgtagaagtaattaacctgcaggaaggaacttacgtatttgaactcgaagcaaccgatagcaataaacagaaaggcgccgccagagttacagtcatagtacaggcggccaatgttccgccgacagctaatgccggagccaagcaaacgcttatcctgccttttggtgaaacggctttgaatgatgtaaccctgaacgccagcggctcaaccgacagcgatggcgagattgtttcctatgaatggacccaaataggcggaccaaataccgttactctggctaatacaagcagtgcaattgccacggccgacggcttgatagccggtacatacaaatttcaagtaaaagtcacagataatgaaggcgcttctgatacagccgtgctggaaatagatgtagtaaatcaagaaacaactacggaaaccaagtacattaccataaccttttctttaccttcacccccagacaataataaccttcctggattagacttacgcccacaattacacctacgggcggctgggacacaaatttcccggaaggttgtattacctatgacggcccaaatacagttttag

SEQ ID NO: 74634 - protein, 303 aa, Unknown
  Obtained from environmental sample
  DOMAIN (166)...(244): PKD domain
  misc_feature (1)..(303): Xaa is any amino acid
MQPVITNSDKALATVNSLTAGQYVFQIKVTDSKGAYDIATTTITVNPATEPPQYNPPTASVSVNQSTIKLPTNSVILQGSLQEGDAAIDYYTWKKISGPAGGIIVNPNDLTDVEVINLQEGTYVFELEATDSNKQKGAARVTVIVQAANVPPTANAGAKQTLILPFGETALNDVTLNASGSTDSDGEIVSYEWTQIGGPNTVTLANTSSAIATADGLIAGTYKFQVKVTDNEGASDTAVLEIDVVNQETTTETKYITITFSLPSPPDNNNLPGLDLRPQLHLRAAGTQISRKVVLPMTAQIQF

SEQ ID NO: 74635 - DNA, 552 bp, Unknown
  Obtained from environmental sample
  misc_feature (1)..(552): n is a, c, g, or t
gtggagaaatgggagaaactgaacagtaagtattacgaaaagatggggagaaatctggcacccggttgggagtggggaaatatgtttaattgtaaaaaacctcgatttgtgcttcttcatacatttgcacatctattaattagacaattaacggctcaatgcggttatgctaccgcctctgttaaggaacgaatatattcaacttttaatgacattgatgaaaaaatgagcggaatattaatctacacatcggctaccgacacggatggcagtctcggtggtcttgtaagagaaggtgaatcctcaagaatcggtaatacaataagagggcttttggaagaatcatcatggtgttcaaacgatccgatttgtattgaatctaaaaatcaaggattcaggggattaaattatgcctcttgtcatgcctgtacattacttccagaaacaagttgcgaacattttaattgtctacttgatagggcatcgattacaggtttaccggataacgataataaagatattggtttttttaagaatttgttgattggatga

SEQ ID NO: 74636 - protein, 183 aa, Unknown
  Obtained from environmental sample
  misc_feature (1)..(183): Xaa is any amino acid
MEKWEKLNSKYYEKMGRNLAPGWEWGNMFNCKKPRFVLLHTFAHLLIRQLTAQCGYATASVKERIYSTFNDIDEKMSGILIYTSATDTDGSLGGLVREGESSRIGNTIRGLLEESSWCSNDPICIESKNQGFRGLNYASCHACTLLPETSCEHFNCLLDRASITGLPDNDNKDIGFFKNLLIG

SEQ ID NO: 74637 - DNA, 645 bp, Unknown
  Obtained from environmental sample
  misc_feature (1)..(645): n is a, c, g, or t
atgctgccttcggcgcggataaatgaagtaacgggcgtaaacagcctgaaacacagcgagaacgccggttatcgcagggattgggataactattcgcttaccataaaaagaaccggcagaacggtttacgaaacggcggagggggaaaagtacgttaccgattcggaacacctcctgcttttgcgcgagggcctgtcgtgctttatccgggcgggaattggcgaatgtataaccgtcgagttcagcggcagttttgcggcggccctgccggaaatctcgctgtttaccattaaacgaaacgcccccgcggttaacatcattcttgaccggatcgaaaaagaatggacttttaagaaaacatcgtatcagaatatgtgcctttccggactctaccagcttttagccgttcttgaaagggataatgataccgccggcgcttcggcgaaatataattcgcatctccggcccgcgctggattacatggaacaaaattttggtaattccgaattgggtaatgacgaactggcggaggcggtgaatttaagcacttcctattttcgcaaaatatttcaggatatatttcaggtttcgccgatgncgtacctccagtctctgcggatcgaaaagccaaagaacagcttttaa

SEQ ID NO: 74638 - protein, 214 aa, Unknown
  Obtained from environmental sample
  DOMAIN (156)...(203): Bacterial regulatory helix-turn-helix proteins, AraC family
  misc_feature (1)..(214): Xaa is any amino acid
MLPSARINEVTGVNSLKHSENAGYRRDWDNYSLTIKRTGRTVYETAEGEKYVTDSEHLLLLREGLSCFIRAGIGECITVEFSGSFAAALPEISLFTIKRNAPAVNIILDRIEKEWTFKKTSYQNMCLSGLYQLLAVLERDNDTAGASAKYNSHLRPALDYMEQNFGNSELGNDELAEAVNLSTSYFRKIFQDIFQVSPMXYLQSLRIEKPKNSF

SEQ ID NO: 74639 - DNA, 783 bp, Unknown
  Obtained from environmental sample
  misc_feature (1)..(783): n is a, c, g, or t
ttgggccggggtttccgctttcatggggtaaattccgaaaggaattggaatggtttgaaaacgtcgctttttttttttccaaaaattttttccataataaacgcctcgctctggcttttaatttcacaaatatcgcaaaaaatagacggatttaaagtacttgctaaaaaaatcggcgatacgatagtgcaaaacccgccgctttccgtcggcgaaggaaatttaatttgccaaggagtaaacgaggagttagataaactgcgaaacttacagcaggacgcaaaatcgtttatcgccaaattgcaggaagaagagcggcaaaatacgggcatagaaaaccttaaagtagcgtttaacggcgttttcggatactttttcgaggtatccaaatcgcaaataggcaaagtgccgaattatttcataagaaagcaaaccatagcaaacggcgaaagatacataacgcccaaactcaaagaatttgaggaattggttctcggcgcaaaagagagaatcgacgttttggaaaacagtgttttttgcgatttgcggactttcgtcgcgtcgttttgcgaaaagattcaggaagcggcgcaaaacatagccgttctcgacgtgctttgcaattttggaaaatgggcgtcgataaacgcttattgccgtccggttttaagcgataattcggatatgcttattaccgacggcagacatcccgtcgtagaaacgatgactaacgagcagtttgttccaaacgacacaaatttgacttcggctaaacaaatttga

SEQ ID NO: 74640 - protein, 260 aa, Unknown
  Obtained from environmental sample
  DOMAIN (79)...(170): MutS family domain IV
  misc_feature (1)..(260): Xaa is any amino acid
MGRGFRFHGVNSERNWNGLKTSLFFFPKIFSIINASLWLLISQISQKIDGFKVLAKKIGDTIVQNPPLSVGEGNLICQGVNEELDKLRNLQQDAKSFIAKLQEEERQNTGIENLKVAFNGVFGYFFEVSKSQIGKVPNYFIRKQTIANGERYITPKLKEFEELVLGAKERIDVLENSVFCDLRTFVASFCEKIQEAAQNIAVLDVLCNFGKWASINAYCRPVLSDNSDMLITDGRHPVVETMTNEQFVPNDTNLTSAKQI

SEQ ID NO: 74641 - DNA, 387 bp, Unknown
  Obtained from environmental sample
  misc_feature (1)..(387): n is a, c, g, or t
atggaagaattgcaaacgctcaccgccgggacacgttttgccgaagtgcgtgcctttctcgcaaagtattatggagcagggacaggtcaagaactcaatcgtccgatggacacggtaaccacaaaagaccgtttcggcatcgtgactgttcacggcgccgactacgccatcgtggacatcggtatgcgcatgttacagccgaaggaactgttgcttgcgaacggctttccggcttcctactccattgcccatgacgccggcggcaagcctctgaccaaagaacaacaggtgcggctcatcggcaacagcgtatgcccgcctatggcctatgccctggtgatggcgaattacgttgatcctgcgcgcaagacgagggaggccgtgtga

SEQ ID NO: 74642 - protein, 128 aa, Unknown
  Obtained from environmental sample
  misc_feature (1)..(128): Xaa is any amino acid
MEELQTLTAGTRFAEVRAFLAKYYGAGTGQELNRPMDTVTTKDRFGIVTVHGADYAIVDIGMRMLQPKELLLANGFPASYSIAHDAGGKPLTKEQQVRLIGNSVCPPMAYALVMANYVDPARKTREAV

SEQ ID NO: 74643 - DNA, 951 bp, Unknown
  Obtained from environmental sample
  misc_feature (1)..(951): n is a, c, g, or t
gtgaagcgcagagtatcacccgccaatatttgtaaaaccataagtttgtacgcgcgctgtnatctttccaatcactgtgccaatgcntgcgtgtactgcggtttccatgccggacgggatataccgcggcgcaaattaaacgggacagaaatagaaaaagagtgccaggctctggcgcggtccggagtgcagagcattttgcttttgaccggcgagtcccgtaaagatgcgccgccggaatatctggaacaggctgtgcgcattgccggaaaatattttgccggcgtttctctggaagtttatccgctggaaacggcagagtatgcgcgtctgaacgcggcaggctgtgacggcgtgacggtttttcaagagacttatgataaagaacgttacgcggtcttgcacccggccggtaaaaaaagcgactatgcttaccgttatgacacaccgcgccgcgccgcgctgggcggcatgcggcaaataactatcggccctttgctgggtttgagcgattggcggcaggatgtagtagcggcgcaggcgcatctgcgcgcgctggaaaaagaatttcccggcgtggaatacgcgctgtcttttccgcgcctgcaaaaattaagtgattacaccgatgatggttatttagtgggcgatgcggatatggtaaagattatctgcgtgacgcgcgcgctttttccccgaatcggcctcaatctttccaccagagagcggccggaattccgggaccgggcggtgcatttcggcataacgaaaatctccgccgggtctttgaccagtgtcggcggttatgctgatgcggccgctaaacatgatcgctgctcggccagccagtttgaaacaagcgacaaccgttccgttgccgaaataaaagccatgctggaaaagcagggttttgacccggtgtttacagagtggcggtgtttagtgggataa

SEQ ID NO: 74644 - protein, 316 aa, Unknown
  Obtained from environmental sample
  DOMAIN (20)...(181): Radical SAM superfamily
  misc_feature (1)..(316): Xaa is any amino acid
MKRRVSPANICKTISLYARCXLSNHCANACVYCGFHAGRDIPRRKLNGTEIEKECQALARSGVQSILLLTGESRKDAPPEYLEQAVRIAGKYFAGVSLEVYPLETAEYARLNAAGCDGVTVFQETYDKERYAVLHPAGKKSDYAYRYDTPRRAALGGMRQITIGPLLGLSDWRQDVVAAQAHLRALEKEFPGVEYALSFPRLQKLSDYTDDGYLVGDADMVKIICVTRALFPRIGLNLSTRERPEFRDRAVHFGITKISAGSLTSVGGYADAAAKHDRCSASQFETSDNRSVAEIKAMLEKQGFDPVFTEWRCLVG

SEQ ID NO: 74645 - DNA, 687 bp, Unknown
  Obtained from environmental sample
  misc_feature (1)..(687): n is a, c, g, or t
atgaataaaattatcgcagttctatcattttgtcagtttatcatgtcagcctattgtcaggttgcaaaacctgataccatttatatatacgaaacggtaacagtatatgatactgtcgtaatccgcgatactgtccgcataaggaaggctaaagacctgtcattattacagccgtcaggtgttgaagaaaaaactttttcaatgccggctgccaccttttcagaaaagggcatcatatataaaaatataaataaagacatgaatttgaaaattgcaagttatattagcggcgttatattaaccgcacaaacaattgtcggcgtctcggcgcaggatacgctatcaatgcaggatacgccatcaaaggaagaccttccgttgatgccgatgcagttcagcattgtttacccaatgacaactatgggcaaccaaacggtaaattaccgttataacttttcgttgaatttgatttcgggttatgttggcgctataacaggcgttgaatacggatgtatctttaactatgtgaaaaacgatatgacaggtgtgcaatttggcggtattggcaataaaacaggcgatgtaaacggagtactgtttggcggaattgtcaatgtttcggaaaacgttaaagggatacaattcggaggaataggaaatattgccaaagaagtaaacggcatatag

SEQ ID NO: 74646 - protein, 228 aa, Unknown
  Obtained from environmental sample
  SIGNAL (1)...(21)
  misc_feature (1)..(228): Xaa is any amino acid
MNKIIAVLSFCQFIMSAYCQVAKPDTIYIYETVTVYDTVVIRDTVRIRKAKDLSLLQPSGVEEKTFSMPAATFSEKGIIYKNINKDMNLKIASYISGVILTAQTIVGVSAQDTLSMQDTPSKEDLPLMPMQFSIVYPMTTMGNQTVNYRYNFSLNLISGYVGAITGVEYGCIFNYVKNDMTGVQFGGIGNKTGDVNGVLFGGIVNVSENVKGIQFGGIGNIAKEVNGI

SEQ ID NO: 74647 - DNA, 330 bp, Unknown
  Obtained from environmental sample
  misc_feature (1)..(330): n is a, c, g, or t
atgacggaacctctcttgacggtaacaagtgagctgccggcagatgttgaaatactggcatccggcgtcaggggaatatgccaaaacgtccggacaatattagcgacgtggcgcggaacgctgtttttagacagaacatttggaatcaaccccgatattgttgacaagccaatgacgacggtacgcacaaaggcaatgaatgacgtgattactgaaattgaaaagcaggaaccgcgcgtttccgtagtatcggtggactttgccgganatgacaacggacagttattgataagcgtcaaagtaagaatcagaagcggagtgctgctttaa

SEQ ID NO: 74648 - protein, 109 aa, Unknown
  Obtained from environmental sample
  DOMAIN (23)...(109): GPW / gp25 family
  misc_feature (1)..(109): Xaa is any amino acid
MTEPLLTVTSELPADVEILASGVRGICQNVRTILATWRGTLFLDRTFGINPDIVDKPMTTVRTKAMNDVITEIEKQEPRVSVVSVDFAGXDNGQLLISVKVRIRSGVLL

SEQ ID NO: 74649 - DNA, 600 bp, Unknown
  Obtained from environmental sample
  misc_feature (1)..(600): n is a, c, g, or t
atgaaacatccgggcggcgcgaatatcgaagatgatgaatcgctgcggaaccggataatgctaaagccggagtcatttaccacggcaggatcggaactggcgtatgtctactgggcgctttcggcgcatcctgatattcaagatgtgtcagtaatatcgccgcttccgggtattgtaaatgtgtttgtgcttttgtccgacggacgcatacctcaaattgacgggacggagattaaagcggtaattgatatgctgtcaagccgtaaaatccgaccattgactgattttgttacagtttttcctgtagacaaactcctcacggattatacggtgaagtggtttatcactccgaatcaatccagccatgtaaatgaaattgaggacggcataaagaaggctgccgccgagtatgaagcatggcaaaccgcacgaattggacgcgatattattcccgacagattaatacaactgtgccagagcgcgggcgcaaagcgcgttgttacgaacggtttgaatttcacccagcttgataattcggttgtcgcaaattttgtcgataatcccaaccgcgtattattcggcggaatggaggctgaatga

SEQ ID NO: 74650 - protein, 199 aa, Unknown
  Obtained from environmental sample
  DOMAIN (2)...(157): Baseplate J-like protein
  misc_feature (1)..(199): Xaa is any amino acid
MKHPGGANIEDDESLRNRIMLKPESFTTAGSELAYVYWALSAHPDIQDVSVISPLPGIVNVFVLLSDGRIPQIDGTEIKAVIDMLSSRKIRPLTDFVTVFPVDKLLTDYTVKWFITPNQSSHVNEIEDGIKKAAAEYEAWQTARIGRDIIPDRLIQLCQSAGAKRVVTNGLNFTQLDNSVVANFVDNPNRVLFGGMEAE

SEQ ID NO: 74651 - DNA, 870 bp, Unknown
  Obtained from environmental sample
  misc_feature (1)..(870): n is a, c, g, or t
atgggcaccgattttttggtttgccatcccaacacaggctatttgtgtattgaagtaaaaggaggcggaattactcgtgatgaggagaaaaaatggttttctttggatcgagaaaacgagaaatacgaaatcaaagatcctgtcgagcaaggaaaaaatgctaaatattcaattctctccaaacttaaagaatctccgatgtggaagaaccttaacaggggatggattctatgtggacatgctgtgtttttgccagatattggcgaagccggagtcaataatttaaaaatcgcagcagacattcctcctgttggttatgatgaaactcttaaagatcctaatgcatggattgatgatgcattcgttttctggagtagccaaaagaaggggttcgaccctattggtaatgatggcatagatgtgatcaaagaaatatttgccagacaatttgaaatccattctcttgtggcagcgcgaatatccgatcaggaattgatcagtgtgatgttgaccaataatcagatgcatgtccttgattaccttcgttcacatcggcgtgtcaaggttagcggcggagctggcacaggcaaaacacttctagcacttgaaaaagctaggcgcctcgccatggagaaattcaaaactcttcttatttgttacaacaggcaacttgcagatcatttatccaatttaacctctaaagatgaaaaccttgacgtgaagaattttcacaaactttgcaaggatttagcaaatgccgccaagaacgtatcgaaaagagatttagatcaggaagccaaagccaaatctggtggggaaatactgtttattggaacgaaggactccctaacgccctttctgaagctttaa

SEQ ID NO: 74652 - protein, 289 aa, Unknown
  Obtained from environmental sample
  misc_feature (1)..(289): Xaa is any amino acid
MGTDFLVCHPNTGYLCIEVKGGGITRDEEKKWFSLDRENEKYEIKDPVEQGKNAKYSILSKLKESPMWKNLNRGWILCGHAVFLPDIGEAGVNNLKIAADIPPVGYDETLKDPNAWIDDAFVFWSSQKKGFDPIGNDGIDVIKEIFARQFEIHSLVAARISDQELISVMLTNNQMHVLDYLRSHRRVKVSGGAGTGKTLLALEKARRLAMEKFKTLLICYNRQLADHLSNLTSKDENLDVKNFHKLCKDLANAAKNVSKRDLDQEAKAKSGGEILFIGTKDSLTPFLKL

SEQ ID NO: 74653 - DNA, 960 bp, Unknown
  Obtained from environmental sample
  misc_feature (1)..(960): n is a, c, g, or t
ttgatggccggaactgggttttttcttgaggagagcgcgtttgacgcgattgtccgcaacagggagcggctcgcaattgtttcgatggagcgtatctccgacgagttgaataagataatgatgagccgccgcccttctaccggttttatcctgatggacaagacgggcatactgccgctgatattgcccgaactgcacgcgctgaaaggcgtagagacaaaggagggaaaggggcacaaagacaacttcctgcatacgcttgcggtggtcgataatgtggcggaaaagtcggacaacctgtggctgcgctgggctgccctgttgcatgatatagccaaacccgtaaccaagcgtttcgacgcgcaactgggctggactttccataatcacaattacattggcgaaaagatgataccgggtattttcaagcggctgaagatgccgctgaacgaccggatgcgctttgtgcaaaaaatggtatcgctacacatgcgcccgacagtgctttcggcggacgagattaccgactcggcagtgcgccgcctcctctttgatgcgggggacgatgtggacgacctgatgtgcctttgccgagcggacatcacctcgaaaaaccccgataaagtacagcaatacatgcagaactttgccattgtgagccgaaagatgaaagacatcgaggcgcgcgaccacattcgcaacttccagccgcccatctcgggagacttcatcatgcgaaccttccacctgccgccctgcgcagaggtcggcatactgaaaatggcaatcaaagacgccattcttgacgggcaaataccgaacgaatacgagcccgcccgccaatacatgtgggcaaaggcaaaggagatgggcttacttgcgggtgattctcgccccaagagcggtttagccgcttatcaatatcctgatagccgcggtcaatccgggtcatgtggttga

SEQ ID NO: 74654 - protein, 319 aa, Unknown
  Obtained from environmental sample
  DOMAIN (82)...(205): HD domain
  misc_feature (1)..(319): Xaa is any amino acid
MMAGTGFFLEESAFDAIVRNRERLAIVSMERISDELNKIMMSRRPSTGFILMDKTGILPLILPELHALKGVETKEGKGHKDNFLHTLAVVDNVAEKSDNLWLRWAALLHDIAKPVTKRFDAQLGWTFHNHNYIGEKMIPGIFKRLKMPLNDRMRFVQKMVSLHMRPTVLSADEITDSAVRRLLFDAGDDVDDLMCLCRADITSKNPDKVQQYMQNFAIVSRKMKDIEARDHIRNFQPPISGDFIMRTFHLPPCAEVGILKMAIKDAILDGQIPNEYEPARQYMWAKAKEMGLLAGDSRPKSGLAAYQYPDSRGQSGSCG

SEQ ID NO: 74655 - DNA, 435 bp, Unknown
  Obtained from environmental sample
  misc_feature (1)..(435): n is a, c, g, or t
atgcacatccttgcccgactttatttttatgccatcgaaagaaaaatctgcgatatagcagataataactgcttgcaagcagacaataaatgctatatagcagaaaagttttgctacatagcagataaaaaatgcgatatagcaaataaaaaatgctatatagcagatgaaaattgcgatatagcagataaaaaatgcgatatagcaaatgaaaaatgctatatagcagaaaagttttgctatatagcagaaaaaaaatgcgatatagcaaataaaaaatgcgatatagcaaataaaaattgcgatatagcagataaaaaatgcgatatagcaaataaaaattgcgatatagcaaatgaaaaatgcgatatagcagacaagaaatgcgatatagcaaaaaagttttgcttatacgcaaaagactgtcatccgtag

SEQ ID NO: 74656 - protein, 144 aa, Unknown
  Obtained from environmental sample
  misc_feature (1)..(144): Xaa is any amino acid
MHILARLYFYAIERKICDIADNNCLQADNKCYIAEKFCYIADKKCDIANKKCYIADENCDIADKKCDIANEKCYIAEKFCYIAEKKCDIANKKCDIANKNCDIADKKCDIANKNCDIANEKCDIADKKCDIAKKFCLYAKDCHP

SEQ ID NO: 74657 - DNA, 348 bp, Unknown
  Obtained from environmental sample
  misc_feature (1)..(348): n is a, c, g, or t
atgcgaaaactttggttgaacgattttgtagagtttaaaacgtttttcgatgaggtcaatcgcaagctggtcctgcgtcagcacttattccatatttatttcaagtcatccgaatgtaccgaaaatgatatgaaaacacttgccgaaaaaaccaaaaaattgggttatcggttggaagctgttcaggattttacgccaacaccaatgacgttagctaccgaaatgtaccataccggatatgacccttatactctaaaaaaaatctattgtgccaaaactcctgaagacaaacgtcgtcaaaatcaggcgtttttttggtggaaaaattcaaaaacttttataccatga

SEQ ID NO: 74658 - protein, 115 aa, Unknown
  Obtained from environmental sample
  misc_feature (1)..(115): Xaa is any amino acid
MRKLWLNDFVEFKTFFDEVNRKLVLRQHLFHIYFKSSECTENDMKTLAEKTKKLGYRLEAVQDFTPTPMTLATEMYHTGYDPYTLKKIYCAKTPEDKRRQNQAFFWWKNSKTFIP

SEQ ID NO: 74659 - DNA, 648 bp, Unknown
  Obtained from environmental sample
  misc_feature (1)..(648): n is a, c, g, or t
atgtcgaccattctgatcattgatgacgacttggagcttttcacccttcttcgcacgtattttgaaacggaaggcttggccgccgtcttggccgccgatgcggaaaaagggctgcgtgaagcgttcaaaggcggttatgacgccctaatcttagacgtcatgttgccgggcctgaatgggtttgaagtgctgcgccgcctgcgggcggaggaagccacggcccttctgcccattctcatgctcacggcccgcggtgaagagattgaccgagtggtcggccttgaaatgggggcggatgactacctggccaagcccttcagttcccgcgaactggtggcgcgcctgcgtgccattatgcgcagaactcactttggccaagccaattcactcttgcggcgggtggacgacttaagcatcaaccgcgcctcgctttgcgtcggcataaacggtcggcaacaggatttaactgtttccgaactgcgcctcctcagccttcttacccaaaattcaggtgaaattgtaagccgcgatgccttgtccaaatccatattcggccacccggcctatcctctggatcgtagcttggatatgctggtcagccgcttgcgaaaaaactcggcccgcgcccggacggcggtgaacggataa

SEQ ID NO: 74660 - protein, 215 aa, Unknown
  Obtained from environmental sample
  DOMAIN (150)...(214): Transcriptional regulatory protein, C terminal
  misc_feature (1)..(215): Xaa is any amino acid
MSTILIIDDDLELFTLLRTYFETEGLAAVLAADAEKGLREAFKGGYDALILDVMLPGLNGFEVLRRLRAEEATALLPILMLTARGEEIDRVVGLEMGADDYLAKPFSSRELVARLRAIMRRTHFGQANSLLRRVDDLSINRASLCVGINGRQQDLTVSELRLLSLLTQNSGEIVSRDALSKSIFGHPAYPLDRSLDMLVSRLRKNSARARTAVNG

SEQ ID NO: 74661 - DNA, 882 bp, Unknown
  Obtained from environmental sample
  misc_feature (1)..(882): n is a, c, g, or t
gtggcgggccgaagggatatgatgactgtttttcaaaaaatggccggggaataccgggccaggtatctggccggcctggccctcttgtttctcctcatcaacctggccctgcgtctggcgctgccgctgggcttctccgacaccgtgcgtttctcggccggaatgttcaccggcctcgtcaaaggggttttgaacgattgcgccaccctgcctttcgcgttgctgttaccgggcaccctcattttgacgccttccgacaaatttcttggtcggccccgggcgggtggcctatatgccacgctcatcacctttattttttcggccgtcctcattttctgcgctttcgccgaatacttcttttgggacgagttcgggtcacgcttcaacttcatagcggtcgattaccttgtttacactaccgaagtctggcggaacattgttgaatcctacccgctgttccatattttctcggccgtacttctgcttgcggcggggaccacggcctggcacaggaaaaaattatgtgccattccgcccatagtgaaagcgcacccagcccgcttctcgaggcacggcagttccggcggtcggcttggcctgcttggagggctctacgcaacggcggccctggtgttcctggccttcagtccgttgggcacggggcctgacaggttttggaatgaatacgccaaaaacggtctttatgagctgttttcagcttatttgaacaaccaacttgattatcgcgctttttacaagaccatgggccggccggaggctttcgcccgagctcgggaggaaaccagggacgcaggcttggtccggaccaaaggggaaagcctcacgcgggctggacggctcgtcctcctcggccgattctga

SEQ ID NO: 74662 - protein, 293 aa, Unknown
  Obtained from environmental sample
  misc_feature (1)..(293): Xaa is any amino acid
MAGRRDMMTVFQKMAGEYRARYLAGLALLFLLINLALRLALPLGFSDTVRFSAGMFTGLVKGVLNDCATLPFALLLPGTLILTPSDKFLGRPRAGGLYATLITFIFSAVLIFCAFAEYFFWDEFGSRFNFIAVDYLVYTTEVWRNIVESYPLFHIFSAVLLLAAGTTAWHRKKLCAIPPIVKAHPARFSRHGSSGGRLGLLGGLYATAALVFLAFSPLGTGPDRFWNEYAKNGLYELFSAYLNNQLDYRAFYKTMGRPEAFARAREETRDAGLVRTKGESLTRAGRLVLLGRF

SEQ ID NO: 74663 - DNA, 867 bp, Unknown
  Obtained from environmental sample
  misc_feature (1)..(867): n is a, c, g, or t
atgactatagatggtcaggatgcgcctcttgtttctgcaaagataagggcgaatattttttggcttggcaaagaagtactacgaaaagataaaaaatattctataaaaataggtacggaaaaaattggttttgttgttgaagaaatcatcagcataattaactcatccgatttaagcactgttgctggcgattgcgtaaactgcaacgaagctgcggaatgcataattaaaaccgacagagtttttgcatttgacattgctgaaaaatttgggaacacaagccgatttgtgatagtggatgattatgaaatcagaggcggtggaattatattatccgatgtcaaggacgaagaagacagtttacaaaaaaagataattctcagaaactataaatgggaacgtagcaaaatcagcattgaaaaacgggcagagcgttacaatcaaaaaccagttttgcttattttgacaggtgaagaaaaagttgataaaaaaaacttggctaaagaactggagcgttcccttgtggaaagtggtcgattcgcgtattatttggggataggtacgtttttgtacagcgtggactcggatgtcccaaatgggcacatacaccgttttgcggaagttgctaatttaatgcttgatgcgggaatgattttgataataactgcgagttcattaaaagaagcggatttaaggattattaagatgacaatcagcatggatatccaaacaatttgggtaggtagccaaattacaacggacataaatgcagatataattattgatgatacaagcgttgacgaaaacaaaaaaaatgtgctaatgctttgcgatttgctaaaaaataaaggttatatgtcaaattaa

SEQ ID NO: 74664 - protein, 288 aa, Unknown
  Obtained from environmental sample
  misc_feature (1)..(288): Xaa is any amino acid
MTIDGQDAPLVSAKIRANIFWLGKEVLRKDKKYSIKIGTEKIGFVVEEIISIINSSDLSTVAGDCVNCNEAAECIIKTDRVFAFDIAEKFGNTSRFVIVDDYEIRGGGIILSDVKDEEDSLQKKIILRNYKWERSKISIEKRAERYNQKPVLLILTGEEKVDKKNLAKELERSLVESGRFAYYLGIGTFLYSVDSDVPNGHIHRFAEVANLMLDAGMILIITASSLKEADLRIIKMTISMDIQTIWVGSQITTDINADIIIDDTSVDENKKNVLMLCDLLKNKGYMSN

SEQ ID NO: 74665 - DNA, 615 bp, Unknown
  Obtained from environmental sample
  misc_feature (1)..(615): n is a, c, g, or t
atgatcagatcggccgagaaaaaagatccgcttaagataataactcttgcaagggaacctttaagcagagactattctgcattttttcaattggttggatatgacttttgggaatttttaatgcaaccgggaaaatcatttgcagattcatgcgttgaatggatggaaaaatattacgattaccgttatttgatggctggctataatgaacatcaacataaagataatcatctcggttattttaactggtttgagaaagaacttaaagatggttttggagtggacttgcttgcccatccctttgacaaggaaaagggttattcaatcatcaaacagggcaatatagaggtgttggtgatgaaaatggagaaattaagcagtcttgaatcggtaataggcgaatttgtcggtgcgccaaatttcaaacttataaacaccaacgaagcgagcagcaagccgatttatgatttatacaaaaaaacaagagagattataaaaatccccagaaggctagtttctcgctattacgacaataatccgtatatggatcatttttatacagaagaggaaaaaacggcgtttttgaaaaagtgggaaaataatatagtggattaa

SEQ ID NO: 74666 - protein, 204 aa, Unknown
  Obtained from environmental sample
  misc_feature (1)..(204): Xaa is any amino acid
MIRSAEKKDPLKIITLAREPLSRDYSAFFQLVGYDFWEFLMQPGKSFADSCVEWMEKYYDYRYLMAGYNEHQHKDNHLGYFNWFEKELKDGFGVDLLAHPFDKEKGYSIIKQGNIEVLVMKMEKLSSLESVIGEFVGAPNFKLINTNEASSKPIYDLYKKTREIIKIPRRLVSRYYDNNPYMDHFYTEEEKTAFLKKWENNIVD

SEQ ID NO: 74667 - DNA, 939 bp, Unknown
  Obtained from environmental sample
  misc_feature (1)..(939): n is a, c, g, or t
ttgcattttagcataaaagatttgctcgcggttaagcgggtttctttgccaggagctgttgtgcaaagtttaaccgctacgatgctgcaaaccgtgtttttgtatttgcttgggtatccctgggaaaccggactgattataggcatggctgtttctgtggcaagcactgttgtccttatccgcgttctttcggataacgatgtgataaatacctctcaaggtcatatagctgtgggttggctgatagtagaggatattttcacggtactgatgttggtgctccttccagcgcttggcgggtttattttagacaaaggagatgtaatccctttgagcatctttggcatcactttatacgaaagcgaaacgagctttttgaccattcttctctcttttatctttgctatggtaaaaattggtttgctcgccgccgtggttttgctcggtggcaaaaaatttattccttggatactgagccaaatagcccgcacccgttctcgcgaattgttcaccctggcggttcttgctcttgccctgctcatagcaactggttctgttctcatctttgaggcgtcttttgccttgggcgcatttttagccggcatggcagtggggcaatccaagttgagcgagcaggcagcagcagatgccctgcctatgaaagacgcctttgccgttcttttctttgttgcggtgggtatgctgtttgaccctgttgtgttattggaacagatagaactctttttgattttaatgggcattatactcatcgcaaaaccccttgccgcttttattgtagttatcgttttgggttattcaacaactacggctttcaccgttgcactggcacttgcccagataggtgaattttcctttatcctttctggtgaagcgcgcaaactcggttttataacttccgaaaatgaaagcgtgctatag

SEQ ID NO: 74668 - protein, 312 aa, Unknown
  Obtained from environmental sample
  DOMAIN (1)...(312): Sodium/hydrogen exchanger family
  misc_feature (1)..(312): Xaa is any amino acid
MHFSIKDLLAVKRVSLPGAVVQSLTATMLQTVFLYLLGYPWETGLIIGMAVSVASTVVLIRVLSDNDVINTSQGHIAVGWLIVEDIFTVLMLVLLPALGGFILDKGDVIPLSIFGITLYESETSFLTILLSFIFAMVKIGLLAAVVLLGGKKFIPWILSQIARTRSRELFTLAVLALALLIATGSVLIFEASFALGAFLAGMAVGQSKLSEQAAADALPMKDAFAVLFFVAVGMLFDPVVLLEQIELFLILMGIILIAKPLAAFIVVIVLGYSTTTAFTVALALAQIGEFSFILSGEARKLGFITSENESVL

SEQ ID NO: 74669 - DNA, 840 bp, Unknown
  Obtained from environmental sample
  misc_feature (1)..(840): n is a, c, g, or t
gtgccgtggaatgataaatatatcggcaatcaggcgatgtctatccgcgccgcgcaggcaggcgacggcttcggcgatgctatatacggcgcgggcgatatcaacggcgacggctatgatgatttggtgatcggcgcgccttactatgatgagactgacaaggctgccggcaaggtaatccaaaatgccggacgtgcttatgttattttcggcggagagggcgttgaccgcaaatatgcccgcaccaattataatttcagcgcttcgagcgaggaatacgccgggccgatccgggcgggcgacgagcgctatttgtgggatttaacgggatcgaataccggaactttccccaaagacacgcacccgatcggctatattaaaaatcccaatacgcctgccaccgctaattacaacgcttacttcggcgccgcggtcttgaacggcatcaacttaaacggcgagaagatcgggcataccaggcagaccagcacgggtacggaatatgtagttactaaggacgtcagccagatactgatctccgcccccggctatgaccagtccaagggacgtgtctatatctacggccgggccaaccgtgacccggataattatacattgaaagaatttagcgatttccggatgaccggcgaatacgtcaacgagcagttcggttacagcctggccaatatgggcgacatcagcgctgatgacaatgcgggggtcaacccggctacgggcatcgcctggacgagcagcgacaaacgtccgctggtcggcgaggatttcgtcatcggtgcgcccggccatcccggcccggtcaaaaccctcggccgaatctga

SEQ ID NO: 74670 - protein, 279 aa, Unknown
  Obtained from environmental sample
  DOMAIN (24)...(69): FG-GAP repeat
  misc_feature (1)..(279): Xaa is any amino acid
MPWNDKYIGNQAMSIRAAQAGDGFGDAIYGAGDINGDGYDDLVIGAPYYDETDKAAGKVIQNAGRAYVIFGGEGVDRKYARTNYNFSASSEEYAGPIRAGDERYLWDLTGSNTGTFPKDTHPIGYIKNPNTPATANYNAYFGAAVLNGINLNGEKIGHTRQTSTGTEYVVTKDVSQILISAPGYDQSKGRVYIYGRANRDPDNYTLKEFSDFRMTGEYVNEQFGYSLANMGDISADDNAGVNPATGIAWTSSDKRPLVGEDFVIGAPGHPGPVKTLGRI

SEQ ID NO: 74671 - DNA, 477 bp, Unknown
  Obtained from environmental sample
  misc_feature (1)..(477): n is a, c, g, or t
gtgcccctgtgttttttgaaaatttcatttttcttcgtatctttgcaaacaaatttaatcataatgccctccgtcaaacaccaaggaaccgtcgtaaacattaaccaaaacatcgtttcggttgaaatcgtttcgctttcggcatgtgcatcgtgccaatcaaaatccgtatgccaactatcggaaagcaaggataaacgaattgatacgcgggtttccaatcccgaaaactacactatcggtcaatccgtaaatgttgtgatgcaagagcagcagggattgaaagcggttttttgggcttacgtcatgccgtttttcgtgtgcatcatcgttttatttgggttatccatgatttccgacaatgagttaatttacggcggtggcgcgatattgaccgcaatgctttattttttcggactgaaattagtttccaaaagattggcgaaagagtttgtttggtatttggaaagcaattaa

SEQ ID NO: 74672 - protein, 158 aa, Unknown
  Obtained from environmental sample
  DOMAIN (30)...(152): Positive regulator of sigma(E), RseC/MucC
  misc_feature (1)..(158): Xaa is any amino acid
MPLCFLKISFFFVSLQTNLIIMPSVKHQGTVVNINQNIVSVEIVSLSACASCQSKSVCQLSESKDKRIDTRVSNPENYTIGQSVNVVMQEQQGLKAVFWAYVMPFFVCIIVLFGLSMISDNELIYGGGAILTAMLYFFGLKLVSKRLAKEFVWYLESN

SEQ ID NO: 74673 - DNA, 429 bp, Unknown
  Obtained from environmental sample
  misc_feature (1)..(429): n is a, c, g, or t
atggctcagattattaatagcaacattccttcgttaaatgcacaacgtaacttaactacttcactcagttctttacagatttctttgcaacgtctgtcatcgggtttacgcattaacagcgccaaagacgatgcagcgggcttgggtatatccgagcgtatgaccgcccagattcgcggtatgaatcaggcaatacgtaatgccaatgacggtgtgtcaatggcgcaaaccgcagagggtgcattaaaaacatcgggcgatatgctccagcgtatccgtgaattagccgtacagtcatccaatgcaacgaactcggcgatagaccgtcaggcattacaagatgaggtcggacagttgacagcggaattgaaccggatggcgcttaccactgcgtttaacaaccagaaaatctggatgactcggcgataa

SEQ ID NO: 74674 - protein, 142 aa, Unknown
  Obtained from environmental sample
  DOMAIN (29)...(141): Bacterial flagellin N-terminus
  misc_feature (1)..(142): Xaa is any amino acid
MAQIINSNIPSLNAQRNLTTSLSSLQISLQRLSSGLRINSAKDDAAGLGISERMTAQIRGMNQAIRNANDGVSMAQTAEGALKTSGDMLQRIRELAVQSSNATNSAIDRQALQDEVGQLTAELNRMALTTAFNNQKIWMTRR

SEQ ID NO: 74675 - DNA, 612 bp, Unknown
  Obtained from environmental sample
  misc_feature (1)..(612): n is a, c, g, or t
atggcttcaatatctaggttgccttggctcaaacgccttttccccctgcgtcccggcgaggctcgcaaggcactgctgtctgccctgtattttttcctactgctgatgagctactatctcttgcgccctctgagggaaacattcggcattgctaggggcgcggacaaattgcccctagtgtggtcttgtacattgggcgcaatggcattggcgaacccactgtactctgcgcttatttcgagcagaccgaggagaaaattcatcccgtggacttatttcgcctttgccgcaatgctgttggcttttgggctgttttttcaatggctgcctgggcatggcggggcggctctcggctacacgttctatgtttggctgagcgtatttaacctcttcgtggtctcgattttttgggcgttcatgtccgacctgtacagcaaggaggacggccagcgtctctatgggttcatagccatcggtggcacctgcggggcgattgtcggctcttgggcgactgggatgttcagccagtggctcggccaagggcagtcgcagtggctattttacgcatcagcagccatcttggggctggcggtcacatgttctcggccataa

SEQ ID NO: 74676 - protein, 203 aa, Unknown
  Obtained from environmental sample
  misc_feature (1)..(203): Xaa is any amino acid
MASISRLPWLKRLFPLRPGEARKALLSALYFFLLLMSYYLLRPLRETFGIARGADKLPLVWSCTLGAMALANPLYSALISSRPRRKFIPWTYFAFAAMLLAFGLFFQWLPGHGGAALGYTFYVWLSVFNLFVVSIFWAFMSDLYSKEDGQRLYGFIAIGGTCGAIVGSWATGMFSQWLGQGQSQWLFYASAAILGLAVTCSRP

SEQ ID NO: 74677 - DNA, 852 bp, Unknown
  Obtained from environmental sample
  misc_feature (1)..(852): n is a, c, g, or t
ttgatgaaagataaaggcttggcagggtacatgttggcaaaggaaataggagcaagtgcggtcatgctttttggcacgaaactagaagaatatccttatctggcatatctgccagacatgcaattattatacactgaatcagagagcggtttggccgatgtctattatgatcatttgcgagcgaattacaataaaatggacatcctagtacttcatggactttcagaccaaatgctagaatatttaaatgagtatcgcaaatttcgtcccgatggcaaggtctattgcgggctcgatatgaacagctactatatgcttacagttaaatggagccatccagctgtacagcaccttatgatgcaatgcaatctaatcgcaacgtcatgtaaatcattgcgggatgagcttaaccgcaaatatacagttaatttcccatgtcgctatttcccaaatggtttttataatcccaaaaacattaaaattgttgctgaatcaagtataaaagaaaatacaattattactgtcgggaaaataggcacagacccaaaaaataacatggaactaattgttgcttttgcaaaagcttctgacgcattaaagaattggaaattaaagttaataggcagtatagaaccaaagttccaagttattattaataattttattgccatattccctgacttaaaagaacgcataatctttactggtgcaattaccaataaggatgaattgtacattgaatacgctaaagccaaaatattcgtattgacatcactatcggaaggcgggtccgccaaatggttatgcagaagccctatttcatggtggaatgttcattaccgccgacattga

SEQ ID NO: 74678 - protein, 283 aa, Unknown
  Obtained from environmental sample
  misc_feature (1)..(283): Xaa is any amino acid
MMKDKGLAGYMLAKEIGASAVMLFGTKLEEYPYLAYLPDMQLLYTESESGLADVYYDHLRANYNKMDILVLHGLSDQMLEYLNEYRKFRPDGKVYCGLDMNSYYMLTVKWSHPAVQHLMMQCNLIATSCKSLRDELNRKYTVNFPCRYFPNGFYNPKNIKIVAESSIKENTIITVGKIGTDPKNNMELIVAFAKASDALKNWKLKLIGSIEPKFQVIINNFIAIFPDLKERIIFTGAITNKDELYIEYAKAKIFVLTSLSEGGSAKWLCRSPISWWNVHYRRH

SEQ ID NO: 74679 - DNA, 600 bp, Unknown
  Obtained from environmental sample
  misc_feature (1)..(600): n is a, c, g, or t
atggaagccaaaggcgcggtcaacggcatcggcctggtcaaattgatggggcgtgaatcgggcttcattgcggccaacgccaccctggccagttgcgtggtgaatttttgcctgataccggaagcgccttttgctccggctaaatttctggcggatctggaacagcgcattttacggcggaaacatgctgtgattgtggtcgccgagggcgccgggcaggaactgataccggacgtttccgattttgataaatccggcaataaacgtttgcaggatatcggcgtttttctgaaacaggaaatcattaaacatttcacggcccggaaaatcgaggccaacgtgcgttacatagaccccagctacaccatccgttccgtggccccgaccggcgatgacaatgtgttttgtctcctgctcggtcagggcgctgtacacgcggctatgagcgggcgcaccgccacggtcatcggttaccgcaacgatcattacattcacctgccgatgagcctggtaacccgtttccgcaaaaaaatagaactcaacagccgtatctggcggaccgtgctggacaccaccgggcaggccgagtatagaccgtaa

SEQ ID NO: 74680 - protein, 199 aa, Unknown
  Obtained from environmental sample
  misc_feature (1)..(199): Xaa is any amino acid
MEAKGAVNGIGLVKLMGRESGFIAANATLASCVVNFCLIPEAPFAPAKFLADLEQRILRRKHAVIVVAEGAGQELIPDVSDFDKSGNKRLQDIGVFLKQEIIKHFTARKIEANVRYIDPSYTIRSVAPTGDDNVFCLLLGQGAVHAAMSGRTATVIGYRNDHYIHLPMSLVTRFRKKIELNSRIWRTVLDTTGQAEYRP

SEQ ID NO: 74681 - DNA, 726 bp, Unknown
  Obtained from environmental sample
  misc_feature (1)..(726): n is a, c, g, or t
atgggtgcggaaattaaagaacaggtcatcgccgaaattgagaaactgcccggccgggagacggaaaaagtttttattctggcgtccgagggctggcatccgggcatcatcggcatcgtcgcctcgcagatcgccaaacaatacaaccggcctacagcattgatcgctgtgtcggccaacggcggacgcggctcgatccgctcgctggagggcctggatatttttgaacccctgcaaagatgcggttatctgctcaaggatttcggcgggcataaagaagccgccgggtttgaaatagaaaaagggcgcatcgaggaatttaagaccgctttccgcaaggcgctcggggaagctccgggcggtagtaattacacgccgaaactcactattgatgccgttctggccaaagaacacatcaccaaagagctggcctatgctatagaaaaattccagccgttcggccagaacaatgcccagccggtattcaccaccaatgaattatctatctatcattttgaactcatcggcggagggaagcatttacggttttcgctgactgacggcattgagatgtttgagggcgtcggttttgggatgggcgatttgtaccagaccatcaagaaaaacaccgatctggaaatcgcctttaatctttcgatcaacgagtggaacggccgggaaaaattacagttgattattaaggatttgcgggcaaaaaccgcttag

SEQ ID NO: 74682 - protein, 241 aa, Unknown
  Obtained from environmental sample
  DOMAIN (49)...(113): DHHA1 domain
  misc_feature (1)..(241): Xaa is any amino acid
MGAEIKEQVIAEIEKLPGRETEKVFILASEGWHPGIIGIVASQIAKQYNRPTALIAVSANGGRGSIRSLEGLDIFEPLQRCGYLLKDFGGHKEAAGFEIEKGRIEEFKTAFRKALGEAPGGSNYTPKLTIDAVLAKEHITKELAYAIEKFQPFGQNNAQPVFTTNELSIYHFELIGGGKHLRFSLTDGIEMFEGVGFGMGDLYQTIKKNTDLEIAFNLSINEWNGREKLQLIIKDLRAKTA

SEQ ID NO: 74683 - DNA, 426 bp, Unknown
  Obtained from environmental sample
  misc_feature (1)..(426): n is a, c, g, or t
gtggttcagcggggtgtcctgcagctcctcaaggagatccagggggtatccaaaaacacagtcctcctggtaactcacgatatggcggttcatgccaatgtagcgcaacgggtggcgataatgtatgccggtcgcattatggaagaagctcctacggatattattttccgccgtccgcagcatccctatacacagcaccttataagctccctgcctgtcgtaggcgataaaaccctgaaaaaaagccttagcggtgcgcctccgaatctcgcgaatccgcccgatgggtgccgctttcatccgcgctgtgaaaaggctttggatatctgcaaaaaagaggcgcctccgatgcggaatattggcgaagggcaccgggcggcctgccatctgctgtccaatggacagcttaaggaggcaaaactatga

SEQ ID NO: 74684 - protein, 141 aa, Unknown
  Obtained from environmental sample
  DOMAIN (47)...(110): Oligopeptide/dipeptide transporter, C-terminal region
  misc_feature (1)..(141): Xaa is any amino acid
MVQRGVLQLLKEIQGVSKNTVLLVTHDMAVHANVAQRVAIMYAGRIMEEAPTDIIFRRPQHPYTQHLISSLPVVGDKTLKKSLSGAPPNLANPPDGCRFHPRCEKALDICKKEAPPMRNIGEGHRAACHLLSNGQLKEAKL

SEQ ID NO: 74685 - DNA, 411 bp, Unknown
  Obtained from environmental sample
  misc_feature (1)..(411): n is a, c, g, or t
gtgttcagcattattctgttgcttgtaccaataatcctatctgtaatcagtattccacttatgtcgttacttggcaaagataatcttgcagattgttgcgatttggaagaagccaatagttcatttcttccgacatatcttggttatttttttgtgggacttggtgttgaaaaacttcaacatttggtatttatatatctgcttatttttgtgttcacgtttgtgacgcaaacgttatatttcaatccgatatacatcttgttaggttatcgcttttatcatgccaaaaccacgcaaggtacaaacgtgtttttaatcgtcaaaaaagaactccgtaaaacaaacaatataacgtttgaaaatctacggagaattaataatacaacgtatattgcaatggaggaaaagtaa

SEQ ID NO: 74686 - protein, 136 aa, Unknown
  Obtained from environmental sample
  SIGNAL (1)...(25)
  misc_feature (1)..(136): Xaa is any amino acid
MFSIILLLVPIILSVISIPLMSLLGKDNLADCCDLEEANSSFLPTYLGYFFVGLGVEKLQHLVFIYLLIFVFTFVTQTLYFNPIYILLGYRFYHAKTTQGTNVFLIVKKELRKTNNITFENLRRINNTTYIAMEEK

SEQ ID NO: 74687 - DNA, 477 bp, Unknown
  Obtained from environmental sample
  misc_feature (1)..(477): n is a, c, g, or t
atggaaacgatattgatcgcttctgtcaaaacagaacgaggaacaacagcttatcgcaaggttctatcatcagacaaaaaaatttttcatcaaccagataatctccatctgtgcgttgattataatccagcgacactacttggagataatgaatggtacggtcttgctgattttttaaacaagagctattgtcatgactttctgcgccaaaaattctcttccgtagattatgacataattgagtctaatgattttggaaaaatcgtattcctttgcggttatcaaacaggtatgttttattatcagcgaataacccctgcccgccaagtaaaacagaaaaggcttttcttttttggtgagcaatgtaagtatgaggaaaacagcaagtccatatctttgaatgaatatgccgatgctatttacattccaaggataacaaattgtattttcgcaaattgcgcgatatatccccgataa

SEQ ID NO: 74688 - protein, 158 aa, Unknown
  Obtained from environmental sample
  misc_feature (1)..(158): Xaa is any amino acid
METILIASVKTERGTTAYRKVLSSDKKIFHQPDNLHLCVDYNPATLLGDNEWYGLADFLNKSYCHDFLRQKFSSVDYDIIESNDFGKIVFLCGYQTGMFYYQRITPARQVKQKRLFFFGEQCKYEENSKSISLNEYADAIYIPRITNCIFANCAIYPR

SEQ ID NO: 74689 - DNA, 876 bp, Unknown
  Obtained from environmental sample
  misc_feature (1)..(876): n is a, c, g, or t
atgaggaattttcgtgaaacactaaaaaaatcgatagcagaaacttcaaatttatgtcatttgttatatcaatacgctttgtgtgaaagatatgaaaacaatatcattgatgctattataaatttatcttcagtcatagataatgatgaggaaaataacgagtggaaaatccatgctcattattggcgtggttatatgtttctatatgatttaaataattatgaagagtctctcaaagatttggaatttgtatataaaacaaacaattcctttaaaatgaacatttgttatgatttagcactatgctattatggcgcacactgtttttgttcatcgtgtttaaaagagaaaaaaaacgctgaagcgaaaactaaagcattggagtatattgaacgccatatatctgataataaatgtgattatcgtgcgtttcatttaagggcagttataaataatgataaatttattagaaagaaagaacaaggtagtacacagccacagccatttgaaaaagaaaaaataatttccgatttcaataaagcaatagagcttaataaggattttgcttatctatatattagcagaggctgtttttatttttatataaatgaaacagaaaatgccataaaagactatgataaagccattgagcttgatcaaggtccagtttatgaagttgcacgtattgcatatcgaaacaaaggggacgtttattctgatttaggtgaaatagaaaatgctcttgaaaattataataaagctattgaaattgatcataattttgcggttgctcttgagagcagaggagatatttattcggatttaggcgagataagaaaagcacttaacgattatgaaaaagctntatataattaa

SEQ ID NO: 74690 - protein, 291 aa, Unknown
  Obtained from environmental sample
  DOMAIN (189)...(222): Tetratricopeptide repeat
  misc_feature (1)..(291): Xaa is any amino acid
MRNFRETLKKSIAETSNLCHLLYQYALCERYENNIIDAIINLSSVIDNDEENNEWKIHAHYWRGYMFLYDLNNYEESLKDLEFVYKTNNSFKMNICYDLALCYYGAHCFCSSCLKEKKNAEAKTKALEYIERHISDNKCDYRAFHLRAVINNDKFIRKKEQGSTQPQPFEKEKIISDFNKAIELNKDFAYLYISRGCFYFYINETENAIKDYDKAIELDQGPVYEVARIAYRNKGDVYSDLGEIENALENYNKAIEIDHNFAVALESRGDIYSDLGEIRKALNDYEKAXYN

SEQ ID NO: 74691 - DNA, 378 bp, Unknown
  Obtained from environmental sample
  misc_feature (1)..(378): n is a, c, g, or t
ttgcgttggagccagtataaggaaggtgaagtgttgaaggtgattattgctggcggcagggatttcgccgactatgaattgctatgtgtgaaatgcgacgcctatttaaggaaccaagccgaggttgagatagtaagcggatgcgccaggggagcggataagctgggtgaacgatacgccgctgagctgggctatcctgtcgcaagattccccgctgactggcgtttgggcaagcgcgccggttacgttcgcaacgaacaaatggcccaatacgccgattctctcatcgccttctggaatggcgcgagcaggggcacgaaacacatgattgatttggcgcgcaagtatggtttgaatgttagggttgttggttattaa

SEQ ID NO: 74692 - protein, 125 aa, Unknown
  Obtained from environmental sample
  misc_feature (1)..(125): Xaa is any amino acid
MRWSQYKEGEVLKVIIAGGRDFADYELLCVKCDAYLRNQAEVEIVSGCARGADKLGERYAAELGYPVARFPADWRLGKRAGYVRNEQMAQYADSLIAFWNGASRGTKHMIDLARKYGLNVRVVGY

SEQ ID NO: 74693 - DNA, 462 bp, Unknown
  Obtained from environmental sample
  misc_feature (1)..(462): n is a, c, g, or t
atgaaaaaggccaacgcttactatcgcaagcacaagaccatgaggggctaccctgggcttgacgattacgaggccactgccgctgacaataaaatcaacagcagctactcctgggagaaacagccttatccagcatacctgctccaaaacaacaacgccaatatacgccgaattgtcgaacggatagcggaactgaaaagcaaaagcgtcatatccgagggagacggctgggagtttgatggcgggaacgttgaaatgaatgtcgagtctaacaggatacagatattctttgacgccaagcccgatgaagacgttcgcgccgaactcaagagccgtggcttcaaatgggcgccgtcacagggggcctggcagcgacagcttaacggcaatgggttgtacgccgtcaaacagattaaatgtatccagcccgctgtatgtgaagggtcgaatgagtatgagtga

SEQ ID NO: 74694 - protein, 153 aa, Unknown
  Obtained from environmental sample
  misc_feature (1)..(153): Xaa is any amino acid
MKKANAYYRKHKTMRGYPGLDDYEATAADNKINSSYSWEKQPYPAYLLQNNNANIRRIVERIAELKSKSVISEGDGWEFDGGNVEMNVESNRIQIFFDAKPDEDVRAELKSRGFKWAPSQGAWQRQLNGNGLYAVKQIKCIQPAVCEGSNEYE

SEQ ID NO: 74695 - DNA, 714 bp, Unknown
  Obtained from environmental sample
  misc_feature (1)..(714): n is a, c, g, or t
atgcttaaaccaaataagccattgatcgtcatttttctgggaccggcggttatatgctacgcgttggttttcctgtatcccactctccgtaccacggtgatgagctttttcgccgtggaaagcgtttcggattctgtttcaaagtgggcctttataggcctgggcaattataaaaagattttctcaacgccgatttttttacaggccttgaaaaacataggcagaatttggttcgccgggggctgcggcgtaatgctccttgccctggtgttcgcggtaacccttacaaataacgtaaaggggaccaaatttttccgcagcgcgatttaccttcccaatgtggtcagcgctgtggcaatgggaaccatgtggataaattatgtgtacaattcggagtatggcctgttgcacaatattttgtccggcctgcgccttacttccttaagcgggactttgtggacttcgccgggaaatctgttctggagtatgctggcggcctattgtttcggcatggtgggctaccacatgctgatctttatcagcggcattgagcagatacccagggattttcacgaagcggccctgcttgagggcgcanatatatttcagcgcttttggcacgtaacgctgcctaatatgcggggggttatccgcacaaatatcgtaatgtggacggtatttaccgttggatctttgtgtgggccagctctttag

SEQ ID NO: 74696 - protein, 237 aa, Unknown
  Obtained from environmental sample
  SIGNAL (1)...(21)
  misc_feature (1)..(237): Xaa is any amino acid
MLKPNKPLIVIFLGPAVICYALVFLYPTLRTTVMSFFAVESVSDSVSKWAFIGLGNYKKIFSTPIFLQALKNIGRIWFAGGCGVMLLALVFAVTLTNNVKGTKFFRSAIYLPNVVSAVAMGTMWINYVYNSEYGLLHNILSGLRLTSLSGTLWTSPGNLFWSMLAAYCFGMVGYHMLIFISGIEQIPRDFHEAALLEGAXIFQRFWHVTLPNMRGVIRTNIVMWTVFTVGSLCGPAL

SEQ ID NO: 74697 - DNA, 630 bp, Unknown
  Obtained from environmental sample
  misc_feature (1)..(630): n is a, c, g, or t
atgacttccttcctgtatancgtggtttcatgcacggcgataataatcatcgcctctncnggcggcctatacgctttcccgctaataatttcccccggcaacatcctgatccagaatatgttcgccgccgcgctgggtattccggttatcatgatcatcatgcccctgttcggcattatctcggtatttaaacttacaaacaaccgcgtcgtgcttatgttcctgtatacggcgatgaacgttcctttcgcggttttttacatgcttgcctttttcagaaatttgagttttacatacgaagaagccgcgtccattgacggctgctcgcctgtggggaccttctggaagatcatgtttcccctggcccagcccggcttggtaactctcacgatatttaacttcattacaatctggaacgaatactttatgtccctgatctttgccaacaggacaaatgtccgtcccgtggcggtggggctttacaacatgatacaatccatgcgctacaccggcgactggggaggaatgttcgccagcgtggtcattgtgtttttgcccacgttcttcctttacattttcctttccgacagaattatcaagggcgttaccgccggagctatcaaaggctaa

SEQ ID NO: 74698 - protein, 209 aa, Unknown
  Obtained from environmental sample
  SIGNAL (1)...(25)
  DOMAIN (1)...(204): Binding-protein-dependent transport system inner membrane component
  misc_feature (1)..(209): Xaa is any amino acid
MTSFLYXVVSCTAIIIIASXGGLYAFPLIISPGNILIQNMFAAALGIPVIMIIMPLFGIISVFKLTNNRVVLMFLYTAMNVPFAVFYMLAFFRNLSFTYEEAASIDGCSPVGTFWKIMFPLAQPGLVTLTIFNFITIWNEYFMSLIFANRTNVRPVAVGLYNMIQSMRYTGDWGGMFASVVIVFLPTFFLYIFLSDRIIKGVTAGAIKG

SEQ ID NO: 74699 - DNA, 834 bp, Unknown
  Obtained from environmental sample
  misc_feature (1)..(834): n is a, c, g, or t
ttgacggcagaacctaccaatgtagccattaaattagcaggcgctaaagtggtatggtgtgatataaatccttcaacaggactgttagactctgcgtctgtgcgagcaaaaatatcttcaaaaacaaaagcgattatgcttgttcattatgcaggaatggtttgcgatttgaatgaatttaataaaatttctcaagagttcaacattccgttaattgaagatgctgcacatgctttgggcagtaaattcaatggtaaaccaataggttcaaatgcggcatacaccatattctctcttcaagccattaagcacatgaccaccgttgatggcggttttttgtgtgtaaaaaataaagaaactgccgatcaaggacgactcaaacgatggtttggtttggataaaacaaaaccaagattagaaaatgacatcaaagaagccggatacaaatatcacatgaataatgtgaatgcaacgattggtcttgttcaaatgaaacacatcaaagacattgtggccaaacatgttgaaaacggaaaattttatgatgaaaatctgaaaaacacgtccggagtgacccttttggattactatccaaatactgaagcatcttattggctatacaccatgaaagttgaaagacgaaatgactttataaagatgatggagaacaatggtgttttagcctcagaattacatttgcgaaatgatagacattctgtctttgccgaatctaaatgttcactgcctaacttagatgaattttattccaaatttgtgcatattccttgtggatggtgggttacaggtgaagaacgacaaaaaattatgaaataa

SEQ ID NO: 74700 - protein, 277 aa, Unknown
  Obtained from environmental sample
  DOMAIN (1)...(277): DegT/DnrJ/EryC1/StrS aminotransferase family
  misc_feature (1)..(277): Xaa is any amino acid
MTAEPTNVAIKLAGAKVVWCDINPSTGLLDSASVRAKISSKTKAIMLVHYAGMVCDLNEFNKISQEFNIPLIEDAAHALGSKFNGKPIGSNAAYTIFSLQAIKHMTTVDGGFLCVKNKETADQGRLKRWFGLDKTKPRLENDIKEAGYKYHMNNVNATIGLVQMKHIKDIVAKHVENGKFYDENLKNTSGVTLLDYYPNTEASYWLYTMKVERRNDFIKMMENNGVLASELHLRNDRHSVFAESKCSLPNLDEFYSKFVHIPCGWWVTGEERQKIMK

SEQ ID NO: 74701 - DNA, 327 bp, Unknown
  Obtained from environmental sample
  misc_feature (1)..(327): n is a, c, g, or t
atgaagaaaaaaagaatcattcattatttaagcccatatacaaaaggacgaatcaaaaccatgatagaattgaaagaaatagatctggaaaactttattacattggactatagcgattttacgaggcagcaacgaaccaacgaaaattatgcttacatattggcgtacggaatggtttattttcttatcgaaaaagaatttgaacaatttaaggcgatgatattagaaataaaaaacggcgtgttgtcgtttgatgcaattgatacgacttatcaaggcggttttgttcagtttgaaaaggactttatatcatattacacaaaataa

SEQ ID NO: 74702 - protein, 108 aa, Unknown
  Obtained from environmental sample
  misc_feature (1)..(108): Xaa is any amino acid
MKKKRIIHYLSPYTKGRIKTMIELKEIDLENFITLDYSDFTRQQRTNENYAYILAYGMVYFLIEKEFEQFKAMILEIKNGVLSFDAIDTTYQGGFVQFEKDFISYYTK

SEQ ID NO: 74703 - DNA, 585 bp, Unknown
  Obtained from environmental sample
  misc_feature (1)..(585): n is a, c, g, or t
atgaaaagattacaagacaaagtcgccatcatcaccggaggcgcagcaggtatcggcgcagcaacagccgtaaaatttgccgaagaaggcgctaaagttatcatttgggatttggatgaaaccaaaggtaaagccttggctacacaattaaatgcaacgtttgcaaaagtcaacaccgctcattacgccgaaatagaagcggcggccaaagcggtaaacgaccaattcggacgcattgacatcctcatcaacaacgccggaataacccgcgacagcacgttgaaaaaaatgaccgttgaacaatggcaacaagttattgatgtcaatctgacgggcgttttctactgcaccaaaattatcagcgagtacatgttggccaataattggggccgtatcatcaatgcctcttcggtggttggactttacggcaatttcggacaaaccaactacgtggccaccaaatcgggcttgatcggcatgaccaaaacgttggcacgtgaattgggcaaaaaaggcatcaccgtaaacgctgttgccccccgttttattgccaccgaatgggtgcagccatgcccgaaaacgtga

SEQ ID NO: 74704 - protein, 194 aa, Unknown
  Obtained from environmental sample
  SIGNAL (1)...(23)
  DOMAIN (7)...(169): short chain dehydrogenase
  misc_feature (1)..(194): Xaa is any amino acid
MKRLQDKVAIITGGAAGIGAATAVKFAEEGAKVIIWDLDETKGKALATQLNATFAKVNTAHYAEIEAAAKAVNDQFGRIDILINNAGITRDSTLKKMTVEQWQQVIDVNLTGVFYCTKIISEYMLANNWGRIINASSVVGLYGNFGQTNYVATKSGLIGMTKTLARELGKKGITVNAVAPRFIATEWVQPCPKT

SEQ ID NO: 74705 - DNA, 456 bp, Unknown
  Obtained from environmental sample
  misc_feature (1)..(456): n is a, c, g, or t
ttgctttcatggcttcaatcacgttttcgggcatggctgcacccattcggtggcaataaaacggggggcaacagcgtttacggtgatgccttttttgcccaattcacgtgccaacgttttggtcatgccgatcaagcccgatttggtggccacgtagttggtttgtccgaaattgccgtaaagtccaaccaccgaagaggcattgatgatacggccccaattattggccaacatgtactcgctgataattttggtgcagtagaaaacgcccgtcagattgacatcaataacttgttgccattgttcaacggtcatttttttcaacgtgctgtcgcgggttattccggcgttgttgatgaggatgtcaatgcgtccgaattggtcgtttaccgctttggccgccgcttctatttcggcgtaatgagcggtgttgacttttgcaaacgttgcatttaa

SEQ ID NO: 74706 - protein, 151 aa, Unknown
  Obtained from environmental sample
  misc_feature (1)..(151): Xaa is any amino acid
MLSWLQSRFRAWLHPFGGNKTGGNSVYGDAFFAQFTCQRFGHADQARFGGHVVGLSEIAVKSNHRRGIDDTAPIIGQHVLADNFGAVENARQIDINNLLPLFNGHFFQRAVAGYSGVVDEDVNASELVVYRFGRRFYFGVMSGVDFCKRCI

SEQ ID NO: 74707 - DNA, 402 bp, Unknown
  Obtained from environmental sample
  misc_feature (1)..(402): n is a, c, g, or t
ttgcttatatgggcaaagaataatcatgtactggggcgaacagattataattacaaacatgagcctatactttacggctggattgaaaaacataatttttacggcaaggggaaacatagattttccacatgggacattgcaaaaccgcataaaagcgatttacacccaacaatgaaacccgttgaactggtagaaaacgccatattgaacagcagtaaagagggcgatttaattcttgacgcttttggcggttcgggaaccaccctcatagccgccgaaaagaacaaccgaaaagcccgcctgattgaacttgacccgcactactgcgatgtaataaggcgcagatggactaaatgggcaagggagaataacaggcagattggaatcggtgggctggaataa

SEQ ID NO: 74708 - protein, 133 aa, Unknown
  Obtained from environmental sample
  DOMAIN (1)...(114): DNA methylase
  misc_feature (1)..(133): Xaa is any amino acid
MLIWAKNNHVLGRTDYNYKHEPILYGWIEKHNFYGKGKHRFSTWDIAKPHKSDLHPTMKPVELVENAILNSSKEGDLILDAFGGSGTTLIAAEKNNRKARLIELDPHYCDVIRRRWTKWARENNRQIGIGGLE

SEQ ID NO: 74709 - DNA, 489 bp, Unknown
  Obtained from environmental sample
  misc_feature (1)..(489): n is a, c, g, or t
atgctggagggctcgcaaaaaatagtcagagtaatgccaaacactccatgccttgtgaaagagggaatgtcggtcattgccgcaaacaaagcgaccgacgacgaaactcttgaacatattaaagaaatattctctaaaatcggcagggtaataataatgtccgaaaaatacatggacgccgtcaccggcgtatcggggagcggccccgcctatgtgttcacattcattcaggcaatggcggacggcgcagtcaagatgggcattccaagaaaagaagctctggttttgtcagcgcaaacagttttgggcgcggccaaaatggcgcttcaggagggtataaatccaattgaactgcgcgacggcgtaacatccccgggcgggacaaccattgaggccgttcacattcttgaagaacggggattcgccgggatcataatgagcgccattgaggccgccgcaaaaaaatcacgcaatatgagcagccaataa

SEQ ID NO: 74710 - protein, 162 aa, Unknown
  Obtained from environmental sample
  DOMAIN (2)...(144): NADP oxidoreductase coenzyme F420-dependent
  misc_feature (1)..(162): Xaa is any amino acid
MLEGSQKIVRVMPNTPCLVKEGMSVIAANKATDDETLEHIKEIFSKIGRVIIMSEKYMDAVTGVSGSGPAYVFTFIQAMADGAVKMGIPRKEALVLSAQTVLGAAKMALQEGINPIELRDGVTSPGGTTIEAVHILEERGFAGIIMSAIEAAAKKSRNMSSQ

SEQ ID NO: 74711 - DNA, 759 bp, Unknown
  Obtained from environmental sample
  misc_feature (1)..(759): n is a, c, g, or t
atgaaggatgctcttgtggcaacagccaactatctcggcgtatattccaccgcggcggacgcccggcggcggagcaggcgcgtggcgcgcaagcggtactggtttgcctgggacgatctgttcggcggttacatcgtacagttgcttgatgcggcctataggccggtggatgagccatctcccgttcctgcaacggaattttcccgaaacttcaagcttgaagggaacatttttgtcaccccgctcgccaagctggaagtcgtggacaggtcgaaaaaggatcctgtcagcctggatcttcccgaagcgctggttacgctggacggtcaaggcgaattttatcaacaattaaaagaagcagccgccctggatcgcagcctgcgagatgagttcgccgctgccctgctccgtttgcagcgaggtgaaagaatctcggctgttactgtattcgagcgcctgctcaaccaccgtgaaggcattatcccggcccacaagcacatgtttacggattttgcgataaccctgcgcaaaaacagcattccatcgatggcattcaggttttgccaacgggttctcgaactgtcgccggaagacagcaatgcctatttcaacatggcgcacgtcatgttcgatcttggcgaccacgaaggcacggtgcagcatttgcagcaagccttgaatctggataaagactttctggaggcgcaacaatttcttgactatctggccaaacgtccggttgcgaaatcccgcggttga

SEQ ID NO: 74712 - protein, 252 aa, Unknown
  Obtained from environmental sample
  DOMAIN (199)...(232): Tetratricopeptide repeat
  misc_feature (1)..(252): Xaa is any amino acid
MKDALVATANYLGVYSTAADARRRSRRVARKRYWFAWDDLFGGYIVQLLDAAYRPVDEPSPVPATEFSRNFKLEGNIFVTPLAKLEVVDRSKKDPVSLDLPEALVTLDGQGEFYQQLKEAAALDRSLRDEFAAALLRLQRGERISAVTVFERLLNHREGIIPAHKHMFTDFAITLRKNSIPSMAFRFCQRVLELSPEDSNAYFNMAHVMFDLGDHEGTVQHLQQALNLDKDFLEAQQFLDYLAKRPVAKSRG

SEQ ID NO: 74713 - DNA, 855 bp, Unknown
  Obtained from environmental sample
  misc_feature (1)..(855): n is a, c, g, or t
ttggatgctacatcaactgcttccactactaccatatctggaactccaacagtggtaggttcttcatttacatttaaaatcaaagctgtagataataatggcattgaaggcgagcaacaatttaccattgcaattaatcccaaagggatagccgagcctgcgcttgctgctggcccaccttttacatacgatggaacttcgaagtcagtcgctttgaacccagtggcaccagctggcgaatatagtttaactgacggcggaaccgaaacaaatgcgggtacctacaatgcagttgtggctttgagcagtacaacaaattacaagtggagcggtgacagtacgggaaatttaaaactttcttggagcatattaaaagctgaccctagtcctaattgttccgatatcactttggctttgatcgtaccagaagggaaaactctcgctcaggtatcgcttggtaatttaatttataactgtggtcctataccaggaacttttgagtgggtagatgatacgcagaacgttggcaatgctggagacgtaaatccatttgacgcaactttcacttcaagtgacaataattatcataacgctattgtaccgataaaaatcaatgtaggtccgccttcctcgacctcgataactataacaggaaacaacaaaggtacttacggctcactattctcagaaactcttgaagcaactggtgcattcactggaactacttatacttggtctaaacctgatgacaattttccaggcggtttaactttagggacaggaaatggttccactactactatatctggaaccccaacaagtgcaggatcatttacatttaaaatcaaagtttag

SEQ ID NO: 74714 - protein, 284 aa, Unknown
  Obtained from environmental sample
  misc_feature (1)..(284): Xaa is any amino acid
MDATSTASTTTISGTPTVVGSSFTFKIKAVDNNGIEGEQQFTIAINPKGIAEPALAAGPPFTYDGTSKSVALNPVAPAGEYSLTDGGTETNAGTYNAVVALSSTTNYKWSGDSTGNLKLSWSILKADPSPNCSDITLALIVPEGKTLAQVSLGNLIYNCGPIPGTFEWVDDTQNVGNAGDVNPFDATFTSSDNNYHNAIVPIKINVGPPSSTSITITGNNKGTYGSLFSETLEATGAFTGTTYTWSKPDDNFPGGLTLGTGNGSTTTISGTPTSAGSFTFKIKV

SEQ ID NO: 74715 - DNA, 711 bp, Unknown
  Obtained from environmental sample
  misc_feature (1)..(711): n is a, c, g, or t
ttgcccggccagggtctccatatgggaaattggccagggtacgttccatctgccggtaatcctgttacccagtgttttgggcatgcaagcgccctcccgccaagtttgcttaccatggccgagatccagaatattctgggcagatcctccaaactgcctggacaagaaaaagacatgctgcatgccgcgctgatttccatcttcagcgggctctgcgccggggaaatattccgtctcacctgggcggacgtcagcctgaccgacggaaccctgctggcgcgcggaaggggcagaacccacaaacgcattgtgtgcatccccaccgccctcaacgatgtgttcagcaccagaaaatgggcgggattctccagcaccggcggcctgtgtctgacggatttcgtctttcagtattcccctctccaggggcggcgtgaatggttcagcagcgcctttgcccgcatcgccctagaggagggctggaatcgccgggatgccccggaaaaggaacgggcaacctttgattctttccgccacacgtatacggcctggcttatcttcggcggcgtgcccctgcaggatgtggctgaattgctggggcacaaggcccttaacctggtgcggcaatacgcctacctttccccggctccggaaacccgttgccgtaatgtgctgaacgcacgttggcaagagctggggatattttccagctga

SEQ ID NO: 74716 - protein, 236 aa, Unknown
  Obtained from environmental sample
  DOMAIN (45)...(219): Phage integrase family
  misc_feature (1)..(236): Xaa is any amino acid
MPGQGLHMGNWPGYVPSAGNPVTQCFGHASALPPSLLTMAEIQNILGRSSKLPGQEKDMLHAALISIFSGLCAGEIFRLTWADVSLTDGTLLARGRGRTHKRIVCIPTALNDVFSTRKWAGFSSTGGLCLTDFVFQYSPLQGRREWFSSAFARIALEEGWNRRDAPEKERATFDSFRHTYTAWLIFGGVPLQDVAELLGHKALNLVRQYAYLSPAPETRCRNVLNARWQELGIFSS

SEQ ID NO: 74717 - DNA, 342 bp, Unknown
  Obtained from environmental sample
  misc_feature (1)..(342): n is a, c, g, or t
atgaacaacaccatgcaatacaagggctattcggccattgtgcgctacagcgccgaagatgcctgccttgtgggccacatcgcggggattaacgacattgtgggtttccatggcggttcggtcgaggaaatgcgtaaggcttttgaggaatccgtggatttttatctcgacagctgcgccaggatgggacacgaacccaacaaaccgtattcagggcgtgtcactctgcgcctcccccccgaacttcacgccaagctggcggttcaggctgaaatggaaggtcgcagcctgaataactggatggttgcggttcttaacaaggccgccaggcaacacgcctga

SEQ ID NO: 74718 - protein, 113 aa, Unknown
  Obtained from environmental sample
  DOMAIN (55)...(105): HicB family
  misc_feature (1)..(113): Xaa is any amino acid
MNNTMQYKGYSAIVRYSAEDACLVGHIAGINDIVGFHGGSVEEMRKAFEESVDFYLDSCARMGHEPNKPYSGRVTLRLPPELHAKLAVQAEMEGRSLNNWMVAVLNKAARQHA

SEQ ID NO: 74719 - DNA, 936 bp, Unknown
  Obtained from environmental sample
  misc_feature (1)..(936): n is a, c, g, or t
ttggccgtatacgggcaggacgcgaacccgaccacccgcaaaatggcactgatgaatcttgccattcgcggcattgaagcagacctcggcggatacaacgccgacacttttcacaacgacctacacccgcaactgaaagcggactttattcttgccaatccgcccttcaacctttcggattggaatgatggttccctgaacgacgacccgcgctggaaatacggtctgcctccctccggcaacgcgaacttcgcatggttacaacacatgattttccaccttgccccaaacggcaaaattgggatggtgcttgccaacggctcgctttcctcccagagcggcggcgaaggcgaaattcggcgcaaaatcgtggaggacgaccttgtggagggcattatcgccatgcccacgcaactgttctacacaacgcaaattcccgtgtcgctctggttcatcagccggaacaaaaaacagaaaggcaaaaccctgttcattgatgcccggaagatggggacgatggtcaaccgccgcctgcgtgaaatgaccgccgaggacatcgccaagattgccgcaacctttgaggcattcgacaagggaacgcttgaggacgtgaagggtttttgcgccgttgtcactacagcggaaatcgccaaacaagattacatcctcacgccagggagatacgttggcattgaggcgcaagaggacgacggcgagcctttcgaggagaagatgacacggctgacaagcgaactttcagaaatgttcaagcgttcccatgaactggaggacgaattcgcnaaagattgggagcgatcgggtatgacatctgaatggaaaatcgaaccactccgcgaggtagtaagctacattgccaaggggtattcctccggcttacgtagaagacgaaagcgaaatgacggtacgtgttcctaa

SEQ ID NO: 74720 - protein, 311 aa, Unknown
  Obtained from environmental sample
  DOMAIN (1)...(237): N-6 DNA Methylase
  misc_feature (1)..(311): Xaa is any amino acid
MAVYGQDANPTTRKMALMNLAIRGIEADLGGYNADTFHNDLHPQLKADFILANPPFNLSDWNDGSLNDDPRWKYGLPPSGNANFAWLQHMIFHLAPNGKIGMVLANGSLSSQSGGEGEIRRKIVEDDLVEGIIAMPTQLFYTTQIPVSLWFISRNKKQKGKTLFIDARKMGTMVNRRLREMTAEDIAKIAATFEAFDKGTLEDVKGFCAVVTTAEIAKQDYILTPGRYVGIEAQEDDGEPFEEKMTRLTSELSEMFKRSHELEDEFAKDWERSGMTSEWKIEPLREVVSYIAKGYSSGLRRRRKRNDGTCS

SEQ ID NO: 74721 - DNA, 351 bp, Unknown
  Obtained from environmental sample
  misc_feature (1)..(351): n is a, c, g, or t
ttgagtccgggagagtcattgacatcaagacgtgcgaggacgggagagcgcaagcgtttgaacgcgcgatatacaacttttcattactatttgcaagcagccgtatacactacggctgcgcaagactataccgcgcgtcccgctatgccatttactttcatctgcatcgaaacaaaagcaccatacgccgtcgcggtttatgacttggatgaatctgcaatagaatatggattgatggcaatgcgcaagtgtatagatacttttgtagaatgcaccgaaaaaaatgaatggccggggtatccagaagaaatacaaagtatttcgattccgcaatgggcaacgattgattaa

SEQ ID NO: 74722 - protein, 116 aa, Unknown
  Obtained from environmental sample
  misc_feature (1)..(116): Xaa is any amino acid
MSPGESLTSRRARTGERKRLNARYTTFHYYLQAAVYTTAAQDYTARPAMPFTFICIETKAPYAVAVYDLDESAIEYGLMAMRKCIDTFVECTEKNEWPGYPEEIQSISIPQWATID

SEQ ID NO: 74723 - DNA, 402 bp, Unknown
  Obtained from environmental sample
  misc_feature (1)..(402): n is a, c, g, or t
gtgtcctgcacggcggatagcgtatccacggttgatggcacggccgagggtggtgcggccaggatcatcgtcgtggacgacgatgaggcggtgcgcacgatcgtcgccgaattccttgcggacgtcggctaccacgtgctgcaggccgatgccggcgcgacggcactgcgtctgctggcggcggatccatgcgtccagctgctggtgaccgacatccgcatgcccgacatgtccggtctcgaattggccgatcaggcagcggcgatccgccccaccctcaagatcatcctgatttcgggtttcttcgtcgcgcagcaggtgcagcgtcgcttgctgcgcaagccgtttcccatgggcgacctggccgccgccgtgcgggccgaactgggcgatccgcactga

SEQ ID NO: 74724 - protein, 133 aa, Unknown
  Obtained from environmental sample
  DOMAIN (20)...(126): Response regulator receiver domain
  misc_feature (1)..(133): Xaa is any amino acid
MSCTADSVSTVDGTAEGGAARIIVVDDDEAVRTIVAEFLADVGYHVLQADAGATALRLLAADPCVQLLVTDIRMPDMSGLELADQAAAIRPTLKIILISGFFVAQQVQRRLLRKPFPMGDLAAAVRAELGDPH

SEQ ID NO: 74725 - DNA, 480 bp, Unknown
  Obtained from environmental sample
  misc_feature (1)..(480): n is a, c, g, or t
gtgtttctggcgcaggacggcagtggcaatctatgcagtggtaccagcacgtcgggctggggctggaaataccccggccgtctcggcgacagcccgatcatcggcgccggttcctatgccgacacacgctatggcgccgccgcgtgcaccggcgcgggcgagatgacgatccgctgcggtaccgcgcgctcgatcgtgctttacctgaaacgcggtgccggcgtggcggacgccgtctacgaagcggccgaggacatgcgggcgctggagagcggcttgctgagccgcgtgaccatccatgccatcgatgcccgcggcaatcacaaggtcgtcgccgtcaacggcagcggggacaacgtctactggctctgggacggcaagggcccaccgcggtcgctgcgtgccgaagccatcgcgatccagcgcggcaccatcaagccgagcgccacgaccgtctatggctacgggccgcgttcctga

SEQ ID NO: 74726 - protein, 159 aa, Unknown
  Obtained from environmental sample
  misc_feature (1)..(159): Xaa is any amino acid
MFLAQDGSGNLCSGTSTSGWGWKYPGRLGDSPIIGAGSYADTRYGAAACTGAGEMTIRCGTARSIVLYLKRGAGVADAVYEAAEDMRALESGLLSRVTIHAIDARGNHKVVAVNGSGDNVYWLWDGKGPPRSLRAEAIAIQRGTIKPSATTVYGYGPRS

SEQ ID NO: 74727 - DNA, 438 bp, Unknown
  Obtained from environmental sample
  misc_feature (1)..(438): n is a, c, g, or t
gtgacgaaatctatcgtcgcttttgccagggcagtgaatgcgccacagctgatcgacgatccggcgttcgccacgggcgcgctgcgttcgaagaaccgtgagcggctgaccgaggcgatcgaagcggttatccgcacgcggccatccgccgaatggatcgagcgtctgaaccgggccggcgtgccgtgcggaccgatctacaggatgaacgaggtgtttgccgatccccaggtgaagcatctcggtatcgcgcgggcagtgcagcacaaggtgttgggtccggttgaggtgatcggccaggcggtcgagctgtcgcgtacgccctggaatctgcgcagtgcgacgcccgagctcggcgagcatacggaggagatcctgggcgagctcggctacgaccgggcggagatcgacgcgctacgaggccggaaggtcgtatga

SEQ ID NO: 74728 - protein, 145 aa, Unknown
  Obtained from environmental sample
  misc_feature (1)..(145): Xaa is any amino acid
MTKSIVAFARAVNAPQLIDDPAFATGALRSKNRERLTEAIEAVIRTRPSAEWIERLNRAGVPCGPIYRMNEVFADPQVKHLGIARAVQHKVLGPVEVIGQAVELSRTPWNLRSATPELGEHTEEILGELGYDRAEIDALRGRKVV

SEQ ID NO: 74729 - DNA, 687 bp, Unknown
  Obtained from environmental sample
  misc_feature (1)..(687): n is a, c, g, or t
atgatcgccgacgaagcgtttaaatcgtgcgaaaaattaacgtctgtcactatcggtaaaggcgcgacacatatctataataacgcgtttagtagttgcaaaaatctgaccgacgtaactcttccaaacagcgtgaagtatatcggaaacacggcgtttgccgactgcggcagcttggcgaccataaaaattccaagcagcgcggaatatatcggaaaatcagcgtttgccgactgcggcaatttaacttccataacgattcctgacggcgtaactgaaatcctatacgaaacgtttataggttgcaagaatctaacaaccgtgactattcctaagagcgtgacacgtataggagagagcgcgtttatggattgcccatccctaacgtcgataaccgtcaaaaacccaaaaccgcctgaaatcgatcgttatgcgttcggtttcaacgatagctggcacgtcagcttagattggagccgcgcgaacctatatgttccgataagcggttttttcgcctatcgcgcctccgatacttggagtgcatttgagaacatcaaaccgataggcgtcataagactcgcgttgtgtatcttggcggcgacgttgatattgtcagccgcagtattcggtgtgatcaaaaaattacgaaatcaccttaacttggactctcggcaaaatgaatattaa

SEQ ID NO: 74730 - protein, 228 aa, Unknown
  Obtained from environmental sample
  misc_feature (1)..(228): Xaa is any amino acid
MIADEAFKSCEKLTSVTIGKGATHIYNNAFSSCKNLTDVTLPNSVKYIGNTAFADCGSLATIKIPSSAEYIGKSAFADCGNLTSITIPDGVTEILYETFIGCKNLTTVTIPKSVTRIGESAFMDCPSLTSITVKNPKPPEIDRYAFGFNDSWHVSLDWSRANLYVPISGFFAYRASDTWSAFENIKPIGVIRLALCILAATLILSAAVFGVIKKLRNHLNLDSRQNEY

SEQ ID NO: 74731 - DNA, 951 bp, Unknown
  Obtained from environmental sample
  misc_feature (1)..(951): n is a, c, g, or t
atgggtcagnacagtatcaaaaactgtcgaanagaaggattatttgatttatatattgatcaggcaacaagagatgaaccagggtctcctaatatttctgatactatttttaagaaaatagatggttctaatttgtttattgctgatattagtataataaacccaaatagtaaagaacgtaaaacaccaaatcctaatgtccttattgaattgggatatgcaattaagaaattaggatttaagaatattatttttatttttaatagctattatggaaatccaaatgatttgccttttgatataaggcaaaatagaatattatcatattattttgatggaagtaataaagaggaagtagccaattctttgataaaggacttaactatcgctataatgacaattgagaaaaaatcaataagttccgataaaattgaaatagtttatttttatgatggaacagaatacggtaacgctatagaattacataagattaaatattcacctataagcaaaaaggaatttctggataacgtagaggaaaataaaattatatctatagatactgaagaaaaaacttattggcaagaatatttactaaaggctattaggactgatagaagcagaaaagaagcattaagacaattaccaaaaggccaaatatatgcttatgctgaaaacagatttttaggagattttacaaatgtaaattattttgaagaatatttagaaaaagcacttattagaatgaatactcaatcccttaatttcatgattaagaatggtaacgagaagccattggaaagaataaagattattttcactgtagaaaaaaatattcctattnctagataccgtgattttccagagtatcctagagaatcaaaattagatagcataataatgtcaaataaaattgaaaccaatcatcctttgcttttcgagaagatgtga

SEQ ID NO: 74732 - protein, 316 aa, Unknown
  Obtained from environmental sample
  misc_feature (1)..(316): Xaa is any amino acid
MGQXSIKNCRXEGLFDLYIDQATRDEPGSPNISDTIFKKIDGSNLFIADISIINPNSKERKTPNPNVLIELGYAIKKLGFKNIIFIFNSYYGNPNDLPFDIRQNRILSYYFDGSNKEEVANSLIKDLTIAIMTIEKKSISSDKIEIVYFYDGTEYGNAIELHKIKYSPISKKEFLDNVEENKIISIDTEEKTYWQEYLLKAIRTDRSRKEALRQLPKGQIYAYAENRFLGDFTNVNYFEEYLEKALIRMNTQSLNFMIKNGNEKPLERIKIIFTVEKNIPIXRYRDFPEYPRESKLDSIIMSNKIETNHPLLFEKM

SEQ ID NO: 74733 - DNA, 561 bp, Unknown
  Obtained from environmental sample
  misc_feature (1)..(561): n is a, c, g, or t
ttgtctttaccggccgaggccagggccgccgaagccgcttccagttcccgggcccgccgttccagttccagccgctcttcctccggcagccgggccgcctcgaaagcctcttcaccgtcaaaaccggcctcggccagggcgcggcggaaggccccggcgcgcctttctatctcctcttccagggccgagacccggtccagggctgttttgaaatcctttattttagcgtccagtctttccgcgtttccggccaggccctcggcctcgcccaggcgcccttccagttcggccgccttccgctccgcttcggccaggcgctcccgctcatcttccggcctgttcagatccagggccaggcccagcccggccgcccggtcggccaggttacgggcccgccgttcttcttcccggcccagccgccgggcctgttcctccaggtccagggccgcctggttcaaagcggcttcacgggccgccgccctggccgcctcccggcggccggattccagggccctctcgcttaggccggccgcgccagggaccggaatcagcccgcgatag

SEQ ID NO: 74734 - protein, 186 aa, Unknown
  Obtained from environmental sample
  misc_feature (1)..(186): Xaa is any amino acid
MSLPAEARAAEAASSSRARRSSSSRSSSGSRAASKASSPSKPASARARRKAPARLSISSSRAETRSRAVLKSFILASSLSAFPARPSASPRRPSSSAAFRSASARRSRSSSGLFRSRARPSPAARSARLRARRSSSRPSRRACSSRSRAAWFKAASRAAALAASRRPDSRALSLRPAAPGTGISPR

SEQ ID NO: 74735 - DNA, 423 bp, Unknown
  Obtained from environmental sample
  misc_feature (1)..(423): n is a, c, g, or t
ttggtggatttcaccccggaaggcccggcggtgaagaccctggaggttccggtctttcaggccttgaggcgtctggaaggcgattggccgtcccttagcgccggcctggccgccctgggggaggagacccccggcgcctgggtggaagcggcctacaccggggccgaaatcatcggcgatctgcgggagagcctgacgcggctggccgaggaagccggcctggaacttctgcgacttatggacgtccataggcgggcggattggatttcggcccgctccccggccgaagacctggccgccttggaaccggacgaggttttccgccggcgcctggaaacggcgggcgtgcccgaggccgaccgggcctccctgtgggccgcctacggggaaataatggccaacctggcggaggccccggaataa

SEQ ID NO: 74736 - protein, 140 aa, Unknown
  Obtained from environmental sample
  misc_feature (1)..(140): Xaa is any amino acid
MVDFTPEGPAVKTLEVPVFQALRRLEGDWPSLSAGLAALGEETPGAWVEAAYTGAEIIGDLRESLTRLAEEAGLELLRLMDVHRRADWISARSPAEDLAALEPDEVFRRRLETAGVPEADRASLWAAYGEIMANLAEAPE

SEQ ID NO: 74737 - DNA, 354 bp, Unknown
  Obtained from environmental sample
  misc_feature (1)..(354): n is a, c, g, or t
ttgatttcacccatccggcctactggggaggagtcttcgccatcaccggcccaaccggagccggcaagaccaccattctggacgccatctgcctggccctttacggccgcaccccccgcctgccccggatcaacaagagcgtcaatgaaatcatgtcccgcagccggggcgaatgcgcggccgaaatcacctttgaaaccccggccgggcgctggcgggcctcctgggcccagcgccgggcccgctcaaaggccgggggagcccttcaggatccccagcacgaaatcgccgaagccggcgggcggcttttggagagccagctcagccgcacggcggcccgtgttgccgccctga

SEQ ID NO: 74738 - protein, 117 aa, Unknown
  Obtained from environmental sample
  misc_feature (1)..(117): Xaa is any amino acid
MISPIRPTGEESSPSPAQPEPARPPFWTPSAWPFTAAPPACPGSTRASMKSCPAAGANARPKSPLKPRPGAGGPPGPSAGPAQRPGEPFRIPSTKSPKPAGGFWRASSAARRPVLPP

SEQ ID NO: 74739 - DNA, 690 bp, Unknown
  Obtained from environmental sample
  misc_feature (1)..(690): n is a, c, g, or t
atgaaaaatataattaggaaaaacgcatacaaaatttttctgtttttattagcggttatacctgcgtcaatttccggacagcaaaacggagggagtgtcttgaaaaatatttcagtatttcatgaatacggcgcttacagggaaaaaggcgcggacgctccgatttactgttcagcatggggcggtattgaaacggaaaacggcgttattccgcttgatagaaccgtaacaaacggtaaaaagaaggtgtacagattcaaggcgggaagcggcggaggaataatgtttccgcttcatggctggggtgcgttttctctggaacagtactatgaaaacggatttatcgaatttgatatacggggcgcttcaggcggagagaatttaaacataggcctgcgctcggatacaaggaacattgtcaggacacgttcaatttccctatcgtcacagaatgttcaggtaacaacatcatggcagcatataaaaatcccgattaaaaacattgccggaaacatgagcgaaggttttagcattcagaatattacgttggttattattgaagttccgcgtatgtctcaattttacttgtcggaaatgtacatcacttccgccgacagggaaaaacaatatcccgtgataaaggtaaatcaggcaggttatgaattgaaccaaaataatacgctcttgtaa

SEQ ID NO: 74740 - protein, 229 aa, Unknown
  Obtained from environmental sample
  SIGNAL (1)...(26)
  misc_feature (1)..(229): Xaa is any amino acid
MKNIIRKNAYKIFLFLLAVIPASISGQQNGGSVLKNISVFHEYGAYREKGADAPIYCSAWGGIETENGVIPLDRTVTNGKKKVYRFKAGSGGGIMFPLHGWGAFSLEQYYENGFIEFDIRGASGGENLNIGLRSDTRNIVRTRSISLSSQNVQVTTSWQHIKIPIKNIAGNMSEGFSIQNITLVIIEVPRMSQFYLSEMYITSADREKQYPVIKVNQAGYELNQNNTLL

SEQ ID NO: 74741 - DNA, 618 bp, Unknown
  Obtained from environmental sample
  misc_feature (1)..(618): n is a, c, g, or t
ttgcctttaagcgttttgtcgggagatgctaactcgcgcaatgtggacattttgagaattcagatgcttcgtgagcttgaaaataaatcggcatttgaacttgccattgacatggccccaaaaatagaggcgccaaacgaggctattcaccgctgcatggattttttgaaaagcaaccaagtttgctgcgagtgcatccaaacccttaggctggcaatttcggaggccatagcaaacgcgctggagcatggcatctttcgcctaccgtccgcgctcaaagaagacttgttctattctaaggccgattggctgactgaaaaaatggccgagtctgaccagggccaagtgacactaaatctcaaactagtgtttggagaggacagcccccaagagatcagcgccgtcagagtcgaagtcacagattccgggcccggcttcgactggcgcacctacctaaaagaccacgcgatgccccccgctgaaaaaatctatgggcgcgggcttgccctcatcaacctgtatgcaagccatctgagctttaacgaaaaaggaaactcgatacagttcatcgttccttgccgccgcagcacggctgattcaaattgcccgtcagagtaa

SEQ ID NO: 74742 - protein, 205 aa, Unknown
  Obtained from environmental sample
  misc_feature (1)..(205): Xaa is any amino acid
MPLSVLSGDANSRNVDILRIQMLRELENKSAFELAIDMAPKIEAPNEAIHRCMDFLKSNQVCCECIQTLRLAISEAIANALEHGIFRLPSALKEDLFYSKADWLTEKMAESDQGQVTLNLKLVFGEDSPQEISAVRVEVTDSGPGFDWRTYLKDHAMPPAEKIYGRGLALINLYASHLSFNEKGNSIQFIVPCRRSTADSNCPSE

SEQ ID NO: 74743 - DNA, 984 bp, Unknown
  Obtained from environmental sample
  misc_feature (1)..(984): n is a, c, g, or t
atgcgagtttgctttcgaattatgaaatttgcagggtgcggcaatgaagcaaaacctgcctcttcccctcccgcgcacgaactcgaggccattgggaaggaaattttgctgtaccagttccatgatattttgccaggttccagtatcaatcgcgtgtatgaggaatgcgttgcgcggtacgaaattttgcacgaaaagctgggcggcgcggttgcgaccttagcggacgcggttactgcgggcgcggggcttcttaacctaaacagcttcccgtaccttcgcgccgtgcaggtgggcgggtcgtggtaccgcgcggcgattgcgcccatgtcgctttgggaaccgaaggatacggacaggctgtcgatttttacagccacctgcggggcggattatatccagaatgataaggtgaaggtgaagtttttaagcggatttatcacgtccataaagacctcggacggggtggaatttgtgcaattcggaaagaaagcgaacaggttctgcacctactgggactttggggactgctgggacattcgcccgcggcggtaccagttttcgcgctctacgcttcgcgcggacagcttcaccacgcgcgtggacggggcggtggcaatggcggttgcggtgtataagtttgggaagtcgaagattatgcagaccgtaagtatcacggacggttccccccttattaccttcgacacaaccgttgtttggggcgaaaatcgcaccatgcttcgggtggattttccgacttctgtatcaagtgacgtggtgaattataatgtacaattcgggcacattgcgcgaagtgcgaagaacgtaagtaaaattgaacgggcgcagtttgaggtttcggcgcagaagtttgccgatatttcggacagcgcgaagggtctttctcttataaatgactgcaaatacgggcacagggggaaggacgggcggcttgatttgtgtttaattagaagtccgctatag

SEQ ID NO: 74744 - protein, 327 aa, Unknown
  Obtained from environmental sample
  DOMAIN (82)...(327): Glycosyl hydrolases family 38 C-terminal domain
  misc_feature (1)..(327): Xaa is any amino acid
MRVCFRIMKFAGCGNEAKPASSPPAHELEAIGKEILLYQFHDILPGSSINRVYEECVARYEILHEKLGGAVATLADAVTAGAGLLNLNSFPYLRAVQVGGSWYRAAIAPMSLWEPKDTDRLSIFTATCGADYIQNDKVKVKFLSGFITSIKTSDGVEFVQFGKKANRFCTYWDFGDCWDIRPRRYQFSRSTLRADSFTTRVDGAVAMAVAVYKFGKSKIMQTVSITDGSPLITFDTTVVWGENRTMLRVDFPTSVSSDVVNYNVQFGHIARSAKNVSKIERAQFEVSAQKFADISDSAKGLSLINDCKYGHRGKDGRLDLCLIRSPL

SEQ ID NO: 74745 - DNA, 369 bp, Unknown
  Obtained from environmental sample
  misc_feature (1)..(369): n is a, c, g, or t
atgatattcgtggacagcaacgtacacacattcaaacagcgaaaagtttcaggccgagcaaaagaactccgcgataaaggattttactttctaaaataccattcaaaagggagtaagccggttgacgtgtgggacatcatcccggaggatactcagcttcgtgagttacatttcgcaccttatccagttgaattatgccttattccactgttagctacatgtccaaaagatggcatagctttagatactttttccggtactggaagtactctcttggccgcatacactctaggcagaaaatccataggaattgacatttcgcgtcgctatcttgaaattacacaagaacgatttagagcattgatatga

SEQ ID NO: 74746 - protein, 122 aa, Unknown
  Obtained from environmental sample
  misc_feature (1)..(122): Xaa is any amino acid
MIFVDSNVHTFKQRKVSGRAKELRDKGFYFLKYHSKGSKPVDVWDIIPEDTQLRELHFAPYPVELCLIPLLATCPKDGIALDTFSGTGSTLLAAYTLGRKSIGIDISRRYLEITQERFRALI

SEQ ID NO: 74747 - DNA, 741 bp, Unknown
  Obtained from environmental sample
  misc_feature (1)..(741): n is a, c, g, or t
gtgaccgttgttcggtttggaggaaagatggaagacataagcaaaatcaaagtcttggtggtagatgacgacaatgtcactaggcatttcacgctcgctttcctgaaaaatgccggcttccaggttcagggcgcgtcaagcggcgaagaagggctggcgattgcaaaagaggacaagcccgatgtaatcgtcctagatattttgatgcctggcatggatggatttgaaacttgtcacaagctgcacgaaaacgagatagactcgatcatcatcatgctgacggtcaggtcggaagacattgacaagatacacgggctcgaaatcggcgccgacgattacatggtaaagccgtacaatcccgatgaattggtggcgcggatcaaggccgtgctgaggcgctggctgcccacccaccatgcaggcaccgcaaccgaccacatgggactcagcatagactatggccaatttgtggcattcaaagatggagtagagctagacttgactaggcgggaaatcaccctgctaggcgctttcctgcggaacccagggaaattgctcacccgcgaagaccttttcaatgttgtctatggcgaaaaccattttggcacccaaaaagtgattgacgtatatgtaaagaggatcagggaaaaaatagaaagcgaccctcaaaatcccacgataatcaagacggtttggggcaaggggtacgtctgcggcgacttggtgctcgtgccgatctga

SEQ ID NO: 74748 - protein, 246 aa, Unknown
  Obtained from environmental sample
  DOMAIN (162)...(238): Transcriptional regulatory protein, C terminal
  misc_feature (1)..(246): Xaa is any amino acid
MTVVRFGGKMEDISKIKVLVVDDDNVTRHFTLAFLKNAGFQVQGASSGEEGLAIAKEDKPDVIVLDILMPGMDGFETCHKLHENEIDSIIIMLTVRSEDIDKIHGLEIGADDYMVKPYNPDELVARIKAVLRRWLPTHHAGTATDHMGLSIDYGQFVAFKDGVELDLTRREITLLGAFLRNPGKLLTREDLFNVVYGENHFGTQKVIDVYVKRIREKIESDPQNPTIIKTVWGKGYVCGDLVLVPI

SEQ ID NO: 74749 - DNA, 516 bp, Unknown
  Obtained from environmental sample
  misc_feature (1)..(516): n is a, c, g, or t
ttgaatagcgaacgccggggcgtcaattatcttttcccttccctgcccccgctttggataagccgttcggtgcgtccgccgcgaggcgagaccttttttaccgcctttggccgccgcccggaaacgcttgagacaactctggccttgaaaaaattcctgaaatccgacccgccggccaacctggagaccaggaaaaaacgagacgaatatttagatgatatcattgacgaatttctgatttacacctttgaactccggagcctgcctccgggctggaccaataaggccggctgtcgcctgccccaagaggaaaaggcttggttggaccctggtttcatggcttcgggagcctcaaccggtcaggagcggccagacgaaaccctgcccaaaataatccggcgtttcggcaattggctcaactccgtgttggatgaaaccttacctgtcggcgaagtggagcaggctttctgggccgatgctctgagcctcgcccttaaggaggccgcccttgactag

SEQ ID NO: 74750 - protein, 171 aa, Unknown
  Obtained from environmental sample
  misc_feature (1)..(171): Xaa is any amino acid
MNSERRGVNYLFPSLPPLWISRSVRPPRGETFFTAFGRRPETLETTLALKKFLKSDPPANLETRKKRDEYLDDIIDEFLIYTFELRSLPPGWTNKAGCRLPQEEKAWLDPGFMASGASTGQERPDETLPKIIRRFGNWLNSVLDETLPVGEVEQAFWADALSLALKEAALD

SEQ ID NO: 74751 - DNA, 744 bp, Unknown
  Obtained from environmental sample
  misc_feature (1)..(744): n is a, c, g, or t
gtgttggccggcacgggccgaccttcggctgcaaaccaagaagcctaccgccggaagctgcttcaaatcgtggacggctatatccaggccaatggcttcaaggaactggcccgccgttatgccttcaatctggccaacggccgttttctgtggcgtaaccgcctgggggccgaggaggtggaaatcgtggtccagcggctggccgaggggcggatggtcaaagaatggaggttcaacgccctggatttacctctgcattcttttgaagcgcctaacaaccagcaaagcccgttggcggaattggcccaggccattgaagagggtctgtccggttcaaatttccttctgttgcgggttgcggcgttcattcgcctgggctgcgggcaggaagtcttcccctcgcaggagttgattcttgataaaggtggtccaggcaaaaaaagcaagaccttgtatgagatcaacggcgcggccgggattcattcccaaaaaatcggcaacgccctccgcacgatagacacctggtatcctgaagcggctgaatacggccccatagccgtggagccctatggttcggtcaccactttgggccgggcttaccggcgccccggggataaggccgatttctatactcttctggatgattggattttgaaggataaggctccggccttggacaaccagcattttgtcctggccgtccttattcggggcggcgtcttcggcgaaaaggagaaggactag

SEQ ID NO: 74752 - protein, 247 aa, Unknown
  Obtained from environmental sample
  misc_feature (1)..(247): Xaa is any amino acid
MLAGTGRPSAANQEAYRRKLLQIVDGYIQANGFKELARRYAFNLANGRFLWRNRLGAEEVEIVVQRLAEGRMVKEWRFNALDLPLHSFEAPNNQQSPLAELAQAIEEGLSGSNFLLLRVAAFIRLGCGQEVFPSQELILDKGGPGKKSKTLYEINGAAGIHSQKIGNALRTIDTWYPEAAEYGPIAVEPYGSVTTLGRAYRRPGDKADFYTLLDDWILKDKAPALDNQHFVLAVLIRGGVFGEKEKD

SEQ ID NO: 74753 - DNA, 714 bp, Unknown
  Obtained from environmental sample
  misc_feature (1)..(714): n is a, c, g, or t
atgctcatcattgtcacggcaacccgacgttcacaatccgatttcgaccaaagcccgttgggacgttctctgcaacgaatcgcgtttgacaaatcgttgcgtctgtctgtaagcacggagaataaacttgggctgcctgtaatttacaaccaagttatcacggatcaatatcgggaacacgaggcagtgtttcttcacgaggatatttggatcgatgatatattcttttcctgtcatattcaggccggactgatgaattttgatgttatcggattagccggaaaccgtgtccttcacacggattcgcccgcatggcacgtcaaggacgataagatgcaatgggacatagagaacttatccggtgctgtgtgtcatgggtccgcgccgttcggcgcgccttctgtttatggaagtatgcctgcccgtgtgcagttgctggacggcgttctgattgccgcccgtatctcctcactgttagacgcaggcgtccgctttgacgagcgcttcgacttccatttctacgatcttgatttttcgcgcagcgccaatgcggcggggctttcggtcggaacctggccaatctcaattacacacgccagcggcggcgcatttggctcggacggctggaagcgcggattaaagctttatagggaaaaatggcggaacgccggaaagaacatggacgcattacgtaaggacaatgccggtatttga

SEQ ID NO: 74754 - protein, 237 aa, Unknown
  Obtained from environmental sample
  misc_feature (1)..(237): Xaa is any amino acid
MLIIVTATRRSQSDFDQSPLGRSLQRIAFDKSLRLSVSTENKLGLPVIYNQVITDQYREHEAVFLHEDIWIDDIFFSCHIQAGLMNFDVIGLAGNRVLHTDSPAWHVKDDKMQWDIENLSGAVCHGSAPFGAPSVYGSMPARVQLLDGVLIAARISSLLDAGVRFDERFDFHFYDLDFSRSANAAGLSVGTWPISITHASGGAFGSDGWKRGLKLYREKWRNAGKNMDALRKDNAGI

SEQ ID NO: 74755 - DNA, 813 bp, Unknown
  Obtained from environmental sample
  misc_feature (1)..(813): n is a, c, g, or t
ttgacgaagagagccgcgtcaccgtgccgggtctggctttcgcggatcataaagaactatctgtaccacggctgggggaaagtgcagtacaacatgacgccagccgacatgagggggaagcggagcatagaggaggacatgtactccaggatgatctcgttccccaacggtctgtgggcatacgacaaatggctcatgccgatcggggaaatggacatcggctcctttttgcacaagggtttcattgaagagctggagcaactgcaaaagctgaggggcaaagacatactggacgtgggtgcctacatcggcgacacggccttggtcctgcaggactacacggacaaaagggtgtacgccttcgagccaggccccgaaaacatgaaggtgctgctggaaacactgaggctgaacgattgcaggaaggtggttcccgtgccccttggcttgggggacagggaggaatgtgtgttcatgccgaacactgtcaatgggacttcgcgcttcaccgacaagggtgtgccagctagggtgacgaccctggacgcctgggtcgccgagcatggcgacgtggacataggcgtgataaaggttgacatagagggcttcgagcagagatttctggccgggggtctcgaaaccatcaaaaagcacagaccagcactgctcatcagcatcaatcacaacctctcggatttattcgagataaagccgctgatagacgggtatggcttgggctacagattcaagatacggggaatcatgtcggggtacgccctggcggatctgaacctgatctgcgaggctgtatga

SEQ ID NO: 74756 - protein, 270 aa, Unknown
  Obtained from environmental sample
  misc_feature (1)..(270): Xaa is any amino acid
MTKRAASPCRVWLSRIIKNYLYHGWGKVQYNMTPADMRGKRSIEEDMYSRMISFPNGLWAYDKWLMPIGEMDIGSFLHKGFIEELEQLQKLRGKDILDVGAYIGDTALVLQDYTDKRVYAFEPGPENMKVLLETLRLNDCRKVVPVPLGLGDREECVFMPNTVNGTSRFTDKGVPARVTTLDAWVAEHGDVDIGVIKVDIEGFEQRFLAGGLETIKKHRPALLISINHNLSDLFEIKPLIDGYGLGYRFKIRGIMSGYALADLNLICEAV

SEQ ID NO: 74757 - DNA, 699 bp, Unknown
  Obtained from environmental sample
  misc_feature (1)..(699): n is a, c, g, or t
atggcgatagtaaagagcgacgacggttggggagtaataaataagcgaggggattatatctttggcccgttcaacgtcgtggaaatgataaatcccgacgagcggatgtttaagttcaaacaggatggaaaatggggctggttggacgcggaaggcgctatcgtcatttcgccggtttatgaggatataatgagctttgacgatagagacatcgctccggttaagcagggcgggctgtggggatatatcgacaaagaggggacatacgtcatagagaggcaatatgacgcggcttatccgtttttcaacaatagggcgttggtgaagattaacgatgtttttgtaacgatagataaaaacggcaggatagatttgcggacgggaagtcagagggtagaccccagttattggaattttatcaattccggcattgtcggcggacctagaatcatgtcggtggaaccgagctttaaatgcgacgccgccggtcttagcgacgcggaaaagatggtttgtcgaagcgttaggctcgccggattggacaaagagacgaacgatttgtataaaagagcggcgggaagcaatagaagcgcggtaaattcgcaaaaagagttctttgtaaagagaaacaggtgccgtaccgccgattgtatagaatccgcgtacgaatccagaatcgaagagcttagcgatttgtaa

SEQ ID NO: 74758 - protein, 232 aa, Unknown
  Obtained from environmental sample
  DOMAIN (79)...(95): KWG Leptospira
  misc_feature (1)..(232): Xaa is any amino acid
MAIVKSDDGWGVINKRGDYIFGPFNVVEMINPDERMFKFKQDGKWGWLDAEGAIVISPVYEDIMSFDDRDIAPVKQGGLWGYIDKEGTYVIERQYDAAYPFFNNRALVKINDVFVTIDKNGRIDLRTGSQRVDPSYWNFINSGIVGGPRIMSVEPSFKCDAAGLSDAEKMVCRSVRLAGLDKETNDLYKRAAGSNRSAVNSQKEFFVKRNRCRTADCIESAYESRIEELSDL

SEQ ID NO: 74759 - DNA, 918 bp, Unknown
  Obtained from environmental sample
  misc_feature (1)..(918): n is a, c, g, or t
gtgctgatgttcctgttcggctggcgtatgcggagcagcgctgccgccgccgcgaaggcgggcgggcgtgatgagggcacacacaagcgggaacccgatgttctccagccccagcagccggaactcctcgaggtggagatcggctttgcgcttgtgccgcttgtggatgaatctcagggtggggatctgctggatcgcatccgcaatctccgcaagcgaagcgccaacgagatgggcatagttgttccgcccgtacgcatccgtgacaatccgcggctcggcccgaatcaatattccatccgcattcgcggcgtggacgtgggcagaggcgatctgcaggtggataagctttttgtgatcaatccgcgcggtacgccggacggagttaccggtattgatacccgcgatcccacctttggccagcccgcgcgctgggttgatcgcgacctgggcaaagcggcggaagaactgggctataccgttgttgactgtccgagcgttctcgccacgcatctcggcgaggttttgaagagctatgcgcccgaactcatcaccatgcaacagacgcagcaatttctggacgcgatcgacgcgcaaagccccgcgattgtccgcgaggtgcgcgataagggcgctcgtctgagcgatatccagaaggtgctgcaaaatctgctgcgcgagaaagtttccatttccaatatggaacgcattctggaattgattgcggaacattttgagagcggaattaaggcggagatgcttacggagcgggtgcgtcaggggatggcgatgcagatatccagcgcgcttgccgataacggcgtcctgaagngtgttgaactgaacggcgaaaccgaggaactcctgagtgacgcgntagacgtggacagcgaaagggatatgaccgcctccccntga

SEQ ID NO: 74760 - protein, 305 aa, Unknown
  Obtained from environmental sample
  SIGNAL (1)...(17)
  DOMAIN (1)...(305): FHIPEP family
  misc_feature (1)..(305): Xaa is any amino acid
MLMFLFGWRMRSSAAAAAKAGGRDEGTHKREPDVLQPQQPELLEVEIGFALVPLVDESQGGDLLDRIRNLRKRSANEMGIVVPPVRIRDNPRLGPNQYSIRIRGVDVGRGDLQVDKLFVINPRGTPDGVTGIDTRDPTFGQPARWVDRDLGKAAEELGYTVVDCPSVLATHLGEVLKSYAPELITMQQTQQFLDAIDAQSPAIVREVRDKGARLSDIQKVLQNLLREKVSISNMERILELIAEHFESGIKAEMLTERVRQGMAMQISSALADNGVLKXVELNGETEELLSDAXDVDSERDMTASP

SEQ ID NO: 74761 - DNA, 894 bp, Unknown
  Obtained from environmental sample
  misc_feature (1)..(894): n is a, c, g, or t
ttggccgagcggcacgagcattccggttcccgtcagaaacctgggccgcaagccgatgcgaaacgcgcatcaggagcaaacatgcatttcagtcttgtcaagctgaaggtgggaggcggcggcaacgcaatggacctctttgacgatgcgatcctgcctgtgtattacgcgttgaagcgcctgggctttgctgtggaaaccaggatcaacgaggtcaacccgcaaagccggaacatcatcttcggcagtcattattttcccgaagaggtgagcgcggctgttccccgtaactccgtcgtcttcaatctggagcagctcaccgcagggagccactgggtgaacaagaactcctatatgcggcttctggagatgttcgacgtctgggactacagtccgggcaacgtggcctttttacaaggcgcgctgggcttttccaatgtcgtttgcgtccggctgggctatgtgccggagatgacccgcctggaccgctcttgcccgcaggatgtggatgtgctgttttacggcgggcttaacgacagacgcaacgccgtcctgcgaaaactgacggcggcaggcgtgaatccggtgattctgcaaagggtgtatggcgcggcgcgcgatgcctggatagtccgttccaaaatcatactcaacatgcactaccgcctgccggccaacttggaagtggtccgtctgggctacctgtgggccaacaaaaaaacagtgctctcggaattcgggccggacaccgaacgcgctccggaactggccgaagcctgtcggtactgcgcatacgacaatctggccgaggccgcggtcgaactcctgacggacgccaaggccagggagaagcangctgaagccggcttcgcggccttttctccatgcccctga

SEQ ID NO: 74762 - protein, 297 aa, Unknown
  Obtained from environmental sample
  misc_feature (1)..(297): Xaa is any amino acid
MAERHEHSGSRQKPGPQADAKRASGANMHFSLVKLKVGGGGNAMDLFDDAILPVYYALKRLGFAVETRINEVNPQSRNIIFGSHYFPEEVSAAVPRNSVVFNLEQLTAGSHWVNKNSYMRLLEMFDVWDYSPGNVAFLQGALGFSNVVCVRLGYVPEMTRLDRSCPQDVDVLFYGGLNDRRNAVLRKLTAAGVNPVILQRVYGAARDAWIVRSKIILNMHYRLPANLEVVRLGYLWANKKTVLSEFGPDTERAPELAEACRYCAYDNLAEAAVELLTDAKAREKXAEAGFAAFSPCP

SEQ ID NO: 74763 - DNA, 627 bp, Unknown
  Obtained from environmental sample
  misc_feature (1)..(627): n is a, c, g, or t
atggacttttatagagttgttgaaaatcgaagaacagtaagagatttttctgataaaaaaatagacaaaaaaattattgaaaggattttgtctgctggattaatggctcctacaaatgatcacttgcgaagttgggaatttgttgttttgacagagaaagatataattgaaaaagtgcttagacaattagaaaaatctgtttcagaatatcaaagcgataccataataaaatcatggggtatggaaaatcatgatcaaataaatatgtataaagatgcaatacctaaacaacatagtatgttaatgcaatcagaatgtttaatattaccttttttcaaacaatcgtctccattactgcaacctgaaaatttaagttcattgaatgagtttgcttccatttggtgttgtatagaaaatatattacttgcagtatctgctgaaaatttgggttgtgcattaagaataccattcgaagatgaaacgcaaaacattcttgaaacattaaagcatccgaaggattattttatgccatgctatctggctattggctacccactgaatgaagaaaaaaagtttaaacaagtaaagtggaaaatagatgataaaattcactataataaatggtaa

SEQ ID NO: 74764 - protein, 208 aa, Unknown
  Obtained from environmental sample
  DOMAIN (7)...(184): Nitroreductase family
  misc_feature (1)..(208): Xaa is any amino acid
MDFYRVVENRRTVRDFSDKKIDKKIIERILSAGLMAPTNDHLRSWEFVVLTEKDIIEKVLRQLEKSVSEYQSDTIIKSWGMENHDQINMYKDAIPKQHSMLMQSECLILPFFKQSSPLLQPENLSSLNEFASIWCCIENILLAVSAENLGCALRIPFEDETQNILETLKHPKDYFMPCYLAIGYPLNEEKKFKQVKWKIDDKIHYNKW

SEQ ID NO: 74765 - DNA, 513 bp, Unknown
  Obtained from environmental sample
  misc_feature (1)..(513): n is a, c, g, or t
atgtacacggcttcctacataacacttcctttcggggaaggactttaccggagtggttattccttaagtggctggaccgataattccggttactcttacaacaagggggcttcttactatgtttccggtgatgttaccttgtatgcagattgggttgccggcaatcccccggatgccccgtcgtggaatgggtcgccatcaccgctgtcttcaagcagtatttccctcaattggtatgcggtaagcacggcatcttattaccagatataccggtcaacaaatgagggcggaccttataattatgtaactgattgttatggtacaaatattactgataccggtctgaattcgtccacaacctattggtacaaattagccgctgtcgatggttatggtcgtacaagtgtgttgtcggactataattacgcgacaacccagagcagcggggggggggggggggtacctcccccctcccacaggggtgtccccgacggcaacggggaacagcattaa

SEQ ID NO: 74766 - protein, 170 aa, Unknown
  Obtained from environmental sample
  DOMAIN (57)...(138): Fibronectin type III domain
  misc_feature (1)..(170): Xaa is any amino acid
MYTASYITLPFGEGLYRSGYSLSGWTDNSGYSYNKGASYYVSGDVTLYADWVAGNPPDAPSWNGSPSPLSSSSISLNWYAVSTASYYQIYRSTNEGGPYNYVTDCYGTNITDTGLNSSTTYWYKLAAVDGYGRTSVLSDYNYATTQSSGGGGGVPPPSHRGVPDGNGEQH

SEQ ID NO: 74767 - DNA, 402 bp, Unknown
  Obtained from environmental sample
  misc_feature (1)..(402): n is a, c, g, or t
atggttatggtcgtacaagtgtgttgtcggactataattacgcgacaacccagagcagcggggggggggggggggtacctcccccctcccacaggggtgtccccgacggcaacggggaacagcattaacattttttggagtgaagtaagcggagcaagttattattatgtgtacaaatatgacggctatgattatgcctatttaagttctacaaaaagcaccttttatgaccattatgatgtgggttccggtaccacctattactacggagtaccagcggtcaacctcaacaatgttgaaggcgctagggcggaaccttctgggtccgcgaaaaacaggggcgggagttcttcaaggggcctcttcttctggcactccgcttttccaatggcgatgggttaa

SEQ ID NO: 74768 - protein, 133 aa, Unknown
  Obtained from environmental sample
  misc_feature (1)..(133): Xaa is any amino acid
MVMVVQVCCRTIITRQPRAAGGGGGYLPPPTGVSPTATGNSINIFWSEVSGASYYYVYKYDGYDYAYLSSTKSTFYDHYDVGSGTTYYYGVPAVNLNNVEGARAEPSGSAKNRGGSSSRGLFFWHSAFPMAMG

SEQ ID NO: 74769 - DNA, 840 bp, Unknown
  Obtained from environmental sample
  misc_feature (1)..(840): n is a, c, g, or t
gtgatttcatcctcaagcgaagcgggagtttccacatcttcttcaatagtgatttcatcntcaagcgaggcgggagtttccacatcttctcaaatagtgatttcatcctcaagcgaggcgggagtttccacagtttcttcaatagtgatttcatcttcaagcgaggcgggagtttctacaggttcttcaatagtgatttcatcttcaagcggaatgggagtttccacagtttcttcaatagtgatttcatcttcaagcgatgcgggagtttccacagcctcttcaatagtgatttcatcttcaagcgaggcgggagtttctacaggttcttcaatagtgatttcttcaagcgatgcgggagtttccacagtttcttcaatagtgatttcttcaagcgatgcgggagtttccacagtttcttcaatagtgatttcatcctcaagcgggacgggagtttccacagtttcttcaatagtgatttcatcttcaagcgaggcgggagtttctacaggttcttcaatagtgatttcatcttcaagtggaacgggagtttccacagtttcttcaatagtgatttcatcctcaagcgggacgggagtttccgcagtttcttcaatagtgatttcatcctcaagcgggacgggagtttccgcagtttcttcaatagtgatttcatcttcaagcgggacgggagtttcctcatcttcttcaagacttatttcatcctcaaacgaaatcgggatttcggcggaaaagtcagaagagtcggcatcagtttgttgttcaacggtttcttctgcgggcggggacaggttttcagcgggaaaatcatcaacatga

SEQ ID NO: 74770 - protein, 279 aa, Unknown
  Obtained from environmental sample
  SIGNAL (1)...(24)
  misc_feature (1)..(279): Xaa is any amino acid
MISSSSEAGVSTSSSIVISSSSEAGVSTSSQIVISSSSEAGVSTVSSIVISSSSEAGVSTGSSIVISSSSGMGVSTVSSIVISSSSDAGVSTASSIVISSSSEAGVSTGSSIVISSSDAGVSTVSSIVISSSDAGVSTVSSIVISSSSGTGVSTVSSIVISSSSEAGVSTGSSIVISSSSGTGVSTVSSIVISSSSGTGVSAVSSIVISSSSGTGVSAVSSIVISSSSGTGVSSSSSRLISSSNEIGISAEKSEESASVCCSTVSSAGGDRFSAGKSST

SEQ ID NO: 74771 - DNA, 702 bp, Unknown
  Obtained from environmental sample
  misc_feature (1)..(702): n is a, c, g, or t
ttgaacttcggcggattccccgatatccacgccctgcccaaagataccgagacggcatacaattttttgaacggcatctacaacaccgtcatagtaaaagatatcctatcccgccactcggtaaaagaggtaaagttgtttgagcaactgataaaattcctagcccaaaacaccggcaacttagtctcgccgtcaaacatcgccaactatataaactcatctcaaaggggccaagccgtaaaatccacaacggtctcgtcctaccttgattttttggagaaagcgtatatcgtatacccatcgtaccgctacgacgtgaaagggaaagaactgcttaaaacgctgtgcaaatattacatcgtggacaccggcctccgtaacgttgttttcgaggcctccggcgacatcggctcgacaatagaaaccgtcgtatattttgaactcctccgcagaggatacaaggtattcaccggcaagcaatacgacaaagagatagacttcctcgccgtaaaaaacgacgagcggcgctacgttcaagtcgccctatcgatattggacgaaacggtaagaaaacgcgaactcgctccgctcgcctccgtaaaagacagctacgaaaaaacgattttgagcatggacacgctgaaatttcccgacgtggacgggataaaacacaggaatgtcgtggagtggcttttggagtga

SEQ ID NO: 74772 - protein, 233 aa, Unknown
  Obtained from environmental sample
  misc_feature (1)..(233): Xaa is any amino acid
MNFGGFPDIHALPKDTETAYNFLNGIYNTVIVKDILSRHSVKEVKLFEQLIKFLAQNTGNLVSPSNIANYINSSQRGQAVKSTTVSSYLDFLEKAYIVYPSYRYDVKGKELLKTLCKYYIVDTGLRNVVFEASGDIGSTIETVVYFELLRRGYKVFTGKQYDKEIDFLAVKNDERRYVQVALSILDETVRKRELAPLASVKDSYEKTILSMDTLKFPDVDGIKHRNVVEWLLE

SEQ ID NO: 74773 - DNA, 786 bp, Unknown
  Obtained from environmental sample
  misc_feature (1)..(786): n is a, c, g, or t
ttgcggaggataacgacctatctggacagccgccaccccgcgacctttatccccatgatgcgccacatggcctgcggacagcgcgcctgggcacggctcacctggtcggtgaaggacggcagaccccaggaacgggaacccagcattctcggcgcggagcaggacaggatatctttcatcatgggcatgaattccatcgcgaccaaactggtgggcgaagtcatgacctcgttgcgcaaggccggcattttgtctttcggcaagcaaaacatccgttttctggacataggcggcgcatccggcacatacacggaagcctttctcaaggaactgccggaaagcacggctgcaatcttcgacctgcccgtcggcatcgcgcaggcgaaaaagcgtttcaccggctcggacatggaagcgcgggtcacgctcgtggaaggagacttcacgcgcgaccccctgccgtccgggttcgattttgcttggataagcgccatcatccaccagatgaaccggaacgagagccgcatgctctatgccaaggcgctggacgcgctgaaccccggcggcgtggcggccgtgcgcgattacgtgatgagcgaggatcgcctctcgccggtggatggcgccctcttcgggatcaacatgtttctgaataccccaagcggtatggtctatacgtacagggaaatcaaagaagacttggaacaggcgggattcacgcaggtgacccacgccgtggacgtgcccagcatggccgccgtggtgacggcaaaaaagccgggatag

SEQ ID NO: 74774 - protein, 261 aa, Unknown
  Obtained from environmental sample
  DOMAIN (94)...(193): Methyltransferase domain
  misc_feature (1)..(261): Xaa is any amino acid
MRRITTYLDSRHPATFIPMMRHMACGQRAWARLTWSVKDGRPQEREPSILGAEQDRISFIMGMNSIATKLVGEVMTSLRKAGILSFGKQNIRFLDIGGASGTYTEAFLKELPESTAAIFDLPVGIAQAKKRFTGSDMEARVTLVEGDFTRDPLPSGFDFAWISAIIHQMNRNESRMLYAKALDALNPGGVAAVRDYVMSEDRLSPVDGALFGINMFLNTPSGMVYTYREIKEDLEQAGFTQVTHAVDVPSMAAVVTAKKPG

SEQ ID NO: 74775 - DNA, 579 bp, Unknown
  Obtained from environmental sample
  misc_feature (1)..(579): n is a, c, g, or t
ttgtggaattcttttataaaacttttagaagcggcctctgctatttttttctgcgcctctttggacagcaccgcgccgccgatggctttccccgcggattttccccatccgaagacaatgcctaatccggattcaataaagccgttaatgctgccgcccacgagcgctaggcgcgaagcgttctcctgttcaacgccggccgcgagcagatcgacgtataacaggcccgtcatctccgcgcttgacgcgagaaagctcccgaggttgtatcccatcgaccatcctgcggcaaaacccggacccgcgccgacgcctcccgccgcggcgccgccgatggcgcctatgcctccggaaacaaggcctccggcgacgccgcctataatcgacttgcccgtcagcggcgcggactgtatcgtgcccgttatgattgcgttaagcgcgcctttgggcattctttttcccagttcgtcattggcggacttgagcgcgttaatttccacccacagctcgtcggcccgtttctgcaaatcctgcttttctttgccgaccgagaactttatccggctgtgcaggttctga

SEQ ID NO: 74776 - protein, 192 aa, Unknown
  Obtained from environmental sample
  SIGNAL (1)...(29)
  misc_feature (1)..(192): Xaa is any amino acid
MWNSFIKLLEAASAIFFCASLDSTAPPMAFPADFPHPKTMPNPDSIKPLMLPPTSARREAFSCSTPAASRSTYNRPVISALDARKLPRLYPIDHPAAKPGPAPTPPAAAPPMAPMPPETRPPATPPIIDLPVSGADCIVPVMIALSAPLGILFPSSSLADLSALISTHSSSARFCKSCFSLPTENFIRLCRF

SEQ ID NO: 74777 - DNA, 873 bp, Unknown
  Obtained from environmental sample
  misc_feature (1)..(873): n is a, c, g, or t
ttggagttctcttgtatcgcgggctcccctgcgggggggggcttcctcgatctccctctcttcccttgccgtacgggcttcccttgccgcgcgggctcttcaagttctcttgtatcgcgggcttccctagccacgcgagcttcctcgatctccctctcttcccttgcggtacgggcttccctcgccgcgcgggcttcttcgatctccctggcctcacgctccttcatggaatccagaattatggctgtaagctgcggcatggtttcagggactgaattattctgttcagggggaggcttgatctcacttacaggaggtttttcctcctgggtgctcgtatttacagggggaggcttgatctcgcttacaggtacaggaggttttccttcctgggtgttggtattaacagggggaggcttgatctcgcttacaggtacaggaggttttccttcctgggtgttggtattaacagggggaggcttgatctcgcttacaggtacaggaggttttccttcctgggtgctggtatttacaggaggaggcgtgctctcacttacaggaggttttccctcctgggtgctcgtatttacagggggaggcgtgctctcacttacaggaggttttccctcctgggtgttggtattaacagggggaggcgtgatctcgtttacaggtacaggaggttttccctcctgggtgttggtattaacagggggaggcgtgatctcgtttacaggtacaggaggttttccttcctgggtgctcgtatttacagggacaggcccgttctcacttgcaggaggttttccttcctgggtgctcgtatttacagggacaggcctgttctcacttacagaagattttccttcctga

SEQ ID NO: 74778 - protein, 290 aa, Unknown
  Obtained from environmental sample
  misc_feature (1)..(290): Xaa is any amino acid
MEFSCIAGSPAGGGFLDLPLFPCRTGFPCRAGSSSSLVSRASLATRASSISLSSLAVRASLAARASSISLASRSFMESRIMAVSCGMVSGTELFCSGGGLISLTGGFSSWVLVFTGGGLISLTGTGGFPSWVLVLTGGGLISLTGTGGFPSWVLVLTGGGLISLTGTGGFPSWVLVFTGGGVLSLTGGFPSWVLVFTGGGVLSLTGGFPSWVLVLTGGGVISFTGTGGFPSWVLVLTGGGVISFTGTGGFPSWVLVFTGTGPFSLAGGFPSWVLVFTGTGLFSLTEDFPS

SEQ ID NO: 74779 - DNA, 474 bp, Unknown
  Obtained from environmental sample
  misc_feature (1)..(474): n is a, c, g, or t
ttgctcctgtctttcccatgtatcgttacgatggcagagacggtaaatcgtcatttggaggagatggcacagactttgttcgataggttccttatcaacgaatcaacatgtgagccattgggtgttttgtctgatatggcagaaatcaatccagttcgttccctacagaaaggcaaagaagccacatacatcgatatggcgagcctatcaacaagtggctcgtttccgacaaactggacaaaaaaaacatttttgggtggcatgaaatttcaaaatggagacaccataatggctcgaataactccttgtcttgagaacggtaaagttgcttttatcaattttctagataaagatgaaatcgcctttggatcaactgaatacatcgtaatttcgccgaaacatggttattgcaacgaaatgttttacttcttagctcgttatcaggactttgttagctatgcgtcaagaacataa

SEQ ID NO: 74780 - protein, 157 aa, Unknown
  Obtained from environmental sample
  misc_feature (1)..(157): Xaa is any amino acid
MLLSFPCIVTMAETVNRHLEEMAQTLFDRFLINESTCEPLGVLSDMAEINPVRSLQKGKEATYIDMASLSTSGSFPTNWTKKTFLGGMKFQNGDTIMARITPCLENGKVAFINFLDKDEIAFGSTEYIVISPKHGYCNEMFYFLARYQDFVSYASRT

SEQ ID NO: 74781 - DNA, 840 bp, Unknown
  Obtained from environmental sample
  misc_feature (1)..(840): n is a, c, g, or t
gtgtacggtcgcagttggtcgcacaacacaaccctatatgtgaaagagttcaaaggttctgaccctgtatttatatactacctgctcaaaacgcttgatttggggaatttcgctggcggcagtgcggttccaacgctaaaccgcaaccacatacacacgctcgaagtggcgataccacctctttccaaacaaatcgaaattgggcagacgctgcgaacgttcgatgacaagatagagaacaacacaaagataaatcgtcatttggaggcaacggcgcgggcactgttcagagagtggtttgttgacttcgggccctggggcggggagatgcctacaacttggatacttggcaaggcagaggatttttttgatatttctattgggaaaactccgccacggaaagagccgcagtggttcagtacgaatccacaggatgtagtctgggtttctatttccgatatgagtagttgcggggtattcattagtaatagttcagaatacataacatctgagtcggtatcaaaattcaacgtgaaagttgttccaagtggaacagttatactgagctttaagctaaccgtaggacgtgttgctatcacaaactgtaagctgactactaacgaagctattgcacattttaagcattcagaaaatacagctatggaatacctatattgttatctaaaggcatttgattaccaatcgttgggtaatacttcgtctattgcaacagctgtaaattctaaaactatcaaagccatgccctttgttatgccagacgagaaagtcataaggaattttcacaaggcaactgctacgctgttgagcaaatacgagtaa

SEQ ID NO: 74782 - protein, 279 aa, Unknown
  Obtained from environmental sample
  DOMAIN (114)...(269): Type I restriction modification DNA specificity domain
  misc_feature (1)..(279): Xaa is any amino acid
MYGRSWSHNTTLYVKEFKGSDPVFIYYLLKTLDLGNFAGGSAVPTLNRNHIHTLEVAIPPLSKQIEIGQTLRTFDDKIENNTKINRHLEATARALFREWFVDFGPWGGEMPTTWILGKAEDFFDISIGKTPPRKEPQWFSTNPQDVVWVSISDMSSCGVFISNSSEYITSESVSKFNVKVVPSGTVILSFKLTVGRVAITNCKLTTNEAIAHFKHSENTAMEYLYCYLKAFDYQSLGNTSSIATAVNSKTIKAMPFVMPDEKVIRNFHKATATLLSKYE

SEQ ID NO: 74783 - DNA, 312 bp, Unknown
  Obtained from environmental sample
  misc_feature (1)..(312): n is a, c, g, or t
gtggagatccttgctctatttaagttatttacccacccatggatgattgcctgcatgagctgctacgcgatgagcatcctgctttgggcgtggaccatcaagcaagtgccactcactttcgcctttcctttttccgcgctgggttttatttgcgtcgcgctgatggccaagctgctgctcggcgaggccatcccaaagctgcgctgggccgcgtacgcggtgataatacttggtgtgtgcctgcaggcttttacgggcgaaacaagtgcaaatgcggcgaccccagtcgccagcgatgacgcaggggactag

SEQ ID NO: 74784 - protein, 103 aa, Unknown
  Obtained from environmental sample
  misc_feature (1)..(103): Xaa is any amino acid
MEILALFKLFTHPWMIACMSCYAMSILLWAWTIKQVPLTFAFPFSALGFICVALMAKLLLGEAIPKLRWAAYAVIILGVCLQAFTGETSANAATPVASDDAGD

SEQ ID NO: 74785 - DNA, 675 bp, Unknown
  Obtained from environmental sample
  misc_feature (1)..(675): n is a, c, g, or t
atggtagaaaggatgagggcggccttcatcatgggcgacaagcacgccgctgtacatattgccaggaaagcggccatcgtggccaaagaccttgccgctgcgtataaagcgttgtcggaatccggcggctctggcgggggtggcgcagtcccaagcttaaatattgccggtggagaagaagcgaaaggcaaagaagctgaaagcgcagatggcgcagcagatacagaagtggcggcgggagtgaaagaagctacagacgcagaagaagcgccagacggggcggacgaagcagatgccgagagggcggctgaggcaagcccagaaaaagccgcagccgaggccgaaaaggcgcagaaagaagccgagaaacaagaagagcaagaagaacaaagtgattcagaaaaacaaaaacgtgaagatgaattgaaaagtgccgcaaaagaattggcccaaaaagcaaaaggagtccgcagcggctcagtggacgctaacaaagaagaaatcatcggctggctgagggccatcgcgtcaatggcgcgcgccacgctgaagcgaaagaatccgctaggcggcaacgaaccagagaatccgcaagaagaggcgaaaatggcgaaagacgttgaagacgcggctgcggagatagaggaagctattgccgatatatctgctgcctag

SEQ ID NO: 74786 - protein, 224 aa, Unknown
  Obtained from environmental sample
  misc_feature (1)..(224): Xaa is any amino acid
MVERMRAAFIMGDKHAAVHIARKAAIVAKDLAAAYKALSESGGSGGGGAVPSLNIAGGEEAKGKEAESADGAADTEVAAGVKEATDAEEAPDGADEADAERAAEASPEKAAAEAEKAQKEAEKQEEQEEQSDSEKQKREDELKSAAKELAQKAKGVRSGSVDANKEEIIGWLRAIASMARATLKRKNPLGGNEPENPQEEAKMAKDVEDAAAEIEEAIADISAA

SEQ ID NO: 74787 - DNA, 327 bp, Unknown
  Obtained from environmental sample
  misc_feature (1)..(327): n is a, c, g, or t
atggacaacgcagacgatgtaaacaagctaatgacaacggactatttcgatggctggttcaacgccctcaaagacaaaagggccaagaggctcatccaggcacggataaagaaagccaaggcgggcaacttcggcgactgcaagcccgctggcgaaggcgtgtccgaaatgcggatagactacgggccaggctatcggctatacttttgccagcgcggggagtgcatatacctcctgctggcgggcggcacgaaggacacgcagcagcgcgacattgagtgggcgagggccattaagagggaagtggaggcggagggcaaatggtga

SEQ ID NO: 74788 - protein, 108 aa, Unknown
  Obtained from environmental sample
  DOMAIN (51)...(102): Phage derived protein Gp49-like (DUF891)
  misc_feature (1)..(108): Xaa is any amino acid
MDNADDVNKLMTTDYFDGWFNALKDKRAKRLIQARIKKAKAGNFGDCKPAGEGVSEMRIDYGPGYRLYFCQRGECIYLLLAGGTKDTQQRDIEWARAIKREVEAEGKW

SEQ ID NO: 74789 - DNA, 957 bp, Unknown
  Obtained from environmental sample
  misc_feature (1)..(957): n is a, c, g, or t
ttgcaggccacgctggaagaaatggccgatatggccgaatgttccgccagggacgttgaagccgtgctgagcgtcatccagacctttgatcccgtgggcgtggccgcccgcacgccccaggaatgcctgctggtgcagttgcgggtgctgggctatgatcgcgatccggtgctggtttcgctggtggccgatcacctgggggacctggaagcccgccgctacaagccgcttttgcgcaagtttcgcctggacatggaggatctgcgcgaatacctggaaatcattcaatccctggatcccatgcccggcgccagctacggcgaaagcgaacccgcgtacatcagccctgatgtctatgtgtacaagcacgatggggaatttgtcattctgctcaacgaggatgggctgccgcatttgcagctcagcgctctgtatgacaacgcggccggcgccacggagcaggaaaaggaatattttctggaaaaacagcgtgccgcctcctggctgatcaagagcctgttccagcgccagcgcaccctgcgcaaggtggtggaaagcatcgtcaaatgccagcgcgagttttttgaagaaggcgtcagcaagctcaagccccttatcctgaaagatattgccgacgacatcagcatgcacgaatcaacagtcagccgcatcaccaccaataagtacatcgcgacagcccacggcgtgtatgaattgaaatttttctttaacagcgccttggaactggaagacggcagccaagtcggttccgaaagcgtcaaggccttgatccgtaaatgcatcggcgaggaggatccgcgtgaacccttgtccgatgagcgcatcggcgaaatcctgaaggaacacctgacggtcaacattgcgcggcgcacggtcgccaagtaccgcatggccatggacattccatcgtcttcgcaccgccgggcgcatttttga

SEQ ID NO: 74790 - protein, 318 aa, Unknown
  Obtained from environmental sample
  DOMAIN (1)...(146): Sigma-54 factor, core binding domain
  misc_feature (1)..(318): Xaa is any amino acid
MQATLEEMADMAECSARDVEAVLSVIQTFDPVGVAARTPQECLLVQLRVLGYDRDPVLVSLVADHLGDLEARRYKPLLRKFRLDMEDLREYLEIIQSLDPMPGASYGESEPAYISPDVYVYKHDGEFVILLNEDGLPHLQLSALYDNAAGATEQEKEYFLEKQRAASWLIKSLFQRQRTLRKVVESIVKCQREFFEEGVSKLKPLILKDIADDISMHESTVSRITTNKYIATAHGVYELKFFFNSALELEDGSQVGSESVKALIRKCIGEEDPREPLSDERIGEILKEHLTVNIARRTVAKYRMAMDIPSSSHRRAHF

SEQ ID NO: 74791 - DNA, 903 bp, Unknown
  Obtained from environmental sample
  misc_feature (1)..(903): n is a, c, g, or t
atgaagaagattttgttgattttggtggtactgcttgcggtatcatccgtggtgttcgccggcggcgggcagagcactgacagcggtaagcctaaaatcgctttaatgatgcgaaatgtagacgagcagtttttgaaagattatgcggacaatgtcaggaagctggccgcacagtatgatgtggatcttaatgtgcaggacgcccgcagcgatcagcagcttcagctcacccaggtacaaactctcttgaaccagggctacaagtacttcgtgatcattccctgtatttctgagctttctgaacaatttaacacgcttatacaggcaaagggcggtgcggcggcttattccaatacccagcccacagtcgcttccctaaaggtaggcaagaatttcttctttgcgtcctccccggaatttgtaggcggaagctaccagggcggaattatagcggactactttgacaagaacccggacaaagcgccaggtaaagtcgtaaatatgattctgattaacggccagatggggcatcccgcccaagtaaacaggcgcgccggactcctcgcggaactaagaaaccgcggctacaccgttaacatcgtcgctgaagacgctgccgaatgggcgccggacaaggccaacgagaaaatgaacgcatggatatcttctttccgcgacagattcaacgtggtcgccgcccagaacgacggcatggccctcggcgctgtgcaggcgatgattcagaatggtatggttaagaacgacaccagcgacggcacaaggctcaccgttccggtactcggtattgacgccaccggcgaatgcattgccctcatgaagcggaacgagctttacgccactgtngtacaggacgctgttggtcagtcggcggcccgcctttga

SEQ ID NO: 74792 - protein, 300 aa, Unknown
  Obtained from environmental sample
  SIGNAL (1)...(20)
  misc_feature (1)..(300): Xaa is any amino acid
MKKILLILVVLLAVSSVVFAGGGQSTDSGKPKIALMMRNVDEQFLKDYADNVRKLAAQYDVDLNVQDARSDQQLQLTQVQTLLNQGYKYFVIIPCISELSEQFNTLIQAKGGAAAYSNTQPTVASLKVGKNFFFASSPEFVGGSYQGGIIADYFDKNPDKAPGKVVNMILINGQMGHPAQVNRRAGLLAELRNRGYTVNIVAEDAAEWAPDKANEKMNAWISSFRDRFNVVAAQNDGMALGAVQAMIQNGMVKNDTSDGTRLTVPVLGIDATGECIALMKRNELYATVVQDAVGQSAARL

SEQ ID NO: 74793 - DNA, 855 bp, Unknown
  Obtained from environmental sample
  misc_feature (1)..(855): n is a, c, g, or t
atggcggaggcattgagatttatggagatgaagggggcaacctttaccatgaccggcggcgtaatagaaaataataaggcaaatcgaaccggcggcggcatttacgcggtatataacgcatcgatcaatctaaaagggaacgcggcaatacggaacaatgatacaaattcgggcggcggtatttatattagcaatagttcctgtagcattagtgaaaatgtaattattaccggcaacacagcggaatttggcggcgggataaatcaaggaagagattcgatcattaccatgtcaggaggcttaatagaaaaaaacaaagcgcagcggacaggcggcggcatatatgccgattccgcgtcttttaccatgagcggtaacgcgataatccgggacaatacagcgaacagaggcggcggtgttcatgttaccgacgggacaaggtttaatatatcgggttccgctataatgcaaaataataccgcatcatcatccggtggtggtttttccattagaaatggctcccttaccattagtgagaatgttgttatcaccggcaacacagcggaatttggcggcgggatatattcagacgaaaaagaatctgttattaccctgtccggaggcattatagaaaaaaacagggcgcagcgttcagggggcggcatatatgccgattccgcgtcctttaccatgagcggtaacgcggtcatccgtgagaatgccgccgagcggaattctggcggcggagtatttttagtctcccaaagcgttatgaccatgaacggcggaaacattgaaaacaactccgccgcaagatacgggggcggaatatattctcaggaaaaaggcgcgtga

SEQ ID NO: 74794 - protein, 284 aa, Unknown
  Obtained from environmental sample
  misc_feature (1)..(284): Xaa is any amino acid
MAEALRFMEMKGATFTMTGGVIENNKANRTGGGIYAVYNASINLKGNAAIRNNDTNSGGGIYISNSSCSISENVIITGNTAEFGGGINQGRDSIITMSGGLIEKNKAQRTGGGIYADSASFTMSGNAIIRDNTANRGGGVHVTDGTRFNISGSAIMQNNTASSSGGGFSIRNGSLTISENVVITGNTAEFGGGIYSDEKESVITLSGGIIEKNRAQRSGGGIYADSASFTMSGNAVIRENAAERNSGGGVFLVSQSVMTMNGGNIENNSAARYGGGIYSQEKGA

SEQ ID NO: 74795 - DNA, 789 bp, Unknown
  Obtained from environmental sample
  misc_feature (1)..(789): n is a, c, g, or t
gtgaaaaaaaccacgagggattctccataccacatgtcctttgacnacgtaaggttttcctacaaccncagtccgtcacatccccctattattgatgacatcagtttcagcctgaaaaagggtgagaccttgggtatcctcggggaaacgggaagcggaaaatccacaatcctgcagcttttgctccgcttctatgatcctgactctgggtgtatcagaatagacggggatgatatccggggaatagagccggcaaaactctattcgaagttcggtctggtttttcagaaggacgtactctttgcggacacggtgagggagaatatctcctttggccgggaatatgtggatgaagaattacacagggcagtacgtttagcccaggcggaagaatttgtaaatgaccaggaagaagggcttgattatgacctgacttcccggggaaccaatttgtccgggggccagcgccaacggctccttattgccagggcactggcagccaaagaggggacgaatcctgaaattctcattctggatgattcgtccagcgccctggattaccgcaccgacgcggaactgcgccgggggctcagggaacatttcaaagaatctactattataattattgcccagcgggtcagttcggtaatgcaaagcgatcatatcctggtgctggaacaagggcgtatcctgggttacggaacccatgaggaactggtgaaatcctgttccctttacaacgagatacatgaatcccagatggggaggaggctcaatcgtgcgagctga

SEQ ID NO: 74796 - protein, 262 aa, Unknown
  Obtained from environmental sample
  DOMAIN (41)...(228): ABC transporter
  misc_feature (1)..(262): Xaa is any amino acid
MKKTTRDSPYHMSFDXVRFSYNXSPSHPPIIDDISFSLKKGETLGILGETGSGKSTILQLLLRFYDPDSGCIRIDGDDIRGIEPAKLYSKFGLVFQKDVLFADTVRENISFGREYVDEELHRAVRLAQAEEFVNDQEEGLDYDLTSRGTNLSGGQRQRLLIARALAAKEGTNPEILILDDSSSALDYRTDAELRRGLREHFKESTIIIIAQRVSSVMQSDHILVLEQGRILGYGTHEELVKSCSLYNEIHESQMGRRLNRAS

SEQ ID NO: 74797 - DNA, 855 bp, Unknown
  Obtained from environmental sample
  misc_feature (1)..(855): n is a, c, g, or t
atgggggatctggattttgcctattccctgatcccaggcaaaaagcggctcaacctccatgcccattatgccattaccgacaaggcggttggccgggatgaactgggaaatgagtactttgctccctggctttcctgggccaaggagcggaatatcggccttgactttaacgcaacccccttttctcatcccatggcagcaagcggccttaccctttcgtccccggacaaaaccgtgcgggatttctggatccgccactgcaaggcaacgaggaagatcgcggcgtggttcggggaacaacaacgcagcccatgtcttcatgatatatggattcccgacggcctcaaggatgttcccgctgatcggcttgggccaagggaacggctcagggacagcctggatgagatctattcggtaaaataccccaaagatcatattgttgatgtggtggaaagcaagctctttggcatagggcttgaaagttacacctccggttcatcggagttctatattgcctatgcggccacccgcgggatctccgtgcttttggataacggccattaccatcccacggaactggtgtcggataaaatttccgcccttctttcgatatttgataaaattgcccttcatgtgacgcggtctgtgcattgggattcggaccacgtggtcctttttgaagatgaggtcagggaaattgccaaagagataatcagaaataaagcggaaaaccgggtcttcatcgggcttgattattttgacgcaagcataaaccgcattgccgcctgggcagtgggggcacggagttttcagaaagccctgctttacgccgtgctcattcccacgaggaactaa

SEQ ID NO: 74798 - protein, 284 aa, Unknown
  Obtained from environmental sample
  DOMAIN (2)...(283): L-rhamnose isomerase (RhaA)
  misc_feature (1)..(284): Xaa is any amino acid
MGDLDFAYSLIPGKKRLNLHAHYAITDKAVGRDELGNEYFAPWLSWAKERNIGLDFNATPFSHPMAASGLTLSSPDKTVRDFWIRHCKATRKIAAWFGEQQRSPCLHDIWIPDGLKDVPADRLGPRERLRDSLDEIYSVKYPKDHIVDVVESKLFGIGLESYTSGSSEFYIAYAATRGISVLLDNGHYHPTELVSDKISALLSIFDKIALHVTRSVHWDSDHVVLFEDEVREIAKEIIRNKAENRVFIGLDYFDASINRIAAWAVGARSFQKALLYAVLIPTRN

SEQ ID NO: 74799 - DNA, 807 bp, Unknown
  Obtained from environmental sample
  misc_feature (1)..(807): n is a, c, g, or t
gtggtacatggggcacggctggaagctggccagcccgtaccccgtgatcatactggactccatcatactcagccaccggatgcagcccctcggcccagggtcggacttcttcaacctgttcggccactcccacaacaaagtcccgcaccggcccgaccaccggcacatgaacgtctcctgcgaggtgacggactaccgccccgtgagcctggagtacgtcctcgaccaaaagaagcgccactgactaccaacagaccaccaacaaaggagagcgaccatgacagacaccacgaaacacagcggaccgcgccacagcctctgggtgccggcgcccaaccaagacgaccccaacggcgagcccgaatacgtcaggtcggaggcggcattccacagctcgtcggcggcggcactcgcgacctcgatgagcctcgcgctgggcgtcgagaccggcatgaaggacgagggcaggggcgagtgcgcgaggctgttcataaacgccatgaaggacgaccagaaccacctggacctcgtggcggccgtcagcgggaggatgcggaagtgccacaaagagcgcgagacccaggactgcgcgaccagcgaccccgagacgtgcatgaagctgtgcccccacagggaggccctgatcctgtcctggacaatccacaggcacgggctggaggcgaaggcaaaaggcaccgacgcgcagcaaacggaggaggactccaacatgctggaggtagcgatggaggagatactgaagcgctcaatgcccgccaaggggcaggaatgaatggagacacagaatga

SEQ ID NO: 74800 - protein, 268 aa, Unknown
  Obtained from environmental sample
  misc_feature (1)..(268): Xaa is any amino acid
MVHGARLEAGQPVPRDHTGLHHTQPPDAAPRPRVGLLQPVRPLPQQSPAPARPPAHERLLRGDGLPPREPGVRPRPKEAPLTTNRPPTKESDHDRHHETQRTAPQPLGAGAQPRRPQRRARIRQVGGGIPQLVGGGTRDLDEPRAGRRDRHEGRGQGRVREAVHKRHEGRPEPPGPRGGRQREDAEVPQRARDPGLRDQRPRDVHEAVPPQGGPDPVLDNPQARAGGEGKRHRRAANGGGLQHAGGSDGGDTEALNARQGAGMNGDTE

SEQ ID NO: 74801 - DNA, 360 bp, Unknown
  Obtained from environmental sample
  misc_feature (1)..(360): n is a, c, g, or t
gtgaaaagatataaaaaccatcatgaataccgatgcgaaagaaccgtaggcaaggaaaccacgacaacttacaagtattacattagcagcaaagatgcctgcactgatgagtttggccggataatccgcaaccattggtcgatagagaacaatttacattgggcgcttgacgtgagttttggagaggacagatgccgggcgcgtaaagacaactcgccgaagaatctaacggtattgaggaaaatcgcattgggacggctccgtgccattgacgcaggtaaacgggtaagcattaaacggaaaatgtttagagcaagttttaaccttgatttcttacaaaaagtcctttttggagagtaa

SEQ ID NO: 74802 - protein, 119 aa, Unknown
  Obtained from environmental sample
  misc_feature (1)..(119): Xaa is any amino acid
MKRYKNHHEYRCERTVGKETTTTYKYYISSKDACTDEFGRIIRNHWSIENNLHWALDVSFGEDRCRARKDNSPKNLTVLRKIALGRLRAIDAGKRVSIKRKMFRASFNLDFLQKVLFGE

SEQ ID NO: 74803 - DNA, 948 bp, Unknown
  Obtained from environmental sample
  misc_feature (1)..(948): n is a, c, g, or t
atgcgccccccgatcgagcgctgcgcccagatacaattcgcgggcgacggcggtgccctgtcccacccatacggaacgcaccgttttcccttccgggccggttngacgcgtaacaagccgcatgccgagaatggccccggcggcggcttccacttccgcaagcgtcttgcataccttgatgccgccgcccttgccccggcccccggcgtggatttgcgccttcaccacccacaccgggccgggcagggcgcgcgccacgcgcagggcctcttccaccgtgcgggcatggccgccctccggcacgggaattccatacgccttcagcagttctttcgcttgatattcatggatgttcacaaggtaccccggatgcaaatcccgccggcgcatcccgcgcgcttgcgcgtcatgccggagctttgttctgcttgccgtctacggatgactgcggcgcgtcccgcacgcgcgcgcgtcatgccggaacggcctgcacgcattgcgctattcttccttcttttccttcgcgtgttccgcgatgaccttttcggccaccggcggcggcgcttcttcatagtgggcgaattccatggtgaacacaccctggccgcccgtcatggaacgcaggtcgggcgcgtagcgcaggacttcgttcatggggatgtgggccttgatttcggtgatcccggcctgggagtcggagccgagcaccttgccccggcgggaggacagatcgccgatcacatcgcccatgttcgcatcgggcacggacacgctgagcaggacgatgggttcaagcagggtgggtttcagggtttccatgccttttttgaaggccagggagcctgcgaccttaaaggccatttccgaagagtccacggtatggtagctgccgtcatagacgcgcgcctgaaatcaacgaccgggcaccggccagaagctctcccataa

SEQ ID NO: 74804 - protein, 315 aa, Unknown
  Obtained from environmental sample
  misc_feature (1)..(315): Xaa is any amino acid
MRPPIERCAQIQFAGDGGALSHPYGTHRFPFRAGXTRNKPHAENGPGGGFHFRKRLAYLDAAALAPAPGVDLRLHHPHRAGQGARHAQGLFHRAGMAALRHGNSIRLQQFFRLIFMDVHKVPRMQIPPAHPARLRVMPELCSACRLRMTAARPARARVMPERPARIALFFLLFLRVFRDDLFGHRRRRFFIVGEFHGEHTLAARHGTQVGRVAQDFVHGDVGLDFGDPGLGVGAEHLAPAGGQIADHIAHVRIGHGHAEQDDGFKQGGFQGFHAFFEGQGACDLKGHFRRVHGMVAAVIDARLKSTTGHRPEALP

SEQ ID NO: 74805 - DNA, 375 bp, Unknown
  Obtained from environmental sample
  misc_feature (1)..(375): n is a, c, g, or t
gtggactcttcggaaatggcctttaaggtcgcaggctccctggccttcaaaaaaggcatggaaaccctgaaacccaccctgcttgaacccatcgtcctgctcagcgtgtccgtgcccgatgcgaacatgggcgatgtgatcggcgatctgtcctcccgccggggcaaggtgctcggctccgactcccaggccgggatcaccgaaatcaaggcccacatccccatgaacgaagtcctgcgctacgcgcccgacctgcgttccatgacgggcggccagggtgtgttcaccatggaattcgcccactatgaagaagcgccgccgccggtggccgaaaaggtcatcgcggaacacgcgaaggaaaagaaggaagaatag

SEQ ID NO: 74806 - protein, 124 aa, Unknown
  Obtained from environmental sample
  DOMAIN (26)...(113): Elongation factor G C-terminus
  misc_feature (1)..(124): Xaa is any amino acid
MDSSEMAFKVAGSLAFKKGMETLKPTLLEPIVLLSVSVPDANMGDVIGDLSSRRGKVLGSDSQAGITEIKAHIPMNEVLRYAPDLRSMTGGQGVFTMEFAHYEEAPPPVAEKVIAEHAKEKKEE

SEQ ID NO: 74807 - DNA, 396 bp, Unknown
  Obtained from environmental sample
  misc_feature (1)..(396): n is a, c, g, or t
atgcgccggcgggatttgcatccggggtaccttgtgaacatccatgaatatcaagcgaaagaactgctgaaggcgtatggaattcccgtgccggagggcggccatgcccgcacggtggaagaggccctgcgcgtggcgcgcgccctgcccggcccggtgtgggtggtgaaggcgcaaatccacgccgggggccggggcaagggcggcggcatcaaggtatgcaagacgcttgcggaagtggaagccgccgccggggccattctcggcatgcggcttgttacgcgtcnaaccggcccggaagggaaaacggtgcgttccgtatgggtgggacagggcaccgccgtcgcccgcgaattgtatctgggcgcagcgctcgatcggggggcgcatgcctga

SEQ ID NO: 74808 - protein, 131 aa, Unknown
  Obtained from environmental sample
  DOMAIN (19)...(129): Phosphoribosylglycinamide synthetase, ATP-grasp (A) domain
  misc_feature (1)..(131): Xaa is any amino acid
MRRRDLHPGYLVNIHEYQAKELLKAYGIPVPEGGHARTVEEALRVARALPGPVWVVKAQIHAGGRGKGGGIKVCKTLAEVEAAAGAILGMRLVTRXTGPEGKTVRSVWVGQGTAVARELYLGAALDRGAHA
